United States Patent Application Publication US 2018/0126003 A1 - sequence listing, part 164

SEQ ID NO: 287924 - DNA, 2679 bp, Artificial Sequence
  derived and/or modified sequence
ggaaagcataagctgctgtcaaccggtcccacagagccttggtcaattcgggagaagctgtgcctggcctcgtccgtaatgagaagtggtgaccagaattgggtgtcagtctcaagagctatcaagcccttcgcagagcccggaagacctccagactggttctcacaaaagcattgtgcttcacagtattccgaattgctagagaccacagagacccccaagcggaagcgcggagagaagggagaggtggttgaaaccgttgaggatgtaatcgtacggaagctgactgcagagcgcgtagaggaattaaagaaggtgataaaggagacacaggagcgatataggcgattgaaaagggatgcagagctgatccaggccggacacatggactctaggctagacgagctatgcaacgatattgcgacgaaaaaaaaactggaagaagaagaggctgaggtgaagcgtaaagcaactgatgctgcttaccaggccaggcaagcggtaaaaacgccccctcggcgactcccaaccgtgatggtcagaagccccatagattctgcgagtcccggaggggactatccactgggagacctaacacctacgaccatggaggaagccacaagcggcgtgacccccggaacccttcccagcactcccgtgacctcattccctgggatccccgatactctgcctcccggatctgctcctctggaagcccctatgaccccggtcactgatgactccccgcaaaaaaagatgctcggccagaaggctactcctcccccatccccattactgagtgaactcctcaagaagggctccctgctgccaacctctcctcgcctggtcaacgaaagcgagatggcagttgcctctgggcacctcaactccactggcgttctgctggaggtaggtggcgtactccccatgattcatgggggagagattcagcagaccccgaacactgtcgccgcttcacctgcggcaagtgaaagcgtgagtcaggcaacaatcgtgatgatgccagctttgccggctcctagctcagcaccagcagtgtctacaacggagagcgtggctccagtgtctcaaccagacaactgcgttcctatggaagctgtgggcgacccgcacactgtcaccgtctcaatggattcaagtgagattagcatgattataaatagcattaaagaggagtgcttccgctctggcgtggcagaggccccagttggatcaaaagccccatccatcgatgggaaggaagagttggatttggcggaaaagatggatatagcagttagctataccggggaggagctggactttgagaccgtgggcgacatcatagccattattgaggataaggtggacgatcaccctgaagtactggacgtcgccgcagtagaagctgccctgtcattttgcgaagagaatgacgacccccagtctctgcctggaccctgggaacacccaattcagcaggagcgagataagccggtcccccttcccgcacctgaaatgaccgtcaagcaagaaaggctggattttgaagagactgaaaataaaggtattcacgagctagtggatatacgagaaccctcggcggagataaaggtggaaccagctgagcctgagccagtgatttccggagcagagatagtcgccggtgttgtgcccgctacctctatggagcccccagaactaaggtcccaggacctcgatgaagaactgggtagtaccgctgcgggagaaatcgtggaagcagatgtggccattggcaagggtgatgagactccattgaccaacgtgaaaactgaagccagccctgaatcgatgctgagcccctcccacggttcgaatcccattgaggatcccctggaggcagaaacacaacacaagtttgagatgtccgactccctaaaagaggaatccggaactatatttggtagccaaattaaagacgcgccaggggaggatgaagaggaggatggcgtctcggaggcagcctcactcgaggagccaaaggaagaggatcaaggggaggggtacctgtccgaaatggacaacgagcccccagtgtcggagagtgatgatgggttttccattcataacgccacacttcaaagtcacactctcgccgactctattcccagttctcctgcctcgtcccagtttagcgtgtgtagtgaggatcaagaggctatacaggctcaaaaaatctggaagaaagctataatgcttgtctggcgcgctgccgctaatcatcgatacgctaatgtgttcttacagcccgttaccgacgacattgcccctggctaccattcaattgtgcagcgcccaatggatctgagtacgattaagaaaaatatcgaaaatggcctaatccggagcacagccgaattccagcgggacatcatgctgatgttccaaaacgccgttatgtataactcgagcgatcatgatgtctatcacatggccgtcgaaatgcaacgggacgttctggaacaaatccaacagtttctcgctacccaactcatcatgcaaacatcagagagcgggatcagcgccaaatccttgcgagggagagactccacccgcaaacaggacgcatccgagaaagacggcggaactcggggtcggagatgcgccatagaggctgacatgaagatgaaaaaatag

SEQ ID NO: 287925 - DNA, 2585 bp, Artificial Sequence
  derived and/or modified sequence
ctggcaaaaaaaattactttgaaaaagaaattggaagaagaggaggctgaagtaaagaggaaggctacagatgctgcataccaggctcgtcaagcagtaaaaacacccccccggaggttacccactgtgatggttcgctctcctatagattctgcctccccaggaggtgattatccacttggggacttgactccaaccactatggaagaggctacctctggggtaacccccgggactttgccgagtaccccagtcacctcgtttcctgggattcctgacacccttcctccaggctctgcacccttagaagcccccatgaccccagtaacagatgattcaccccagaaaaagatgcttggacagaaagcaactccacccccctcccctctgctgtcagagctcttgaagaagggcagcctcctgcctactagccccagactggtcaatgagagtgaaatggctgtggcttctggccacctgaacagtacaggtgtcctcctggaggtaggcggggtccttcccatgatacatggtggggagatacagcaaacacccaatactgttgcagcctcccctgctgcatcagagtctgtgtcccaagctaccattgtcatgatgcctgcgctgccagcaccatcctctgctccggctgtctccactactgaaagtgtagctccagtgagtcaacccgacaactgtgttcccatggaggctgtgggggatccacatactgtgactgtttccatggacagcagtgaaatatccatgatcatcaattctatcaaagaagagtgttttcgatcaggggtagcagaggctcctgttggatcaaaggctcccagcatagatgggaaggaagaattagatctggctgagaagatggatattgctgtgtcttacacaggtgaagagctggattttgagactgttggagacatcattgccatcattgaggacaaggtagatgatcatcctgaagtgctggatgtggcagcagtggaagcagcactgtcattttgtgaagaaaatgatgatcctcagtccctgcctggcccctgggagcatcctatccagcaggagcgggacaagccagtacctctccctgcaccagaaatgacggtcaagcaagagagactggactttgaggaaacggaaaacaagggaatacatgaactggtggacatcagggagcccagtgcagagatcaaggtggaacctgcagaaccagagccagtcatttcaggagccgaaatagtagctggagttgttccagccacaagtatggagccaccagaactcaggagtcaggacttagatgaggaactgggaagtactgcagctggagagattgttgaagcagatgttgccattgggaaaggcgatgagactccacttacaaatgtgaagacagaggcatcccctgaaagcatgttgtctccatcacatggctcaaatcccattgaagatcctttagaggcagagactcagcacaagtttgaaatgtcagactcattgaaagaagaatcagggactatttttggaagccagataaaggatgccccaggtgaggatgaggaggaagatggtgtcagtgaagcggccagcctagaggagcctaaggaagaggatcaaggagaaggctacttgtcagaaatggataatgaacctcctgtgagcgagagtgatgatggcttcagcatacacaatgctacactgcagtcacacacactggcagactccatccccagcagccctgcttcttcacagttctctgtctgtagtgaggatcaggaagctattcaggcacagaaaatttggaagaaagccatcatgcttgtatggagagctgcagctaatcataggtatgccaatgtcttcctgcagcctgttacagatgacatagcacctggctaccacagcattgtgcagaggcctatggatttgtcaactattaagaaaaacatagaaaatggactgatccgaagcacagctgaatttcagcgtgacattatgctgatgtttcagaatgctgtaatgtacaatagctcagaccatgatgtctatcacatggcagtggagatgcagcgagatgtcttggaacagatccagcaattcttggccacgcagttgattatgcaaacatccgagtctgggatcagtgctaaaagtcttcgagggagagattctacccgcaaacaggatgcttcagagaaggatggaggaaccaggggacgccgctgtgccattgaagcagatatgaagatgaaaaagtgaagcctcagagttaccctctttgagccgaacctaaaataaaagtaaacaagatagagcttgggcttgcgggcccagttccagaggtggaagttacagaagaggaggtacctgggccacacgacatgagctggaaaatctctcttagagagttggagtagcacaattgcctgttttagggcagaaaccatgggctatgttaatgtcctaatgtgtagctagcagatcgtagctagtttgtattgtcttgtcaattgtacagactttttaaaaaaaacaaccaccagtgaaatgtgtgtgtatacaataaactg

SEQ ID NO: 287926 - DNA, 3005 bp, Artificial Sequence
  derived and/or modified sequence
ggcaaacacaagctgctaagcactggccccacagagccatggtccatccgagagaagctatgtttagcatcttctgtcatgagaagtggcgatcaaaattgggtatcagttagcagagcaatcaagccctttgcagaacctggccgccctccagactggttctctcaaaaacattgtgcttcccagtactcggagcttttagagaccactgagacaccaaaacggaaacgaggtgaaaagggagaagtggtggaaactgttgaagatgttattgttcggaaattgactgctgagcgagttgaagaactaaagaaagtgataaaggaaacccaggagagatatagacggctaaagagagatgcagaactaattcaagctggacacatggacagcagactggatgagctttgcaatgacattgcaacgaaaaagaaattggaagaagaggaggctgaagtaaagaggaaggctacagatgctgcataccaggctcgtcaagcagtaaaaacacccccccggaggttacccactgtgatggttcgctctcctatagattctgcctccccaggaggtgattatccacttggggacttgactccaaccactatggaagaggctacctctggggtaacccccgggactttgccgagtaccccagtcacctcgtttcctgggattcctgacacccttcctccaggctctgcacccttagaagcccccatgaccccagtaacagatgattcaccccagaaaaagatgcttggacagaaagcaactccacccccctcccctctgctgtcagagctcttgaagaagggcagcctcctgcctactagccccagactggtcaatgagagtgaaatggctgtggcttctggccacctgaacagtacaggtgtcctcctggaggtaggcggggtccttcccatgatacatggtggggagatacagcaaacacccaatactgttgcagcctcccctgctgcatcagagtctgtgtcccaagctaccattgtcatgatgcctgcgctgccagcaccatcctctgctccggctgtctccactactgaaagtgtagctccagtgagtcaacccgacaactgtgttcccatggaggctgtgggggatccacatactgtgactgtttccatggacagcagtgaaatatccatgatcatcaattctatcaaagaagagtgttttcgatcaggggtagcagaggctcctgttggatcaaaggctcccagcatagatgggaaggaagaattagatctggctgagaagatggatattgctgtgtcttacacaggtgaagagctggattttgagactgttggagacatcattgccatcattgaggacaaggtagatgatcatcctgaagtgctggatgtggcagcagtggaagcagcactgtcattttgtgaagaaaatgatgatcctcagtccctgcctggcccctgggagcatcctatccagcaggagcgggacaagccagtacctctccctgcaccagaaatgacggtcaagcaagagagactggactttgaggaaacggaaaacaagggaatacatgaactggtggacatcagggagcccagtgcagagatcaaggtggaacctgcagaaccagagccagtcatttcaggagccgaaatagtagctggagttgttccagccacaagtatggagccaccagaactcaggagtcaggacttagatgaggaactgggaagtactgcagctggagagattgttgaagcagatgttgccattgggaaaggcgatgagactccacttacaaatgtgaagacagaggcatcccctgaaagcatgttgtctccatcacatggctcaaatcccattgaagatcctttagaggcagagactcagcacaagtttgaaatgtcagactcattgaaagaagaatcagggactatttttggaagccagataaaggatgccccaggtgaggatgaggaggaagatggtgtcagtgaagcggccagcctagaggagcctaaggaagaggatcaaggagaaggctacttgtcagaaatggataatgaacctcctgtgagcgagagtgatgatggcttcagcatacacaatgctacactgcagtcacacacactggcagactccatccccagcagccctgcttcttcacagttctctgtctgtagtgaggatcaggaagctattcaggcacagaaaatttggaagaaagccatcatgcttgtatggagagctgcagctaatcataggtatgccaatgtcttcctgcagcctgttacagatgacatagcacctggctaccacagcattgtgcagaggcctatggatttgtcaactattaagaaaaacatagaaaatggactgatccgaagcacagctgaatttcagcgtgacattatgctgatgtttcagaatgctgtaatgtacaatagctcagaccatgatgtctatcacatggcagtggagatgcagcgagatgtcttggaacagatccagcaattcttggccacgcagttgattatgcaaacatccgagtctgggatcagtgctaaaagtcttcgagggagagattctacccgcaaacaggatgcttcagagaaggatggaggaaccaggggacgccgctgtgccattgaagcagatatgaagatgaaaaagtgaagcctcagagttaccctctttgagccgaacctaaaataaaagtaaacaagatagagcttgggcttgcgggcccagttccagaggtggaagttacagaagaggaggtacctgggccacacgacatgagctggaaaatctctcttagagagttggagtagcacaattgcctgttttagggcagaaaccatgggctatgttaatgtcctaatgtgtagctagcagatcgtagctagtttgtattgtcttgtcaattgtacagactttttaaaaaaaacaaccaccagtgaaatgtgtgtgtatacaataaactgaaaaaaaaaactagc

SEQ ID NO: 287927 - DNA, 924 bp, Artificial Sequence
  derived and/or modified sequence
atgggcgtgatcggcatccagctggtggtgaccatggtgatggccagcgtgatgcagaagatcatcccccactacagcctggccagatggctgctgtgcaacggcagcctgagatggtaccagcaccccaccgaggaggagctgagaatcctggccggcaagcagcagaagggcaagaccaagaaggacagaaagtacaacggccacatcgagagcaagcccctgaccatccccaaggacatcgacctgcacctggagaccaagagcgtgaccgaggtggacaccctggccctgcactacttccccgagtaccagtggctggtggacttcaccgtggccgccaccgtggtgtacctggtgaccgaggtgtactacaacttcatgaagcccacccaggagatgaacatcagcctggtgtggtgcctgctggtgctgagcttcgccatcaaggtgctgttcagcctgaccacccactacttcaaggtggaggacggcggcgagagaagcgtgtgcgtgaccttcggcttcttcttcttcgtgaaggccatggccgtgctgatcgtgaccgagaactacctggagttcggcctggagaccggcttcaccaacttcagcgacagcgccatgcagttcctggagaagcagggcctggagagccagagccccgtgagcaagctgaccttcaagttcttcctggccatcttctgcagcttcatcggcgccttcctgaccttccccggcctgagactggcccagatgcacctggacgccctgaacctggccaccgagaagatcacccagaccctgctgcacatcaacttcctggcccccctgttcatggtgctgctgtgggtgaagcccatcaccaaggactacatcatgaacccccccctgggcaaggagatcagccccagcggcagatag

SEQ ID NO: 287928 - DNA, 924 bp, Artificial Sequence
  derived and/or modified sequence
atgggagtaatcgggatacagttggtggtgaccatggtgatggccagcgtaatgcagaaaatcatccctcattactccctcgctcgatggcttctgtgcaacggctctctcaggtggtaccagcatccgacagaggaggaactgcgtatactcgccgggaagcagcagaagggtaaaaccaaaaaggataggaagtataacggtcacatagagagtaaacccctaacaatacccaaggatatcgacctgcacctggaaacaaagtctgtcacagaggtagatactctcgctctgcactattttccagagtatcagtggctggttgacttcaccgtagcggccacagttgtgtatcttgttactgaggtgtactataatttcatgaaacccacacaggagatgaacatcagcctggtctggtgcctgttggttctgagctttgctatcaaggtgctatttagcctgacaacacactattttaaagtcgaggacggaggcgagcggagtgtttgtgtgacctttgggttttttttcttcgtgaaggctatggctgtcttaattgtgacggagaactacctagagttcggactggaaacaggctttaccaactttagcgactccgcaatgcagttcctcgagaagcaaggactggagtcgcaatctcccgttagcaaattaacattcaaattctttctggcaatcttttgtagttttatcggcgccttccttactttccctggcctccgactggctcagatgcatctagatgccctgaatcttgcgaccgagaagattactcagacactattgcacattaacttcttggcacctttattcatggttcttttatgggttaagcccatcacgaaggactatattatgaaccccccgctcggtaaagagatttcccccagtggcagatag

SEQ ID NO: 287929 - DNA, 924 bp, Artificial Sequence
  derived and/or modified sequence
atgggcgtcatcggcatccagctggtggtgaccatggtgatggcctctgtgatgcagaagatcatcccccactacagcctggcccgctggctgctgtgcaatggcagcctgcgctggtaccagcaccccacagaggaggagctgcgcatcctggccggcaagcagcagaagggcaagaccaagaaggacaggaagtacaacggccacatcgagagcaagcccctgaccatccccaaggacatcgacctgcacctggagaccaagtctgtgacagaggtggacaccctggccctgcactacttccctgagtaccagtggctggtggacttcaccgtggccgccaccgtggtgtacctggtgacagaggtgtactacaacttcatgaagcccacccaggagatgaacatcagcctggtgtggtgcctgctggtgctgagctttgccatcaaggtgctcttcagcctgaccacccactacttcaaggtggaggatggaggagagaggtctgtgtgtgtgaccttcggcttcttcttctttgtgaaggccatggctgtgctgattgtgacagagaactacctggagtttggcctggagaccggcttcaccaacttcagtgacagcgccatgcagttcctggagaagcagggcctggagagccagagccctgtgtccaagctgaccttcaagttcttcctggccatcttctgcagcttcatcggggccttcctgaccttccctggcctgcggctggcccagatgcacctggatgccctgaacctggccacagagaagatcacccagaccctgctgcacatcaacttcctggcccccctcttcatggtgctgctgtgggtgaagcccatcaccaaggactacatcatgaacccccccctgggcaaggagatcagccccagcggccgctag

SEQ ID NO: 287930 - DNA, 924 bp, Artificial Sequence
  derived and/or modified sequence
atgggcgtgatcggcatccagctggtggtgaccatggtgatggcctctgtgatgcagaaaatcatccctcattacagcctagctagatggttactgtgcaatggcagccttcgatggtaccaacatcctaccgaagaggagctgcgcatcttggctggcaaacagcagaaagggaagactaagaaggacaggaagtataatggtcatatagaaagcaagccgctgacgattcctaaggacatcgacctccatttggagacaaagagcgtaaccgaagtggataccctggctcttcactattttccggagtatcagtggctggtcgattttacagtggcagccaccgtggtttacctggtcaccgaggtatattacaacttcatgaaaccaacccaggaaatgaatatttcactggtttggtgccttctcgtcctgtcatttgctataaaagtcctcttctctcttacaacgcactacttcaaggtggaagatggtggggaaaggtcagtgtgcgttactttcggattttttttcttcgtgaaagccatggcagtcctaatcgttactgagaactacttagagttcgggctcgaaactggattcaccaacttcagcgattccgcaatgcagtttctggaaaagcaggggctggaatctcagagccccgtgtccaagttgacctttaaattctttctggcaatcttttgttcgtttatcggcgctttcctgacattccctggcctccgactggcacagatgcatcttgatgccttgaacctggccaccgagaagatcacccagactcttctgcatattaatttcttggcgcccttatttatggtgctgctgtgggttaaaccaattacaaaggactatattatgaacccaccgctaggcaaagaaattagcccttccggcaggtag

SEQ ID NO: 287931 - DNA, 924 bp, Artificial Sequence
  derived and/or modified sequence
atgggagtgattggtatacagctggtggtgaccatggtgatggcctcagtgatgcagaagataatacctcattacagccttgctcggtggttattgtgcaacggctcactacgatggtatcaacatccaacagaagaagagctccgcatcctggccggaaagcagcagaagggcaaaacaaaaaaagatcgaaaatacaatggccatatcgaatcgaagcctcttacaatccctaaagacatcgatttacatctggaaacaaaatcggtgaccgaggtcgacactttagcactacactatttcccagagtatcagtggctggtcgattttactgtggccgctacggtcgtgtacctcgtgactgaagtgtattacaatttcatgaagcccactcaagaaatgaatatcagtttggtctggtgtttgctggtgttgtctttcgcgatcaaggtgctgttttcacttactacccattacttcaaagtggaggatggcggtgagaggtcagtgtgcgtaacctttggcttcttcttcttcgtgaaggccatggccgtgttgatcgtaacagaaaattacctcgagtttggtctcgagaccggctttacaaacttttccgactccgccatgcaattcctggaaaagcaggggcttgaatcccagtcaccagtttctaagctcaccttcaagttcttcctcgcgatcttctgctcctttattggagcgtttctcaccttcccaggcctgcgcttggcccaaatgcacctggatgctctgaatttggctacagagaaaatcactcagacacttcttcacattaactttctggctccattgttcatggtactcctttgggtcaaacccataacgaaggactatataatgaacccaccgctcggaaaggagatctcgccttctggccgttag

SEQ ID NO: 287932 - DNA, 1049 bp, Artificial Sequence
  derived and/or modified sequence
ggcagagccggaagaccctctctttcgctgtttgagagtctctcggctcaaggaccgggaggtaagaggtttgggactgccccggcaactccagggtgtctggtccacgacctatcctaggcgccatgggtgtgataggtatacagctggttgttaccatggtgatggccagtgtcatgcagaagattatacctcactattctcttgctcgatggctactctgtaatggcagtttgaggtggtatcaacatcctacagaagaagaattaagaattcttgcagggaaacaacaaaaagggaaaaccaaaaaagataggaaatataatggtcacattgaaagtaagccattaaccattccaaaggatattgaccttcatctagaaacaaagtcagttacagaagtggatactttagcattgcattactttccagaataccagtggctggtggatttcacagtggctgctacagttgtgtatctagtaactgaagtctactacaattttatgaagcctacacaggaaatgaatatcagcttagtctggtgcctacttgttttgtcttttgcaatcaaagttctattttcattaactacacactattttaaagtagaagatggtggtgaaagatctgtttgtgtcacctttggattttttttctttgtcaaagcaatggcagtgttgattgtaacagaaaattatctggaatttggacttgaaacagggtttacaaatttttcagacagtgcgatgcagtttcttgaaaagcaaggtttagaatctcagagtcctgtttcaaaacttactttcaaatttttcctggctattttctgttcattcattggggcttttttgacatttcctggattacgactggctcaaatgcatctggatgccctgaatttggcaacagaaaaaattacacaaactttacttcatatcaacttcttggcacctttatttatggttctgctctgggtaaaaccaatcaccaaagactacattatgaacccaccactgggcaaagaaatttccccatctggaagatga

SEQ ID NO: 287933 - protein, 148 aa, Artificial Sequence
  derived and/or modified sequence
MNREDRNVLRMKERERRNQEIQQGEDAFPPSSPLFAEPYKVTSKEDKLSSRIQSMLGNYDEMKDFIGDRSIPKLVAIPKPTVPPSADEKSNPNFFEQRHGGSHQSSKWTPVGPAPSTSQSQKRSSGLQSGHSSQRTSAGSSSGTNSSG

SEQ ID NO: 287934 - DNA, 447 bp, Artificial Sequence
  derived and/or modified sequence
atgaacagagaggacagaaacgtgctgagaatgaaggagagagagagaagaaaccaggagatccagcagggcgaggacgccttcccccccagcagccccctgttcgccgagccctacaaggtgaccagcaaggaggacaagctgagcagcagaatccagagcatgctgggcaactacgacgagatgaaggacttcatcggcgacagaagcatccccaagctggtggccatccccaagcccaccgtgccccccagcgccgacgagaagagcaaccccaacttcttcgagcagagacacggcggcagccaccagagcagcaagtggacccccgtgggccccgcccccagcaccagccagagccagaagagaagcagcggcctgcagagcggccacagcagccagagaaccagcgccggcagcagcagcggcaccaacagcagcggctag

SEQ ID NO: 287935 - DNA, 447 bp, Artificial Sequence
  derived and/or modified sequence
atgaaccgggaggataggaacgtgctgaggatgaaagaacgcgagcgacgtaaccaggagatccagcagggcgaggacgcatttcccccctcctctcccctctttgccgagccatataaggttacttccaaggaggacaaactttcgtcacgaattcaatctatgttgggcaattacgacgagatgaaagacttcattggggaccgaagcatccccaaattggtggccatcccaaagcccactgtcccaccgagcgctgacgagaagagtaatcctaatttcttcgaacagcgacacgggggatcccatcagagcagcaagtggaccccagtggggcctgcccccagcaccagtcagagccaaaagaggagcagtggcctccagagtggtcacagctcacagcgcaccagtgctggcagctcatccggtactaacagctccggttag

SEQ ID NO: 287936 - DNA, 447 bp, Artificial Sequence
  derived and/or modified sequence
atgaaccgggaggacagaaatgtgctgaggatgaaggagcgggagaggaggaaccaggagatccagcagggagaagatgccttcccccccagcagccccctgtttgctgagccctacaaggtgaccagcaaagaagacaagctgagcagccgcatccagagcatgctgggcaactatgatgagatgaaggacttcatcggggacaggagcatccccaagctggtggccatccccaagcccaccgtgcccccatctgcagatgagaagagcaaccccaacttctttgagcagagacatggaggcagccaccagagcagcaagtggacccctgtgggccctgcccccagcaccagccagagccagaagaggagcagcggcctgcagagcggccacagcagccagaggaccagcgctggcagcagcagcggcaccaacagcagtggatag

SEQ ID NO: 287937 - DNA, 541 bp, Artificial Sequence
  derived and/or modified sequence
ggaatctagagcaacagcaaagctgaggtcaaactaccgtaaggatggacaccaaggaagctgtgtttgggacaaaaagaaatcaagataagcaacatgaaccgtgaagaccggaatgtgctgcgtatgaaagaacgggaaaggcggaatcaggaaattcagcagggcgaagacgccttcccacctagctctcctctctttgcagagccatacaaagttactagcaaagaagataagttatcaagtcgtattcagagtatgcttggaaactacgatgaaatgaaggatttcataggagacagatctataccaaagcttgttgcaattcccaagcctacagtaccaccatcagcagatgaaaaatctaacccaaatttctttgaacagagacatggaggctctcatcagagtagcaaatggactccagtaggacccgcacccagcacttctcagtctcagaaacggtcctcaggcttacagagtggacatagtagccagcggaccagcgcaggtagcagtagtggcactaacagtagtggtc

SEQ ID NO: 287938 - DNA, 447 bp, Artificial Sequence
  derived and/or modified sequence
atgaaccgggaggaccggaacgtgctgcggatgaaggagcgggagcgccggaaccaagaaatccagcagggtgaagacgcatttccaccctcctcaccactgttcgcagaaccctataaggtgacatctaaagaggataagctcagtagtcggatccagtccatgctgggtaattacgatgagatgaaggacttcattggtgatcgcagtatcccaaaactcgtggcgatccccaaacctactgtccctccaagtgcagacgagaaaagcaaccctaatttcttcgagcaacgacacgggggctctcaccagagtagcaaatggacaccagtcggtccagctcctagcaccagtcagagccagaagaggagttccggccttcaatccggacatagctctcagcgcaccagtgcgggttctagttcaggaacgaacagctcggggtag

SEQ ID NO: 287939 - DNA, 447 bp, Artificial Sequence
  derived and/or modified sequence
atgaaccgagaagacaggaatgtactccgcatgaaggaacgcgagaggaggaaccaggagattcaacagggagaagatgcttttcccccaagtagtccgctgttcgctgaaccctataaagtgacgtcaaaggaggataaactctcttcccggatacaaagcatgctcggtaattatgatgagatgaaggactttatcggcgacaggtccattcccaagctagttgccatcccgaaacctactgtcccccctagcgccgacgaaaagagtaaccctaacttcttcgagcaacgccacgggggttcccaccagtccagtaaatggacgccggtagggccagctccgtcaacctcacaaagccagaagcggtctagcggactgcagagcgggcactcatctcaaaggacctcagctggcagcagctctgggacaaatagtagtggttag

SEQ ID NO: 287940 - protein, 159 aa, Artificial Sequence
  derived and/or modified sequence
MEVYIPSFRYEESDLERGYTVFKIEVLMNGRKHFVEKRYSEFHALHKKLKKCIKTPEIPSKHVRNWVPKVLEQRRQGLETYLQAVILENEELPKLFLDFLNVRHLPSLPKAESCGSFDETESEESSKLSHQPVLLFLRDPYVLPAASGNQTCHLLTALY

SEQ ID NO: 287941 - DNA, 480 bp, Artificial Sequence
  derived and/or modified sequence
atggaggtgtacatccccagcttcagatacgaggagagcgacctggagagaggctacaccgtgttcaagatcgaggtgctgatgaacggcagaaagcacttcgtggagaagagatacagcgagttccacgccctgcacaagaagctgaagaagtgcatcaagacccccgagatccccagcaagcacgtgagaaactgggtgcccaaggtgctggagcagagaagacagggcctggagacctacctgcaggccgtgatcctggagaacgaggagctgcccaagctgttcctggacttcctgaacgtgagacacctgcccagcctgcccaaggccgagagctgcggcagcttcgacgagaccgagagcgaggagagcagcaagctgagccaccagcccgtgctgctgttcctgagagacccctacgtgctgcccgccgccagcggcaaccagacctgccacctgctgaccgccctgtactag

SEQ ID NO: 287942 - DNA, 480 bp, Artificial Sequence
  derived and/or modified sequence
atggaagtttatatccccagctttcgttacgaagagagcgatttggagagagggtataccgtgtttaagatcgaagtcttgatgaacgggaggaaacattttgtcgagaagcgctactcagagtttcacgccttacacaagaagctcaagaaatgcatcaagacacctgagatcccctcaaaacatgtccgtaattgggtgcctaaggtcctcgaacaacggcgacaaggcctggagacatacctccaggccgttattttagaaaatgaggagctgccgaagctgttcctggattttctcaacgtcagacaccttcccagcctcccgaaagctgagagctgcggctcttttgatgagactgagtccgaagaatctagtaaactctctcatcagccagtcctactctttttaagggatccttatgtgttaccagctgcatcaggcaatcagacctgccaccttctcacagccctttactag

SEQ ID NO: 287943 - DNA, 480 bp, Artificial Sequence
  derived and/or modified sequence
atggaagtgtacatcccaagctttcgatacgaggagtcagaccttgaaagagggtataccgttttcaaaattgaagtcctgatgaatgggaggaagcattttgtagaaaagagatactccgaatttcacgccctacacaagaaactgaagaaatgtatcaaaacaccagagattccctccaagcatgtcagaaactgggtgcccaaagtgctcgaacagcgacggcagggactagagacatacctgcaggccgtgattttggagaacgaagagctgcctaagctctttctagacttcctgaatgtgcggcacctgccctcccttcccaaggccgagagctgcgggagttttgacgagacagaatccgaggagtcgagtaagctgtcacaccagccggttctgctgttccttcgggacccttacgtgcttcccgccgcgagtgggaaccagacctgtcatctgttgactgccctgtactag

SEQ ID NO: 287944 - DNA, 480 bp, Artificial Sequence
  derived and/or modified sequence
atggaggtgtacatccccagcttccgctatgaggagagtgacctggagcggggctacaccgtcttcaagattgaggtgctgatgaatggaaggaagcactttgtggagaagcgctacagcgagttccacgccctgcacaagaagctgaagaagtgcatcaagaccccagagatccccagcaagcacgtgaggaactgggtgcccaaggtgctggagcagaggcggcagggcctggagacctacctgcaggccgtcatcctggagaatgaggagctgcccaagctgttcctggacttcctgaatgtgcgccacctgcccagcctgcccaaggccgagagctgtggcagctttgatgaaacagagagcgaggagagcagcaagctgagccaccagcctgtgctgctcttcctgcgggacccctacgtgctgcctgctgccagcggcaaccagacctgccacctgctgacagccctgtactag

SEQ ID NO: 287945 - DNA, 480 bp, Artificial Sequence
  derived and/or modified sequence
atggaggtgtacatccccagcttccggtacgaggagagcgacctggaacgaggctataccgtgtttaagattgaggtgttgatgaatggacgaaagcattttgttgagaaacgctactctgagttccacgctctccataaaaagttgaaaaagtgtataaagacacccgaaatcccttcgaaacatgttcgcaactgggtgccaaaggtgctggagcaaagaagacagggcctggagacataccttcaagccgtcatactggagaatgaggaattaccgaaattattcctggattttctcaacgtcaggcatctccccagcctcccaaaagctgaatcttgcgggagttttgacgagacagaaagtgaggagtcttctaagctctctcaccagccagtcctcttatttttaagagatccgtatgtcctgccagctgcatctgggaaccagacgtgtcatctgcttaccgccctgtactag

SEQ ID NO: 287946 - DNA, 480 bp, Artificial Sequence
  derived and/or modified sequence
atggaggtgtacatccccagcttccggtacgaggagagcgacctggaaaggggctacactgtcttcaaaatagaagtgttgatgaacggtcgcaagcacttcgtggagaaacggtattcggagttccatgccctgcacaagaaacttaaaaaatgtatcaaaactcctgaaataccttcaaagcatgtgaggaattgggtacctaaggtgttggaacagcggcggcagggcctggagacatatctccaggccgtgattctggaaaacgaggaattgcctaagctgttcctggatttcctgaacgtgcgccatttaccaagcctaccaaaggccgaatcttgcggaagcttcgatgaaactgagtccgaggagtcaagtaagctgagccaccagcctgtgctgctcttcctgcgggatccatacgtcttgcccgccgctagtggaaatcagacatgccaccttcttactgccctctattag

SEQ ID NO: 287947 - DNA, 480 bp, Artificial Sequence
  derived and/or modified sequence
atggaggtgtacattccaagctttcgatacgaagagagtgacctagagcggggatacaccgtctttaagatagaggtccttatgaatgggcgtaagcactttgttgagaaacgctactctgaattccacgccctccacaagaaactcaaaaagtgtatcaagacccccgagattcctagtaagcatgtaaggaactgggtcccaaaagtactcgaacagcggaggcagggactggaaacttaccttcaagctgtgatcctcgaaaacgaagagcttccgaaactgttcctggacttcctgaatgtacgccacctgcctagtctgcccaaagctgagtcttgtggatctttcgatgaaacggagtccgaagagtcatcaaaactgagtcatcagcccgtcctgctgtttttaagagacccctacgtcctcccagctgctagcgggaaccaaacctgtcaccttctgactgcattgtactag

SEQ ID NO: 287948 - DNA, 480 bp, Artificial Sequence
  derived and/or modified sequence
atggaagtttatattccctcgtttaggtatgaggaaagcgatcttgagagaggttacaccgtcttcaaaattgaggtgctcatgaatgggagaaagcactttgtggaaaagaggtactccgagttccatgccctgcacaaaaagctcaaaaagtgtattaagacgcccgagatcccctcaaagcatgtgcgcaactgggttccaaaggtcttagaacagcgcagacaaggcttggaaacctacctgcaggccgtgatcctggagaacgaagaactgcccaaattattcctggacttcctgaatgtgcgccacctgcccagtctgcctaaggccgaatcttgcgggtcattcgacgagaccgaaagtgaagagtctagcaagctgagccaccagcccgtgctcctgttcttaagagacccatacgtgctgccggctgcaagtgggaatcagacctgccacctgttgacagcactgtattag

SEQ ID NO: 287949 - DNA, 588 bp, Artificial Sequence
  derived and/or modified sequence
gcgcggccatggaggtctacatcccgtcctttcgctatgaagagagcgacctggagcggggatacacggtgtttaagatagaagtgctaatgaatggaagaaaacattttgttgaaaagagatacagcgaatttcatgctttgcacaaaaagcttaagaaatgtataaaaactccagaaatcccttctaaacatgttaggaactgggtccccaaagtcttggaacagcgacgacaaggcttggaaacatacttacaggctgtcattttagaaaatgaagaacttcccaaactgtttcttgatttcctaaatgtgcgacacttgccctctctaccaaaggcagaaagttgtggatcttttgatgaaacagagtctgaagagtcaagcaaactgtcccaccagcctgtgctgctgttcctcagggatccatatgtcttgcctgcagccagcggtaatcaaacctgtcatctgctaacagctctttactgatctgaccctgcaccacataaaccacgtttttaatacaggtctaacagagtgacattggtcccgggcttaataatctgccaataaaccagtgctcttggta

SEQ ID NO: 287950 - DNA, 1563 bp, Artificial Sequence
  derived and/or modified sequence
cggggccccgcgggcgcagcggggcgggaggcggggcggcccggccgtgggcggagcggcggccgcggccgtgagcctgcccccaactcgccctcagccggctggccggcgcggccatggaggtctacatcccgtcctttcgctatgaagagagcgacctggagcggggatacacggtgtttaagatagaagtgctaatgaatggaagaaaacattttgttgaaaagagatacagcgaatttcatgctttgcacaaaaagcttaagaaatgtataaaaactccagaaatcccttctaaacatgttaggaactgggtccccaaagtcttggaacagcgacgacaaggcttggaaacatacttacaggctgtcattttagaaaatgaagaacttcccaaactgtttcttgatttcctaaatgtgcgacacttgccctctctaccaaaggcagaaagttgtggatcttttgatgaaacagagtctgaagagtcaagcaaactgtcccaccagcctgtgctgctgttcctcagggatccatatgtcttgcctgcagccagcggtaatcaaacctgtcatctgctaacagctctttactgatctgaccctgcaccacataaaccacgtttttaatacagattttccaaatgtggttattgaaggagtcctccatgggatattttaccctcatctacagcccaggtagaaatcctacatggctaaaagaagcagaagcaagtttcgaagtcacagtcaaggaaatcaatacctaccaatttaacctaaacgctatgatatataacagctctagctagtggtaaagtgcacagtcccagcttaattcagggcagggacatttccattagaatggtgctcttaaaaatagaaactgaaccggggcggtggtcaggctaaggccaagtgtttaagaagtagagtgtagctgccagcgtagaaacccatgaaaaggaggccacaggagattcctgggagcactgggtgtagcaaaacaaagccactctctgcttcagtcgcaccatttgctaattgaaaatcatatcctgaatcatactgagactgatcaactttggtagcttttttgttcagatcttatgacacactactcttctcaccgtgagattttctcagccagtgatagtacattctgaaatgctggcaccaggagacggccacagacacacactgctaaatgtgaagatggaactaaactggaaattaaattatactgacaatattatggcatttttaagatcatggcattttaatttacattagagtggagttgcatcatactcaggggttagcttccaaggtcagtacataggtaaaatgggctattaggatgatccttgaaagccctttagaagggtgccatgttggaaacctgtacatccacaacaagtagcttttcctcctatgttggaaaaaaagactgtttctttgtttgaagaccaagtgaagttgttggtgtttgtttaggggccattttgttaaaaaaaaaaaaaaaaaagcacataacttttaacactagaatcagcccgcaaga

SEQ ID NO: 287951 - protein, 573 aa, Artificial Sequence
  derived and/or modified sequence
MERQSRNSDNWRWLCWCESGLSPGQSRDERCGPAGEIRAHGWIYLARRFWAREVGKMIGLEHPLIPVQHQYVVTSTISEVKALKRELPVLRDLEGSYYLRQERDGLLFGPYESQEKMKVQDSWVTNGVPPGFGKELFESDLDRIMEHIKAAMEMVPVLKKADIINVVNGPITYSPDILPMVGPHQGVRNYWVAIGFGYGIIHAGGVGKYLSDWILHGEPPFDLIELDPNRYGKWTTTQYTEAKARESYGFNNIVGYPKEERFAGRPTQRVSGLYQRLESKCSMGFHAGWEQPHWFYKPGQDTQYRPSFRRTNWFEPVGSEYKQVMQRVAVTDLSPFGKFNIKGQDSIRLLDHLFANVIPKVGFTNISHMLTPKGRVYAELTVSHQSPGEFLLITGSGSELHDLRWIEEEAVKGGYDVEIKNITDELGVLGVAGPQARKVLQKLTSEDLSDDVFKFLQTKSLKVSNIPVTAIRISYTGELGWELYHRREDSVALYDAIMNAGQEEGIDNFGTYAMNALRLEKAFRAWGLEMNCDTNPLEAGLEYFVKLNKDQNSCFAHFKEENGWVSRWAIRPY

SEQ ID NO: 287952 - protein, 613 aa, Artificial Sequence
  derived and/or modified sequence
YLIEPEKIQEMFPLLNMNKVLAGLYNPGDGHIDPYSLTMALAAGARKCGALLKYPAPVTSLKARSDGTWDVETPQGSMRANRIVNAAGFWAREVGKMIGLEHPLIPVQHQYVVTSTISEVKALKRELPVLRDLEGSYYLRQERDGLLFGPYESQEKMKVQDSWVTNGVPPGFGKELFESDLDRIMEHIKAAMEMVPVLKKADIINVVNGPITYSPDILPMVGPHQGVRNYWVAIGFGYGIIHAGGVGKYLSDWILHGEPPFDLIELDPNRYGKWTTTQYTEAKARESYGFNNIVGYPKEERFAGRPTQRVSGLYQRLESKCSMGFHAGWEQPHWFYKPGQDTQYRPSFRRTNWFEPVGSEYKQVMQRVAVTDLSPFGKFNIKGQDSIRLLDHLFANVIPKVGFTNISHMLTPKGRVYAELTVSHQSPGEFLLITGSGSELHDLRWIEEEAVKGGYDVEIKNITDELGVLGVAGPQARKVLQKLTSEDLSDDVFKFLQTKSLKVSNIPVTAIRISYTGELGWELYHRREDSVALYDAIMNAGQEEGIDNFGTYAMNALRLEKAFRAWGLEMNCDTNPLEAGLEYFVKLNKDQNSCFAHFKEENGWVSRWAIRPY

SEQ ID NO: 287953 - protein, 624 aa, Artificial Sequence
  derived and/or modified sequence
MTRTGWHATEQYLIEPEKIQEMFPLLNMNKVLAGLYNPGDGHIDPYSLTMALAAGARKCGALLKYPAPVTSLKARSDGTWDVETPQGSMRANRIVNAAGFWAREVGKMIGLEHPLIPVQHQYVVTSTISEVKALKRELPVLRDLEGSYYLRQERDGLLFGPYESQEKMKVQDSWVTNGVPPGFGKELFESDLDRIMEHIKAAMEMVPVLKKADIINVVNGPITYSPDILPMVGPHQGVRNYWVAIGFGYGIIHAGGVGKYLSDWILHGEPPFDLIELDPNRYGKWTTTQYTEAKARESYGFNNIVGYPKEERFAGRPTQRVSGLYQRLESKCSMGFHAGWEQPHWFYKPGQDTQYRPSFRRTNWFEPVGSEYKQVMQRVAVTDLSPFGKFNIKGQDSIRLLDHLFANVIPKVGFTNISHMLTPKGRVYAELTVSHQSPGEFLLITGSGSELHDLRWIEEEAVKGGYDVEIKNITDELGVLGVAGPQARKVLQKLTSEDLSDDVFKFLQTKSLKVSNIPVTAIRISYTGELGWELYHRREDSVALYDAIMNAGQEEGIDNFGTYAMNALRLEKAFRAWGLEMNCDTNPLEAGLEYFVKLNKDQNSCFAHFKEENGWVSRWAIRPY

SEQ ID NO: 287954 - protein, 394 aa, Artificial Sequence
  derived and/or modified sequence
MWSCWRNQSSRLDLPGTQYGIIHAGGVGKYLSDWILHGEPPFDLIELDPNRYGKWTTTQYTEAKARESYGFNNIVGYPKEERFAGRPTQRVSGLYQRLESKCSMGFHAGWEQPHWFYKPGQDTQYRPSFRRTNWFEPVGSEYKQVMQRVAVTDLSPFGKFNIKGQDSIRLLDHLFANVIPKVGFTNISHMLTPKGRVYAELTVSHQSPGEFLLITGSGSELHDLRWIEEEAVKGGYDVEIKNITDELGVLGVAGPQARKVLQKLTSEDLSDDVFKFLQTKSLKVSNIPVTAIRISYTGELGWELYHRREDSVALYDAIMNAGQEEGIDNFGTYAMNALRLEKAFRAWGLEMNCDTNPLEAGLEYFVKLNKDQNSCFAHFKEENGWVSRWAIRPY

SEQ ID NO: 287955 - DNA, 1722 bp, Artificial Sequence
  derived and/or modified sequence
atggagcggcagtctcggaatagtgataattggcgttggctgtgctggtgcgaatccggcctgtcacccgggcagagcagggacgagaggtgtggtcccgctggtgaaatccgagcgcatggatggatttatttagcccggaggttttgggccagagaggtgggtaagatgattggtttagagcacccgcttatccctgttcagcaccaatacgtggtcactagcaccataagcgaagttaaggctctgaaaagggagttgccggtactgcgggacttggaaggctcatactacttgcgccaggagcgtgatggactactctttgggccctatgagagccaggaaaagatgaaggtgcaggattcctgggtgaccaatggtgtgcctccagggtttggaaaagaactgttcgaaagcgaccttgaccggattatggagcacattaaagcggcaatggaaatggtgccagttctgaaaaaggccgatatcattaacgtagtgaacgggccgatcacatacagccctgatatcctgcctatggtcgggccgcatcagggcgtgagaaactactgggtggccatagggttcgggtatggtattatccacgcaggaggagtcggaaagtatctgagcgattggattctgcacggagaacccccctttgacctgatagaacttgaccccaaccggtacggcaaatggacaactacacagtatacggaagctaaggcgcgggagtcgtacggcttcaacaatatcgtcggttaccccaaggaggaacgctttgcagggcgtccaactcagcgggtgagtggcctgtaccagcgcttggaaagcaagtgttctatgggctttcatgcaggctgggagcagcctcactggttctataagcctgggcaagacactcagtaccgcccttccttccgcagaaccaattggtttgagcctgtggggtcggagtataagcaggtaatgcagcgagtggccgttaccgacctgagtcccttcgggaaattcaatatcaagggacaagattccattcgtttactggaccacctgttcgctaatgtgatacctaaggttgggttcaccaacatttcccatatgctgacgcctaaagggcgggtgtacgccgaacttactgtgtcacaccagagcccaggcgagtttctactgatcactggatccgggagtgagcttcacgacctgaggtggattgaggaggaggccgttaagggggggtacgatgtggagatcaaaaacatcaccgacgagttaggagtgttgggggtggcgggcccccaagctcggaaagtgctgcagaagttgactagtgaggatctgtcagatgacgtcttcaagttccttcagaccaagtcactaaaggtcagcaacatccctgtaacagctatccgcatcagttataccggcgaactgggatgggagctctaccacagaagagaggacagcgtcgcgctgtatgacgcaataatgaacgcagggcaggaagaaggcattgacaactttggcacttatgccatgaacgctttgaggctcgagaaagctttccgggcctggggtctggaaatgaattgcgatacaaacccattggaggctggactagaatactttgtgaaattaaacaaggaccagaatagctgcttcgctcatttcaaagaagagaacggttgggtgtctcggtgggccatccgtccctattag

SEQ ID NO: 287956 - DNA, 1842 bp, Artificial Sequence
  derived and/or modified sequence
tacttgatcgaaccagagaaaatacaggaaatgttcccgcttcttaacatgaataaggtcctcgctggactgtacaatccgggcgatggacatattgacccatacagcctcactatggctctcgcggcgggagctaggaagtgcggggcactcctgaaatatcctgcccccgtaacaagcttaaaggcaagatccgatgggacctgggatgtcgagacacctcaaggctctatgcgcgccaatcgcatcgtgaacgccgccggcttctgggcacgtgaggttggcaagatgatcggcttggagcatccccttatcccagtgcagcaccaatatgttgttacatccaccatttcagaggtaaaggccctcaagcgcgagctcccagtattgcgcgatctcgaggggtcttattatctcaggcaggagcgagacggcctgttatttggaccttatgagtcccaagagaagatgaaagttcaggatagttgggttaccaacggggtgccgcccggcttcggaaaggaactctttgagtcggacctggaccggattatggaacacatcaaggcggcgatggagatggttcctgtgctgaaaaaagcagacattatcaatgtggtgaatgggcccataacatattccccagacatcctacccatggttggaccacatcaaggcgtcaggaattactgggtggctattggctttggttatggtatcattcacgctggtggggtgggcaaatacttgagtgactggattctgcatggggaacctccctttgatttgatcgagttagacccgaacagatacggaaaatggactaccacccaatacaccgaggccaaggctcgcgagtcttacggctttaataacattgtgggttatccaaaagaggaacggtttgcaggccgcccgacacaacgtgtgagcgggctctatcaacgactggaatctaagtgcagcatgggattccacgccgggtgggagcaaccgcactggttctataagcctggacaggatacacagtatcgccctagcttccgccggacaaattggttcgagcccgtaggctccgagtataagcaagtgatgcagagggtcgcagttacagacctgagccctttcggaaagtttaacatcaagggacaggacagcatcagattgcttgatcatctcttcgcaaatgtcatccctaaagttggtttcactaatatctcccatatgctgacaccaaagggtcgcgtatacgccgaacttaccgtatcccaccagagtcctggagaattcttacttattacaggttccggaagtgagcttcatgacctgcggtggatcgaggaagaggcggtaaagggtgggtacgacgtagagattaaaaatatcacagatgagctaggtgtcttaggtgtagccggcccgcaggcaaggaaagtgcttcagaagttgacatccgaagacctgtccgatgacgtgttcaagtttctccagaccaagtctctgaaagtgagcaatattcctgtgacagcgattcgaattagttatacaggtgagttgggctgggagctgtatcataggcgcgaggattctgtggctctgtacgatgccataatgaatgccgggcaggaagaaggaatcgacaattttgggacttatgctatgaatgcgctgagactggaaaaagcttttcgtgcttggggattggagatgaattgcgataccaaccccttggaggccggccttgagtattttgtcaagttgaacaaggaccagaatagttgctttgctcattttaaagaggaaaacggatgggtctcacgttgggcaatccgcccgtattag

SEQ ID NO: 287957 - DNA, 1875 bp, Artificial Sequence
  derived and/or modified sequence
atgacaaggacaggatggcatgccaccgaacagtatctgatcgaaccggaaaagattcaggaaatgttcccactgctcaatatgaataaggtgctcgccggtctttataatcctggggacggccacattgacccgtattctttgaccatggccctggccgctggcgctagaaaatgcggcgccctgctaaagtacccggccccagtcaccagcctaaaagccagaagcgacggaacatgggacgtggagaccccacagggcagtatgcgagccaatagaatcgtgaacgcggcagggttctgggcacgcgaggtggggaagatgatcggcctggagcatccacttattcccgtgcagcaccagtatgttgtcacctctacaatttccgaggtgaaagccttgaagcgcgaactgcccgtactgcgagacctcgagggttcctattacctgcgacaggagagggacgggttactgttcgggccttacgagtcacaagaaaaaatgaaggttcaggattcttgggtgaccaacggcgtgcccccgggatttggaaaggaattgtttgaatccgatctggaccgtataatggaacacataaaggctgccatggagatggtgcccgtgctcaagaaggccgacatcatcaatgtggttaacggtcccatcacttacagcccggatatcttgcccatggtgggccctcaccagggagtgcgcaactattgggtggcgattgggtttgggtatgggatcatccacgctggcggcgtgggcaagtatctcagtgattggattctgcacggcgaacctccgtttgacctgatcgagctggatccaaatagatatggaaaatggaccaccacacagtatactgaggcaaaggcccgggagagctatggttttaataatattgtcggataccccaaagaggaacggttcgctggccgaccgactcagcgggtttcagggctctaccagagactggaaagcaaatgttctatgggtttccatgctggatgggagcagccacactggttttacaaacccggtcaagatacacagtaccgcccttcttttcgacgaaccaactggtttgagccagtcggctctgagtataagcaggtcatgcaaagagtggcagttacagacctgagccccttcggcaagtttaatattaaaggccaagactcgattcggctgttggaccacttgtttgcaaatgtcatccccaaagtgggcttcactaacatctctcatatgctgacgcctaaaggaagagtatacgctgagttaactgtgtcccaccagtcacccggtgagtttctgctgatcaccggatccggttcggaactgcatgacctccgctggatagaagaggaagcagtcaaggggggatatgacgtggagatcaagaatatcactgatgaattaggcgttcttggagtggccggccctcaggcaagaaaagtcctgcaaaaacttaccagtgaggacttgtcagatgatgttttcaaattcctgcagactaaaagtctgaaggtgtctaacatccccgtgaccgccataaggataagctacactggcgagcttggctgggagttgtatcacaggcgtgaggatagcgtggctctgtatgatgctatcatgaatgcgggacaagaagaagggatagataacttcggaacctatgctatgaatgctctccggctggagaaggcgtttcgggcttggggtctcgagatgaattgtgacaccaaccctctcgaggctgggcttgaatattttgtaaaactgaataaggaccagaactcgtgctttgcccactttaaagaggaaaacgggtgggtctcaaggtgggcgatcagaccgtattag

SEQ ID NO: 287958 - DNA, 1185 bp, Artificial Sequence
  derived and/or modified sequence
atgtggagttgctggcggaatcagtcaagtagactcgatctgcctggcacccagtatgggattatccacgcgggcggggtgggaaagtacctgtccgattggattctccacggagaaccgccatttgatctcattgagctggacccaaaccggtacggcaagtggaccaccactcagtacaccgaagctaaagctcgggagagttacggtttcaacaatatagtcgggtaccctaaggaggagcggtttgctggtagacccacacagcgcgtcagtggcttataccaaaggttggagagtaaatgctcaatggggtttcacgccggatgggaacagcctcactggttttataaacctggccaggatacccagtaccggcctagcttcaggaggaccaattggttcgagcctgttggctccgagtataagcaagtcatgcagcgggtggccgtgacagacctgtctcccttcggcaaatttaacattaaaggacaggatagcatcaggttgctggaccacctcttcgccaatgtaatccccaaggtagggtttacgaacatatctcatatgctgacccctaagggccgcgtctacgcagagctgaccgtaagtcatcagagcccaggcgagtttttgctgatcacgggctcaggctcagagctacacgatctgaggtggatagaggaagaagcggtaaaaggcggatacgacgtggagatcaagaacataaccgatgagctcggtgtcctgggtgtggcggggccacaggctaggaaggtgttacaaaagctcacttcagaggacctgtctgacgatgtgtttaagttcctgcagaccaagagcctgaaggtgtccaatataccagtcacggccattcgcatcagctacaccggtgagctcggatgggaactttaccacaggagagaagattccgtggccctctacgatgcaattatgaacgcagggcaggaggaagggattgataacttcggaacctacgcaatgaacgctctccgtcttgagaaagccttccgggcgtggggtctcgagatgaactgtgacaccaaccccctggaggccggactggagtacttcgtgaaactcaataaagatcaaaactcctgctttgcacattttaaagaggagaacggctgggtctccagatgggccatcagaccatattag

SEQ ID NO: 287959 - DNA, 1722 bp, Artificial Sequence
  derived and/or modified sequence
atggagcggcagagcaggaacagcgacaactggcgctggctgtgctggtgtgagagcggcctgagccctggccagagcagagatgagcgctgtggccctgctggggagatccgggcccacggctggatctacctggcccggcgcttctgggcccgggaggtgggcaagatgattggcctggagcaccccctcatccctgtgcagcaccagtatgtggtgaccagcaccatcagcgaggtgaaggccctgaagcgggagctgcctgtgctgcgggacctggagggcagctactacctgcggcaggagagagatggcctgctgtttggcccctatgagagccaggagaagatgaaggtgcaggacagctgggtgaccaacggggtgcccccaggctttgggaaggagctgtttgaaagtgacctggaccgcatcatggagcacatcaaggccgccatggagatggtgcctgtgctgaagaaggctgacatcatcaacgtggtgaatggccccatcacctacagcccagacatcctgcccatggtgggcccccaccagggcgtgaggaactactgggtggccatcggcttcggctacggcatcatccatgctggaggagtgggcaagtacctgagtgactggatcctgcacggggagcccccatttgacctgattgagctggaccccaacagatatggcaagtggaccaccacccagtacacagaggccaaggcccgggagagctatggcttcaacaacatcgtgggctaccccaaggaggagagatttgctggccggcccacccagagggtgtctggcctgtaccagaggctggagagcaagtgcagcatgggcttccacgccggctgggagcagccccactggttctacaagccaggccaggacacccagtaccggcccagcttccggaggaccaactggtttgagcctgtgggcagcgagtacaagcaggtgatgcagagggtggccgtgacagacctgagcccctttgggaagttcaacatcaagggccaggacagcatccggctgctggaccacctgtttgccaacgtcatccccaaggtgggcttcaccaacatcagccacatgctgacccccaagggccgggtgtatgcagagctgactgtgagccaccagagccctggagagttcctgctgatcaccggcagcggcagcgagctgcatgacctgcgctggattgaggaggaggccgtgaagggcggctatgatgtggagatcaagaacatcacagatgagctgggcgtgctgggcgtggccggcccccaggccaggaaggtgctgcagaagctgaccagcgaggacctgagtgatgatgtgttcaagttcctgcagaccaagagcctgaaggtgagcaacatccctgtgacagccatccgcatctcctacaccggggagctgggctgggagctgtaccaccggcgggaggacagcgtggccctgtatgatgccatcatgaatgccggccaggaggagggcatcgacaactttggcacctacgccatgaatgccctgcggctggagaaggccttccgggcctggggcctggagatgaactgtgacaccaaccccctggaggccggcctggagtactttgtgaagctgaacaaggaccagaacagctgctttgcccacttcaaggaggagaatggctgggtgagccgctgggccatccggccctactag

SEQ ID NO: 287960 - DNA, 1842 bp, Artificial Sequence
  derived and/or modified sequence
tacctgattgagcctgagaagatccaggagatgttccccctgctgaacatgaacaaggtgctggccggcctgtacaaccctggagatggccacatcgacccctacagcctgaccatggccctggccgccggggccaggaaatgtggggccctgctgaagtacccagcccctgtgaccagcctgaaggcccggagtgatggcacctgggatgtggagaccccccagggctccatgagggccaacagaattgtgaatgctgctggcttctgggcccgggaggtgggcaagatgattggcctggagcaccccctcatccctgtgcagcaccagtatgtggtgaccagcaccatcagcgaggtgaaggccctgaagcgggagctgcctgtgctgcgggacctggagggcagctactacctgcggcaggagagagatggcctgctgtttggcccctatgagagccaggagaagatgaaggtgcaggacagctgggtgaccaacggggtgcccccaggctttgggaaggagctgtttgaaagtgacctggaccgcatcatggagcacatcaaggccgccatggagatggtgcctgtgctgaagaaggctgacatcatcaacgtggtgaatggccccatcacctacagcccagacatcctgcccatggtgggcccccaccagggcgtgaggaactactgggtggccatcggcttcggctacggcatcatccatgctggaggagtgggcaagtacctgagtgactggatcctgcacggggagcccccatttgacctgattgagctggaccccaacagatatggcaagtggaccaccacccagtacacagaggccaaggcccgggagagctatggcttcaacaacatcgtgggctaccccaaggaggagagatttgctggccggcccacccagagggtgtctggcctgtaccagaggctggagagcaagtgcagcatgggcttccacgccggctgggagcagccccactggttctacaagccaggccaggacacccagtaccggcccagcttccggaggaccaactggtttgagcctgtgggcagcgagtacaagcaggtgatgcagagggtggccgtgacagacctgagcccctttgggaagttcaacatcaagggccaggacagcatccggctgctggaccacctgtttgccaacgtcatccccaaggtgggcttcaccaacatcagccacatgctgacccccaagggccgggtgtatgcagagctgactgtgagccaccagagccctggagagttcctgctgatcaccggcagcggcagcgagctgcatgacctgcgctggattgaggaggaggccgtgaagggcggctatgatgtggagatcaagaacatcacagatgagctgggcgtgctgggcgtggccggcccccaggccaggaaggtgctgcagaagctgaccagcgaggacctgagtgatgatgtgttcaagttcctgcagaccaagagcctgaaggtgagcaacatccctgtgacagccatccgcatctcctacaccggggagctgggctgggagctgtaccaccggcgggaggacagcgtggccctgtatgatgccatcatgaatgccggccaggaggagggcatcgacaactttggcacctacgccatgaatgccctgcggctggagaaggccttccgggcctggggcctggagatgaactgtgacaccaaccccctggaggccggcctggagtactttgtgaagctgaacaaggaccagaacagctgctttgcccacttcaaggaggagaatggctgggtgagccgctgggccatccggccctactag

SEQ ID NO: 287961 - DNA, 1875 bp, Artificial Sequence
  derived and/or modified sequence
atgaccaggacaggctggcacgccacagagcagtacctgattgagcctgagaagatccaggagatgttccccctgctgaacatgaacaaggtgctggccggcctgtacaaccctggagatggccacatcgacccctacagcctgaccatggccctggccgccggggccaggaaatgtggggccctgctgaagtacccagcccctgtgaccagcctgaaggcccggagtgatggcacctgggatgtggagaccccccagggctccatgagggccaaccgcatcgtgaatgctgctggcttctgggcccgggaggtgggcaagatgattggcctggagcaccccctcatccctgtgcagcaccagtatgtggtgaccagcaccatcagcgaggtgaaggccctgaagcgggagctgcctgtgctgcgggacctggagggcagctactacctgcggcaggagagagatggcctgctgtttggcccctatgagagccaggagaagatgaaggtgcaggacagctgggtgaccaatggagtgcccccaggctttgggaaggagctgtttgaaagtgacctggaccgcatcatggagcacatcaaggccgccatggagatggtgcctgtgctgaagaaggctgacatcatcaacgtggtgaatggccccatcacctacagcccagacatcctgcccatggtgggcccccaccagggcgtgaggaactactgggtggccatcggcttcggctacggcatcatccacgccggcggcgtgggcaagtacctgagtgactggatcctgcatggagagcccccatttgacctgattgagctggaccccaacagatatggcaagtggaccaccacccagtacacagaggccaaggcccgggagagctatggcttcaacaacatcgtgggctaccccaaggaggagagatttgctggccggcccacccagagggtgtctggcctgtaccagaggctggagagcaaatgttccatgggcttccacgccggctgggagcagccccactggttctacaagccaggccaggacacccagtaccggcccagcttccggaggaccaactggtttgagcctgtgggcagcgagtacaagcaggtgatgcagagggtggccgtgacagacctgagcccctttgggaagttcaacatcaagggccaggacagcatccggctgctggaccacctgtttgccaacgtcatccccaaggtgggcttcaccaacatcagccacatgctgacccccaagggccgggtgtatgcagagctgactgtgagccaccagagccctggagagttcctgctgatcactggaagtggcagcgagctgcatgacctgcgctggattgaggaggaggccgtgaagggcggctatgatgtggagatcaagaacatcacagatgagctgggcgtgctgggcgtggccggcccccaggccaggaaggtgctgcagaagctgaccagcgaggacctgagtgatgatgtgttcaagttcctgcagaccaagagcctgaaggtgagcaacatccctgtgacagccatccgcatctcctacacaggagagctgggctgggagctgtaccacagaagagaagattctgtggccctgtatgatgccatcatgaatgccggccaggaggagggcatcgacaactttggcacctacgccatgaatgccctgcggctggagaaggccttccgggcctggggcctggagatgaactgtgacaccaaccccctggaggccggcctggagtactttgtgaagctgaacaaggaccagaacagctgctttgcccacttcaaggaggagaatggctgggtgagccgctgggccatccggccctactag

SEQ ID NO: 287962 - DNA, 1185 bp, Artificial Sequence
  derived and/or modified sequence
atgtggagctgctggaggaaccagagcagccggctggacctgcccggcacccagtatggcatcatccacgccggcggcgtgggcaagtacctgagtgactggatcctgcatggagagcccccatttgacctgattgagctggaccccaacagatatggcaagtggaccaccacccagtacacagaggccaaggcccgggagagctatggcttcaacaacatcgtgggctaccccaaggaggagagatttgctggccggcccacccagagggtgtctggcctgtaccagaggctggagagcaaatgttccatgggcttccacgccggctgggagcagccccactggttctacaagccaggccaggacacccagtaccggcccagcttccggaggaccaactggtttgagcctgtgggcagcgagtacaagcaggtgatgcagagggtggccgtgacagacctgagcccctttgggaagttcaacatcaagggccaggacagcatccggctgctggaccacctgtttgccaacgtcatccccaaggtgggcttcaccaacatcagccacatgctgacccccaagggccgggtgtatgcagagctgactgtgagccaccagagccctggagagttcctgctgatcactggaagtggcagcgagctgcatgacctgcgctggattgaggaggaggccgtgaagggcggctatgatgtggagatcaagaacatcacagatgagctgggcgtgctgggcgtggccggcccccaggccaggaaggtgctgcagaagctgaccagcgaggacctgagtgatgatgtgttcaagttcctgcagaccaagagcctgaaggtgagcaacatccctgtgacagccatccgcatctcctacacaggagagctgggctgggagctgtaccacagaagagaagattctgtggccctgtatgatgccatcatgaatgccggccaggaggagggcatcgacaactttggcacctacgccatgaatgccctgcggctggagaaggccttccgggcctggggcctggagatgaactgtgacaccaaccccctggaggccggcctggagtactttgtgaagctgaacaaggaccagaacagctgctttgcccacttcaaggaggagaatggctgggtgagccgctgggccatccggccctactag

SEQ ID NO: 287963 - DNA, 1722 bp, Artificial Sequence
  derived and/or modified sequence
atggagcggcagagccggaacagcgacaactggcggtggctgtgctggtgcgaatccggtttgtcccctggccagtctcgggacgagcggtgcgggccagcgggtgagatccgggcacacgggtggatttacctagcccgcagattctgggcccgagaagttggcaaaatgatcggccttgaacacccacttatccccgtacagcaccagtatgtcgtgaccagcactatatccgaggtaaaagctttgaaaagggaactgcccgtgctgcgagatctggaaggctcctactaccttcggcaggagagggacggcctgctctttggcccctacgagtctcaagaaaagatgaaggtgcaggactcctgggttaccaatggcgtgccgcctggcttcggcaaagagctttttgagtccgatctcgataggattatggagcacatcaaagctgctatggaaatggtgccagttttgaaaaaggccgatatcatcaatgtggtgaacgggcctattacctacagtcccgatatcctcccgatggtgggtccgcatcagggcgtgcggaattattgggtggcgatcggcttcggttacggcatcattcacgccggcggtgtcggaaagtacctctccgattggatcctacacggagaaccccctttcgacctgatcgagttggacccgaataggtacggtaagtggaccactacccagtacaccgaagctaaggccagagagtcgtacggcttcaataatatcgtcggctaccccaaggaagaaagatttgctgggcgacccactcagcgggtgtctgggttgtaccaacgcctcgagtctaaatgtagcatgggctttcacgcaggatgggaacagccccactggttctataaacctggtcaggatactcagtacagaccttccttccgaaggaccaattggttcgagccagtggggagcgaatacaaacaggtcatgcaacgggtagccgtcacagacctgtcaccctttggcaagtttaatatcaagggacaagactcaatacgattgttggatcacctctttgcaaacgttatcccgaaagtggggttcaccaacatctcccacatgctaactcctaagggaagagtatacgccgagctgaccgtgagccaccaatcccctggcgagttcctgttaattaccggctctggttctgagctgcacgacctgagatggatagaggaagaagcggtgaagggcggatacgacgtggagattaagaacatcacagacgagctcggcgtgctgggagtagccggaccccaagcacgcaaagtcttgcagaagctgactagtgaagacctatccgacgacgtctttaaatttctgcagaccaagagcttaaaggtctctaacattcccgtgacagcaattcgcatttcttatacgggagagctcggttgggaattgtaccacagaagagaagattcggtcgccctatatgatgctataatgaacgcaggccaggaagaaggcattgataactttggaacctacgctatgaatgcattaagactcgagaaagcgttccgggcctggggactggaaatgaactgtgacactaatcccctagaagccggcctcgaatacttcgtgaagctgaataaggaccagaactcttgctttgcacacttcaaagaagagaatggttgggtctcgaggtgggctattcgcccctattag

SEQ ID NO: 287964 - DNA, 1842 bp, Artificial Sequence
  derived and/or modified sequence
tacctgatcgagcccgagaagatccaggagatgttccccctgctgaacatgaataaagtcctggcgggtctgtataaccctggagatgggcacatagacccctattcactgactatggccttggcagccggtgcgcggaaatgtggggctttgcttaagtaccccgcacctgtgacaagcctaaaggccagaagtgacggaacatgggacgtcgaaactcctcagggatcaatgagggccaaccggatagtgaacgcggcaggcttctgggcaagagaggtcggaaaaatgatcggcctcgaacaccccctgatcccagtacagcatcagtacgttgtcacttcaacaatttcggaggttaaagcgcttaagagagaactgccagtactgagagatctcgaggggtcttattacctgagacaggagcgcgacggcctcctctttggaccatatgagtcgcaggagaagatgaaagttcaggactcatgggttaccaatggagtccctccagggtttggtaaggagctttttgaatcggacctggatcgcatcatggaacacattaaagctgccatggaaatggttccagtcctgaagaaggccgacatcataaacgttgtcaacggtcccattacttacagcccagacattctaccaatggtgggtccacaccaaggtgtgcggaattattgggtggctatcgggttcggctacggcatcatacacgccggtggcgttggcaagtacttgagtgattggatccttcatggggagcctccttttgatctgatcgaacttgacccaaacaggtatggaaagtggaccacaacacagtatacagaagccaaggcacgcgagagctacggttttaacaacatcgtaggctacccaaaagaggaacgtttcgccgggagacctacacagcgcgtgtccggattgtatcagcgacttgagtccaagtgctccatgggctttcacgcggggtgggagcagccacactggttctataaacctggacaggatactcaatatcgtccctcctttagacgtactaactggttcgagcctgtgggctctgaatacaaacaagtcatgcagcgcgtcgccgtgaccgatcttagccccttcggcaagttcaacatcaaaggacaggacagcattcgcctgctggatcatttatttgccaacgttatacccaaagtagggttcacgaatatttctcatatgctaacacctaaaggccgtgtgtatgccgaactcaccgtgtcccatcagagcccaggcgaatttctgctgatcaccggttcgggttcggaactccatgatctccgttggatcgaagaagaagccgtcaaaggcggatacgatgtagaaataaagaatataacagatgaactgggcgtactcggggtggcgggccctcaggcgagaaaggtgcttcagaaactcacctctgaggacctctctgacgacgtgtttaagttcctccaaaccaaaagcttgaaggtgtcgaacatcccggtgaccgccatcagaatcagctacaccggtgaactaggatgggaactttaccacaggcgggaggattccgtcgccctctacgatgccataatgaatgccggccaggaggagggcattgataactttggtacttacgccatgaacgcactccgcttggaaaaggcctttagagcctgggggctggaaatgaactgtgacactaaccctctggaggccggtctcgagtactttgtgaaactgaacaaggaccaaaattcctgttttgctcattttaaggaggagaatggctgggtcagccggtgggcaattaggccttactag

SEQ ID NO: 287965 - DNA, 1875 bp, Artificial Sequence
  derived and/or modified sequence
atgacccggaccggctggcacgccaccgagcagtacctgatcgagcctgagaagattcaggaaatgttcccccttctgaatatgaacaaggtgctggcaggactgtacaatcctggcgacggccatatagacccctacagcctgaccatggcattggccgcgggcgctcggaagtgcggtgccttgctcaaatacccagcgcctgtgacctctttaaaggcacggagtgacgggacatgggatgtcgaaactccccagggaagcatgagggctaatagaattgttaatgcagccggcttctgggcaagggaagtaggaaagatgatcgggttagagcacccactgattccggtgcaacaccaatatgtcgtgacatccaccatctctgaggtgaaggcactgaaacgggaactcccagtccttagggatctggaaggttcgtactaccttcggcaagaacgcgatgggctgctttttggaccatatgaatcacaagagaagatgaaagtccaggactcttgggttacaaatggcgtgcctcctggattcggcaaggaactgttcgaaagcgacctggacagaatcatggaacacatcaaggctgccatggagatggtgccggtgctcaagaaggccgacatcattaatgtcgtcaatgggcccatcacctactctcctgatattttgcccatggtggggccgcaccagggcgtaagaaactattgggtggcgatcggctttggctacgggatcatccacgcagggggcgtgggaaagtatctgagcgattggattctgcacggcgaaccaccctttgatttgatcgagctcgacccgaatcggtatggcaaatggacgactactcagtacactgaggcaaaggcccgagagtcgtacgggtttaacaacattgtcggttatccaaaggaagagaggtttgcaggacggcccacccaacgggtctccggcttgtatcagcgcctagagtccaagtgcagcatggggttccacgccggatgggaacaaccgcactggttctacaagccaggacaggacacacagtataggccatcatttcgccgcacaaattggtttgagcccgttggctctgagtacaaacaggtcatgcagcgggtcgctgtgaccgacttatcccccttcgggaaattcaatatcaaaggccaggattcaatccgactgctggatcatctctttgccaatgtgatcccaaaagtcggctttactaatatttctcacatgcttacccccaaaggtagggtttacgctgaactgactgtctcacaccagagccctggcgaatttctcttaatcacgggctctggcagtgagctgcacgacctgcgatggatcgaagaagaagcagtgaagggtggatacgatgtagaaattaagaacataactgacgagctgggagtgctgggagttgcaggccctcaggcccgtaaagtgttacagaaacttacaagcgaggacctgtcagacgatgtgtttaaattcctgcagaccaaatctctgaaggtctccaatatcccagtgactgccatcagaatcagctataccggcgaactgggatgggagctctaccatcggagagaggacagtgtcgcactctatgatgcaattatgaatgcaggccaggaagagggcattgataacttcggcacttacgccatgaatgccctaagactggagaaggccttcagggcctggggcctcgagatgaattgcgacacaaaccctcttgaggctggtctcgaatactttgtgaagctgaacaaagaccaaaactcttgcttcgcgcactttaaggaggagaatggctgggtgagtaggtgggccattaggccttattag

SEQ ID NO: 287966 - DNA, 1185 bp, Artificial Sequence
  derived and/or modified sequence
atgtggagctgctggcggaaccagagcagccggctggacctgcccgggacacaatacggtattatccatgctggaggggtcggcaaatatctgtccgattggatcctgcacggcgaaccccccttcgatcttattgagttagatcctaaccgttatggcaaatggacaacgactcagtatactgaagccaaagctcgagagagctacggatttaacaatattgtcggttatcccaaggaggagaggttcgctggccgacctacacagcgggtgagtggcctgtatcagagattagagtcaaagtgctccatggggtttcacgccggatgggagcagcctcattggttctacaaaccgggacaagatacgcagtatagaccttcctttcggaggaccaattggttcgagcctgttggatctgagtataagcaggtaatgcagagggtagccgttacggatttgtcaccttttggtaaatttaatatcaaaggccaggactccatcaggcttcttgatcatctcttcgccaacgtgataccgaaagtaggttttacaaatatttcacatatgctcacgccaaaaggacgagtttatgccgaactgacagtgagccatcagtcccccggagagtttctactaattaccgggtcaggatctgaactccatgatctgcgctggatcgaggaagaagctgtaaagggaggttatgatgtcgaaatcaaaaacatcaccgatgaactgggggtgttgggagtcgctgggccccaggctcgcaaggtgctgcagaagctcacatccgaggaccttagcgacgatgtgtttaaatttctccaaactaagagcctcaaagtctctaatatccctgtcaccgccattaggatctcatacaccggagaactgggttgggaactgtaccatcgcagagaggatagtgtcgcgctatatgatgctataatgaacgcagggcaggaagagggtatcgataattttggtacgtacgccatgaacgcccttcgactggagaaggcctttcgagcctggggcctagagatgaactgcgacaccaatcctctcgaagcggggctggagtactttgtgaagctgaataaggaccagaactcctgtttcgcccacttcaaggaggagaatggctgggtgagccgctgggccatccgcccttattag

SEQ ID NO: 287967 - DNA, 1722 bp, Artificial Sequence
  derived and/or modified sequence
atggagcgccaatctcgcaactcagacaattggagatggctgtgctggtgtgagtctggcctttcgcccggacagtctagggacgagagatgcggcccagccggtgagattcgagctcacggttggatttatctggcaagacgattttgggcgagagaagtaggcaagatgataggtctcgagcatccccttattcctgtgcagcatcagtatgtggttaccagcaccatctccgaggtgaaagccctgaagagggagttgccggtgctccgtgatctggagggcagttactaccttagacaagagcgcgatggcctgctgttcggcccttatgaaagtcaggaaaaaatgaaggtgcaggattcttgggtgactaatggcgtcccacctggattcgggaaggagctgttcgagtcagatttggatagaattatggaacacatcaaggccgctatggaaatggtccctgttctcaagaaagccgatatcatcaatgttgttaacggcccaattacctattcacccgacatattgccaatggtgggcccacaccaaggcgtcaggaattactgggtggcgattgggtttggctacgggatcattcatgctggaggcgtcggcaaatatttaagtgactggatcctacatggagaacccccatttgatctgatcgagctggaccctaatcgctacgggaaatggaccaccacacaatacacagaggcgaaggcgagagagagctatgggtttaataatatcgtcggttatccaaaggaagagcgcttcgctggacgacctacacagcgggttagcggcttatatcagaggctggagtccaaatgctccatgggctttcacgccggatgggagcagccgcactggttttacaaacctggacaagacactcaatacagaccttccttcaggcgcactaactggttcgaaccggtcggatctgagtataaacaggtaatgcagcgggtggccgtgacggacctgtcgcctttcggaaaatttaatatcaaagggcaagacagtattaggctgcttgatcaccttttcgcaaatgtgatccccaaggtaggctttaccaatataagtcacatgcttacgcctaaggggagagtgtatgctgaactcaccgtgagccatcaatctcccggtgagtttttgctgattacggggagcggatcagaattgcacgatctgagatggatcgaggaagaggcggtcaaaggtgggtacgacgttgaaatcaagaacattacagacgagctgggcgtacttggggtggcaggccctcaggcccgtaaagtgctgcagaaactgacttctgaggatctgagtgacgacgtgtttaaattcttgcagactaagagcctgaaggttagcaatatcccagttactgccataaggatttcctacaccggggagctaggctgggaactctatcaccgcagagaggacagtgtagcgttgtatgacgcaatcatgaatgccggtcaggaggagggcatcgacaactttggcacctatgctatgaacgctctgcgcctggagaaggccttccgggcatgggggctggaaatgaattgcgatactaatccgctcgaggcgggtctagaatattttgttaaattaaacaaagatcagaactcttgtttcgctcattttaaggaagaaaatggctgggttagcagatgggccatccgcccttattag

SEQ ID NO: 287968 - DNA, 1842 bp, Artificial Sequence
  derived and/or modified sequence
tacctgattgagccagagaaaatccaggaaatgttcccgctgcttaacatgaacaaagttctggccggtctttataatcctggtgatggccacatcgacccgtactccctcaccatggcacttgcagccggtgcaagaaagtgtggcgctctcctcaaataccctgcccctgtcacaagtcttaaggccagatccgacggaacctgggatgtcgagacgcctcagggcagcatgcgtgccaatcgcatcgtgaacgcagccggtttctgggctagggaagtgggtaagatgatcggactggaacaccctctaattcccgtccagcaccagtacgtggttactagcacaatcagcgaagtcaaagcgctgaaacgggaactgccagtgttacgggacttggaagggagctactatctgcggcaggaaagggacggcctattgtttggaccatatgagtctcaggagaagatgaaggtgcaggattcatgggtgacgaacggagtgccccctggatttggaaaagaactgttcgagtccgatctggatagaatcatggaacacattaaggccgcaatggaaatggttccagtccttaagaaagcggatataatcaacgtggtgaatggtcctattacatatagcccagacatcctgccgatggttggtccacatcagggagtcagaaactactgggtcgctataggttttggttatggcatcatccacgcaggaggagtaggtaaatatttatcagattggatcctgcacggagaaccacccttcgacttgatcgaactggatcccaacagatacggtaaatggacaaccacgcaatatacagaagccaaagcaagagagagctacggattcaataacattgtggggtatcccaaggaggagcgcttcgccggtcgcccaacccaaagggtttcgggtctgtatcaaagactcgaaagtaaatgctcaatgggctttcatgctggatgggaacagccccattggttttataagccaggacaggacactcagtaccgtccctcgttccgcagaaccaactggtttgagccggtcggcagcgaatataaacaggtcatgcagagagtcgcagttactgatttgagccctttcggcaagtttaacattaaggggcaagacagcattaggctcctggatcatctgtttgcaaacgttatccccaaagtgggtttcaccaacatttcacacatgctcaccccaaaagggagagtctacgctgagctgactgtatctcatcagagccccggagagtttctgctgattactggttcagggtccgagttacatgacctccgttggattgaggaagaagccgtcaaagggggttacgacgtggaaatcaagaatatcaccgacgaacttggcgttctgggagtcgcgggtccgcaggcacgcaaagtgctccaaaagcttacgtctgaagatctctccgacgacgtcttcaaattcctccagacaaaaagcctgaaggtctctaacatccccgtgaccgctatccgaataagctacacaggggaactgggatgggagttgtaccataggcgggaggatagcgttgctctgtacgatgccattatgaacgccggacaagaggaggggattgataatttcggaacatacgccatgaatgcgttgcgtctcgaaaaggccttcagggcctggggtctcgagatgaattgtgatacaaatcccctggaggctggacttgaatactttgtgaaactcaataaggatcagaactcttgcttcgctcactttaaggaagagaatgggtgggtgtctcgctgggccatccgtccttattag

SEQ ID NO: 287969 - DNA, 1875 bp, Artificial Sequence
  derived and/or modified sequence
atgactcgaacaggatggcacgctacggagcagtacctcatagagcccgagaagattcaggaaatgtttcctctgctaaacatgaataaggtcctcgcaggtctttacaaccctggagacggtcatatcgatccttacagtctcaccatggcccttgccgcaggtgcacggaagtgtggcgctctgctgaagtatccggctccggtgacctccctcaaagcacgatctgacggtacatgggacgtggaaacgcctcaaggatctatgagagccaaccgcatagttaatgctgccggattctgggcgcgagaagtcggcaaaatgataggactggagcatcccctcatccctgtccagcaccagtacgtcgtgacgtcgacaatcagtgaagtgaaggccctgaaaagagagctgcctgtactgagggacctggagggcagctactacctgcggcaggagagggatggactgctgttcggtccttatgaaagccaggaaaaaatgaaagtgcaagacagctgggtgaccaatggtgtgccgcctgggtttggcaaagaactgtttgaatctgatctggataggatcatggaacacattaaggccgcaatggagatggttcccgtgctcaaaaaggctgatatcatcaacgtggtgaatggccctatcacgtacagtccagatatactgcctatggtgggcccacaccagggagtacgcaactactgggtagctatcgggtttgggtatggcataattcacgcagggggagtgggaaagtacctgtcggactggatcctgcacggggagcccccatttgatctcattgagctcgatcctaatagatatggaaagtggaccacaacccagtataccgaagcaaaggcacgcgagtcctacgggttcaataacatcgtgggctatcctaaggaagagcggttcgctggaaggccaacacaaagagtttccggcttgtatcagcggttggaatctaaatgcagcatggggttccatgccggttgggagcagccacattggttctataagccaggacaggatacgcaatatcgtccatcctttcggaggaccaattggttcgaacctgttggctcggagtataaacaggtgatgcaacgcgtcgcagttaccgacttgtctcctttcggaaaattcaatatcaagggacaggatagcattcggctcctggaccatcttttcgcaaacgtgatacccaaagtcgggtttacgaacatctctcacatgcttacacctaaggggagagtgtacgcagagctgactgtctcgcatcagtctccaggggagttcctactcatcactgggagtggctccgagctgcacgacttgcgttggatcgaagaggaagctgtgaagggaggctatgatgtggagataaagaatattacagatgagctgggggtgttgggagtggcgggtccccaggctagaaaggtgttgcagaagctcacctccgaggacctgagcgacgatgtctttaagtttctgcagactaaaagtctgaaagtgtcaaacattcccgtaacagctatacggatcagctacaccggagagctaggatgggaactttaccaccgcagagaggactctgttgccctgtacgatgcaattatgaacgctggccaagaagagggcatagacaatttcggtacctacgcgatgaatgcattgagactggagaaagctttcagggcctgggggttggagatgaattgtgataccaatcctctcgaagccggactcgagtactttgtaaagctcaataaagaccaaaacagttgttttgctcattttaaagaagaaaatgggtgggtcagccgctgggcgatccgtccatactag

SEQ ID NO: 287970 - DNA, 1185 bp, Artificial Sequence
  derived and/or modified sequence
atgtggagctgttggagaaaccagagcagccggttggacctcccaggtacgcagtatggaataattcatgccggtggcgtgggaaaatatttgtcggattggatcttacacggagagccaccgtttgatctaattgagctggatcctaaccgctacggcaagtggacaactacccaatataccgaagccaaggctcgggagagttacggattcaacaacatagtgggctatccgaaggaagagcggttcgctggaaggcctacccagagagtaagtggcttataccagcgacttgaaagcaagtgctcaatgggtttccacgctgggtgggaacagcctcactggttttacaagcccggtcaggatacacagtataggccgtccttccgtcggactaactggttcgaacccgtcggctcagaatacaaacaggtaatgcaacgagtggcagtgaccgaccttagtccattcggtaagttcaatatcaagggccaggatagcatacgtttgctggatcacctatttgcaaatgttattccaaaggtaggctttactaacatcagccatatgctcactcctaaggggagggtctatgcagaactgaccgtgtctcatcaatcgccgggagagttccttctaatcaccggctctggcagtgaactgcacgatctgagatggatcgaagaggaagctgtgaaagggggatacgacgtcgaaattaaaaacatcactgacgaactgggagtcctgggagtggcgggtccccaggccagaaaggttctacaaaaactgacttccgaagacctgtccgatgatgtgtttaagttcctgcaaacgaagtcactgaaagtaagtaacatcccagtgacggccatccgcatcagctacactggggagcttggttgggaactgtaccaccggcgagaagactctgttgccctttatgatgccattatgaacgctggacaagaggaagggattgacaattttggcacgtacgcaatgaacgcccttaggctggagaaggcctttagggcctggggcctagaaatgaattgcgacacaaatccgttggaggcaggactggagtactttgtgaagctgaacaaagaccagaatagttgttttgcacatttcaaggaggagaacgggtgggtgtctagatgggctatacgtccatactag

SEQ ID NO: 287971 - DNA, 1722 bp, Artificial Sequence
  derived and/or modified sequence
atggagagacagagcagaaacagcgacaactggagatggctgtgctggtgcgagagcggcctgagccccggccagagcagagacgagagatgcggccccgccggcgagatcagagcccacggctggatctacctggccagaagattctgggccagagaggtgggcaagatgatcggcctggagcaccccctgatccccgtgcagcaccagtacgtggtgaccagcaccatcagcgaggtgaaggccctgaagagagagctgcccgtgctgagagacctggagggcagctactacctgagacaggagagagacggcctgctgttcggcccctacgagagccaggagaagatgaaggtgcaggacagctgggtgaccaacggcgtgccccccggcttcggcaaggagctgttcgagagcgacctggacagaatcatggagcacatcaaggccgccatggagatggtgcccgtgctgaagaaggccgacatcatcaacgtggtgaacggccccatcacctacagccccgacatcctgcccatggtgggcccccaccagggcgtgagaaactactgggtggccatcggcttcggctacggcatcatccacgccggcggcgtgggcaagtacctgagcgactggatcctgcacggcgagccccccttcgacctgatcgagctggaccccaacagatacggcaagtggaccaccacccagtacaccgaggccaaggccagagagagctacggcttcaacaacatcgtgggctaccccaaggaggagagattcgccggcagacccacccagagagtgagcggcctgtaccagagactggagagcaagtgcagcatgggcttccacgccggctgggagcagccccactggttctacaagcccggccaggacacccagtacagacccagcttcagaagaaccaactggttcgagcccgtgggcagcgagtacaagcaggtgatgcagagagtggccgtgaccgacctgagccccttcggcaagttcaacatcaagggccaggacagcatcagactgctggaccacctgttcgccaacgtgatccccaaggtgggcttcaccaacatcagccacatgctgacccccaagggcagagtgtacgccgagctgaccgtgagccaccagagccccggcgagttcctgctgatcaccggcagcggcagcgagctgcacgacctgagatggatcgaggaggaggccgtgaagggcggctacgacgtggagatcaagaacatcaccgacgagctgggcgtgctgggcgtggccggcccccaggccagaaaggtgctgcagaagctgaccagcgaggacctgagcgacgacgtgttcaagttcctgcagaccaagagcctgaaggtgagcaacatccccgtgaccgccatcagaatcagctacaccggcgagctgggctgggagctgtaccacagaagagaggacagcgtggccctgtacgacgccatcatgaacgccggccaggaggagggcatcgacaacttcggcacctacgccatgaacgccctgagactggagaaggccttcagagcctggggcctggagatgaactgcgacaccaaccccctggaggccggcctggagtacttcgtgaagctgaacaaggaccagaacagctgcttcgcccacttcaaggaggagaacggctgggtgagcagatgggccatcagaccctactag

SEQ ID NO: 287972 - DNA, 1842 bp, Artificial Sequence
  derived and/or modified sequence
tacctgatcgagcccgagaagatccaggagatgttccccctgctgaacatgaacaaggtgctggccggcctgtacaaccccggcgacggccacatcgacccctacagcctgaccatggccctggccgccggcgccagaaagtgcggcgccctgctgaagtaccccgcccccgtgaccagcctgaaggccagaagcgacggcacctgggacgtggagaccccccagggcagcatgagagccaacagaatcgtgaacgccgccggcttctgggccagagaggtgggcaagatgatcggcctggagcaccccctgatccccgtgcagcaccagtacgtggtgaccagcaccatcagcgaggtgaaggccctgaagagagagctgcccgtgctgagagacctggagggcagctactacctgagacaggagagagacggcctgctgttcggcccctacgagagccaggagaagatgaaggtgcaggacagctgggtgaccaacggcgtgccccccggcttcggcaaggagctgttcgagagcgacctggacagaatcatggagcacatcaaggccgccatggagatggtgcccgtgctgaagaaggccgacatcatcaacgtggtgaacggccccatcacctacagccccgacatcctgcccatggtgggcccccaccagggcgtgagaaactactgggtggccatcggcttcggctacggcatcatccacgccggcggcgtgggcaagtacctgagcgactggatcctgcacggcgagccccccttcgacctgatcgagctggaccccaacagatacggcaagtggaccaccacccagtacaccgaggccaaggccagagagagctacggcttcaacaacatcgtgggctaccccaaggaggagagattcgccggcagacccacccagagagtgagcggcctgtaccagagactggagagcaagtgcagcatgggcttccacgccggctgggagcagccccactggttctacaagcccggccaggacacccagtacagacccagcttcagaagaaccaactggttcgagcccgtgggcagcgagtacaagcaggtgatgcagagagtggccgtgaccgacctgagccccttcggcaagttcaacatcaagggccaggacagcatcagactgctggaccacctgttcgccaacgtgatccccaaggtgggcttcaccaacatcagccacatgctgacccccaagggcagagtgtacgccgagctgaccgtgagccaccagagccccggcgagttcctgctgatcaccggcagcggcagcgagctgcacgacctgagatggatcgaggaggaggccgtgaagggcggctacgacgtggagatcaagaacatcaccgacgagctgggcgtgctgggcgtggccggcccccaggccagaaaggtgctgcagaagctgaccagcgaggacctgagcgacgacgtgttcaagttcctgcagaccaagagcctgaaggtgagcaacatccccgtgaccgccatcagaatcagctacaccggcgagctgggctgggagctgtaccacagaagagaggacagcgtggccctgtacgacgccatcatgaacgccggccaggaggagggcatcgacaacttcggcacctacgccatgaacgccctgagactggagaaggccttcagagcctggggcctggagatgaactgcgacaccaaccccctggaggccggcctggagtacttcgtgaagctgaacaaggaccagaacagctgcttcgcccacttcaaggaggagaacggctgggtgagcagatgggccatcagaccctactag

SEQ ID NO: 287973 - DNA, 1875 bp, Artificial Sequence
  derived and/or modified sequence
atgaccagaaccggctggcacgccaccgagcagtacctgatcgagcccgagaagatccaggagatgttccccctgctgaacatgaacaaggtgctggccggcctgtacaaccccggcgacggccacatcgacccctacagcctgaccatggccctggccgccggcgccagaaagtgcggcgccctgctgaagtaccccgcccccgtgaccagcctgaaggccagaagcgacggcacctgggacgtggagaccccccagggcagcatgagagccaacagaatcgtgaacgccgccggcttctgggccagagaggtgggcaagatgatcggcctggagcaccccctgatccccgtgcagcaccagtacgtggtgaccagcaccatcagcgaggtgaaggccctgaagagagagctgcccgtgctgagagacctggagggcagctactacctgagacaggagagagacggcctgctgttcggcccctacgagagccaggagaagatgaaggtgcaggacagctgggtgaccaacggcgtgccccccggcttcggcaaggagctgttcgagagcgacctggacagaatcatggagcacatcaaggccgccatggagatggtgcccgtgctgaagaaggccgacatcatcaacgtggtgaacggccccatcacctacagccccgacatcctgcccatggtgggcccccaccagggcgtgagaaactactgggtggccatcggcttcggctacggcatcatccacgccggcggcgtgggcaagtacctgagcgactggatcctgcacggcgagccccccttcgacctgatcgagctggaccccaacagatacggcaagtggaccaccacccagtacaccgaggccaaggccagagagagctacggcttcaacaacatcgtgggctaccccaaggaggagagattcgccggcagacccacccagagagtgagcggcctgtaccagagactggagagcaagtgcagcatgggcttccacgccggctgggagcagccccactggttctacaagcccggccaggacacccagtacagacccagcttcagaagaaccaactggttcgagcccgtgggcagcgagtacaagcaggtgatgcagagagtggccgtgaccgacctgagccccttcggcaagttcaacatcaagggccaggacagcatcagactgctggaccacctgttcgccaacgtgatccccaaggtgggcttcaccaacatcagccacatgctgacccccaagggcagagtgtacgccgagctgaccgtgagccaccagagccccggcgagttcctgctgatcaccggcagcggcagcgagctgcacgacctgagatggatcgaggaggaggccgtgaagggcggctacgacgtggagatcaagaacatcaccgacgagctgggcgtgctgggcgtggccggcccccaggccagaaaggtgctgcagaagctgaccagcgaggacctgagcgacgacgtgttcaagttcctgcagaccaagagcctgaaggtgagcaacatccccgtgaccgccatcagaatcagctacaccggcgagctgggctgggagctgtaccacagaagagaggacagcgtggccctgtacgacgccatcatgaacgccggccaggaggagggcatcgacaacttcggcacctacgccatgaacgccctgagactggagaaggccttcagagcctggggcctggagatgaactgcgacaccaaccccctggaggccggcctggagtacttcgtgaagctgaacaaggaccagaacagctgcttcgcccacttcaaggaggagaacggctgggtgagcagatgggccatcagaccctactag

SEQ ID NO: 287974 - DNA, 1185 bp, Artificial Sequence
  derived and/or modified sequence
atgtggagctgctggagaaaccagagcagcagactggacctgcccggcacccagtacggcatcatccacgccggcggcgtgggcaagtacctgagcgactggatcctgcacggcgagccccccttcgacctgatcgagctggaccccaacagatacggcaagtggaccaccacccagtacaccgaggccaaggccagagagagctacggcttcaacaacatcgtgggctaccccaaggaggagagattcgccggcagacccacccagagagtgagcggcctgtaccagagactggagagcaagtgcagcatgggcttccacgccggctgggagcagccccactggttctacaagcccggccaggacacccagtacagacccagcttcagaagaaccaactggttcgagcccgtgggcagcgagtacaagcaggtgatgcagagagtggccgtgaccgacctgagccccttcggcaagttcaacatcaagggccaggacagcatcagactgctggaccacctgttcgccaacgtgatccccaaggtgggcttcaccaacatcagccacatgctgacccccaagggcagagtgtacgccgagctgaccgtgagccaccagagccccggcgagttcctgctgatcaccggcagcggcagcgagctgcacgacctgagatggatcgaggaggaggccgtgaagggcggctacgacgtggagatcaagaacatcaccgacgagctgggcgtgctgggcgtggccggcccccaggccagaaaggtgctgcagaagctgaccagcgaggacctgagcgacgacgtgttcaagttcctgcagaccaagagcctgaaggtgagcaacatccccgtgaccgccatcagaatcagctacaccggcgagctgggctgggagctgtaccacagaagagaggacagcgtggccctgtacgacgccatcatgaacgccggccaggaggagggcatcgacaacttcggcacctacgccatgaacgccctgagactggagaaggccttcagagcctggggcctggagatgaactgcgacaccaaccccctggaggccggcctggagtacttcgtgaagctgaacaaggaccagaacagctgcttcgcccacttcaaggaggagaacggctgggtgagcagatgggccatcagaccctactag

SEQ ID NO: 287975 - DNA, 1966 bp, Artificial Sequence
  derived and/or modified sequence
ggcctagtcatgctccgtcccggcgcgcagctgctgcggggcctcctgctgcggagctgcccgctgcagggctcccccgggcgcccgcgctctgtctgcggccgggaaggagaggaaaaaccacccttatctgcagaaacacaatggaaagacagagcagaaacagtgataattggaggtggctgtgttggtgtgagtctggcttatcacctggccaaagcagggatgaaagatgtggtcctgctggagaaatcagagctcacggctggatctacctggcacgcagattttgggctcgtgaagtaggtaaaatgattggactagaacatcctctcattccggttcaacatcaatatgttgttacatcgactatatctgaagtgaaagctttgaaacgagaactgcctgtgctccgtgacctggaaggatcatattatctccgacaggaaagggatgggcttttgtttggtccatatgaaagtcaagagaaaatgaaagttcaggactcctgggtcaccaatggagttcctccaggttttggaaaggaactctttgagtctgatctagatcgaatcatggaacacatcaaagctgccatggaaatggttcctgtcttgaaaaaggctgacatcatcaatgttgtcaatggtcctatcacgtattctcctgacattctgcctatggtggggccccatcagggggtcagaaactactgggtggctataggctttggatatggcataatccacgctggtggggtagggaaatatctcagtgactggatcctgcatggagaacctccttttgatctgatagaattggatcctaatcgctatggcaaatggacaacaacccagtacactgaggccaaagcaagagaatcatatggattcaacaatattgttggttatcctaaagaagaacggtttgctgggaggccgactcaacgagtcagtgggctctatcaaaggctggagtctaagtgttccatggggttccatgctggctgggagcagccgcactggttctacaaaccaggccaggacactcagtacaggccaagttttcgccgcacaaactggtttgagcctgtgggctcggagtataaacaggttatgcaaagagtagcggtaactgacctatcaccatttggcaagtttaacatcaaaggccaagattccattagactactggaccatctctttgcaaatgtcattccaaaggtgggttttacaaatataagtcacatgttaacacccaagggtcgagtgtatgctgagctgactgtttctcaccaatctcctggggagtttcttttaattactggctctggatcagaacttcatgatcttagatggattgaagaagaagcagtcaaaggtggatatgatgttgaaattaaaaacataactgatgagcttggagttcttggagttgctgggccacaggcaagaaaggtccttcagaaactgacctctgaagatcttagtgatgatgttttcaagtttcttcaaaccaagtccttaaaggtttccaacattcctgtcactgctattaggatatcttatactggtgagctgggttgggagctgtatcacagaagagaagattctgtggcgctgtatgacgctatcatgaatgcaggccaggaggagggaatcgacaattttggaacctatgccatgaatgccttacgcctggagaaagccttcagagcctgggggttagagatgaactgtgatacaaatcctttggaagctggactggaatattttgtgaagttaaataaggatcagaatagctgctttgcccattttaaggaggaaaatggctgggtgagcagatgggccatcaggccttattagggtgaatcgtgttcttgtcaaaacctgtcagcaagtagggaaaagaacaatggagtactgaagaactctttcatcacaaagggagacggcgcagtggccct

SEQ ID NO: 287976 - DNA, 2777 bp, Artificial Sequence
  derived and/or modified sequence
tatctcattgaacctgaaaaaattcaagagatgttccctttactcaacatgaataaggttttagctggattgtataatcctggagatggtcacattgatccttattctctaactatggcactggctgctggggctaggaaatgtggtgcccttttaaaatatcctgcaccagtaacttctctgaaagccaggtcagatggaacatgggacgttgaaacaccacaggggtctatgagagcaaatagaattgtgaatgctgcaggattttgggctcgtgaagtaggtaaaatgattggactagaacatcctctcattccggttcaacatcaatatgttgttacatcgactatatctgaagtgaaagctttgaaacgagaactgcctgtgctccgtgacctggaaggatcatattatctccgacaggaaagggatgggcttttgtttggtccatatgaaagtcaagagaaaatgaaagttcaggactcctgggtcaccaatggagttcctccaggttttggaaaggaactctttgagtctgatctagatcgaatcatggaacacatcaaagctgccatggaaatggttcctgtcttgaaaaaggctgacatcatcaatgttgtcaatggtcctatcacgtattctcctgacattctgcctatggtggggccccatcagggggtcagaaactactgggtggctataggctttggatatggcataatccacgctggtggggtagggaaatatctcagtgactggatcctgcatggagaacctccttttgatctgatagaattggatcctaatcgctatggcaaatggacaacaacccagtacactgaggccaaagcaagagaatcatatggattcaacaatattgttggttatcctaaagaagaacggtttgctgggaggccgactcaacgagtcagtgggctctatcaaaggctggagtctaagtgttccatggggttccatgctggctgggagcagccgcactggttctacaaaccaggccaggacactcagtacaggccaagttttcgccgcacaaactggtttgagcctgtgggctcggagtataaacaggttatgcaaagagtagcggtaactgacctatcaccatttggcaagtttaacatcaaaggccaagattccattagactactggaccatctctttgcaaatgtcattccaaaggtgggttttacaaatataagtcacatgttaacacccaagggtcgagtgtatgctgagctgactgtttctcaccaatctcctggggagtttcttttaattactggctctggatcagaacttcatgatcttagatggattgaagaagaagcagtcaaaggtggatatgatgttgaaattaaaaacataactgatgagcttggagttcttggagttgctgggccacaggcaagaaaggtccttcagaaactgacctctgaagatcttagtgatgatgttttcaagtttcttcaaaccaagtccttaaaggtttccaacattcctgtcactgctattaggatatcttatactggtgagctgggttgggagctgtatcacagaagagaagattctgtggcgctgtatgacgctatcatgaatgcaggccaggaggagggaatcgacaattttggaacctatgccatgaatgccttacgcctggagaaagccttcagagcctgggggttagagatgaactgtgatacaaatcctttggaagctggactggaatattttgtgaagttaaataaggatcagaatagctgctttgcccattttaaggaggaaaatggctgggtgagcagatgggccatcaggccttattagggtgaatcgtgttcttgtcaaaacctgtcagcaagtagggaaaagaacaatggagtactgaagaactctttcatcacaaagggagacggcgcagtggcccttgcttccttccgtcttggagttgttccagcctccttcccctgctgttggcttatgtgaagttgatacacatgtatcattcattcatccgttcatctagtagacatttattaagtaccgctgattagacaccttgctaacccatagatctaaatgttaaagatatactcctgatggctctcagatctcatgaacctggaaacaaataatatttcaggaactaaagctgtagggatacgttcttagccgtaattgtgaagataacccttccgcaagtggagggctctccagccgcatacaacactgccatcttgtgggaagtgctccgtagagccacttcaggaagccttgaccaaagctgcggtaaaaataattgaatctgtacttttaaaatcttcttaactaaaaacgcttcacctgaaacgactcatatcattgttctcaatggtatttttggtatgttccaaaggaagtaacttttgggaggaaaatcagtagcctttgtttagttggagatggaagaaatgcattaatcaagagcaaaaggaaaatcagctgcctttggatggagtcataggcattcctggaattttcatggtggaaatattgaatttttgtccatttctggagaacctccacgaagattcacagagactcaagtattaaacgtaatgtgttgaagcacatcagaagaatttgttttctataatatgtttctccctctttttctcactctctccttctccctctctttccctttttctctctccttcccctctctccccgtgtagagcttctaactagtagaaacagaataaaatgtaatctctattaaa

SEQ ID NO: 287977 - DNA, 2331 bp, Artificial Sequence
  derived and/or modified sequence
ctagtcatgctccgtcccggcgcgcagctgctgcggggcctcctgctgcggagctgcccgctgcagggctcccccgggcgcccgcgctctgtctgcggccgggaaggagaggaaaaaccacccttatctgcagaaacacaatggaaagacagagcagaaacagtgataattggaggtggctgtgttggtgtgagtctggcttatcacctggccaaagcagggatgaaagatgtggtcctgctggagaaatcagagctcacggctggatctacctggcacgcagcaggtttaacaacttactttcatcctggaataaacttgaagaaaatacattatgatagcatcaaactttatgagaaactggaagaagaaactggtcaggtggtgggattccatcagccaggtagtatcagacttgctaccacccctgtaagggtagatgaatttaaatatcaaatgactcggactggctggcatgcaacagaacagtatctcattgaacctgaaaaaattcaagagatgttccctttactcaacatgaataaggttttagctggattgtataatcctggagatggtcacattgatccttattctctaactatggcactggctgctggggctaggaaatgtggtgcccttttaaaatatcctgcaccagtaacttctctgaaagccaggtcagatggaacatgggacgttgaaacaccacaggggtctatgagagcaaatagaattgtgaatgctgcaggattttgggctcgtgaagtaggtaaaatgattggactagaacatcctctcattccggttcaacatcaatatgttgttacatcgactatatctgaagtgaaagctttgaaacgagaactgcctgtgctccgtgacctggaaggatcatattatctccgacaggaaagggatgggcttttgtttggtccatatgaaagtcaagagaaaatgaaagttcaggactcctgggtcaccaatggagttcctccaggttttggaaaggaactctttgagtctgatctagatcgaatcatggaacacatcaaagctgccatggaaatggttcctgtcttgaaaaaggctgacatcatcaatgttgtcaatggtcctatcacgtattctcctgacattctgcctatggtggggccccatcagggggtcagaaactactgggtggctataggctttggatatggcataatccacgctggtggggtagggaaatatctcagtgactggatcctgcatggagaacctccttttgatctgatagaattggatcctaatcgctatggcaaatggacaacaacccagtacactgaggccaaagcaagagaatcatatggattcaacaatattgttggttatcctaaagaagaacggtttgctgggaggccgactcaacgagtcagtgggctctatcaaaggctggagtctaagtgttccatggggttccatgctggctgggagcagccgcactggttctacaaaccaggccaggacactcagtacaggccaagttttcgccgcacaaactggtttgagcctgtgggctcggagtataaacaggttatgcaaagagtagcggtaactgacctatcaccatttggcaagtttaacatcaaaggccaagattccattagactactggaccatctctttgcaaatgtcattccaaaggtgggttttacaaatataagtcacatgttaacacccaagggtcgagtgtatgctgagctgactgtttctcaccaatctcctggggagtttcttttaattactggctctggatcagaacttcatgatcttagatggattgaagaagaagcagtcaaaggtggatatgatgttgaaattaaaaacataactgatgagcttggagttcttggagttgctgggccacaggcaagaaaggtccttcagaaactgacctctgaagatcttagtgatgatgttttcaagtttcttcaaaccaagtccttaaaggtttccaacattcctgtcactgctattaggatatcttatactggtgagctgggttgggagctgtatcacagaagagaagattctgtggcgctgtatgacgctatcatgaatgcaggccaggaggagggaatcgacaattttggaacctatgccatgaatgccttacgcctggagaaagccttcagagcctgggggttagagatgaactgtgatacaaatcctttggaagctggactggaatattttgtgaagttaaataaggatcagaatagctgctttgcccattttaaggaggaaaatggctgggtgagcagatgggccatcaggccttattag

SEQ ID NO: 287978 - DNA, 1517 bp, Artificial Sequence
  derived and/or modified sequence
ggcctagtcatgctccgtcccggcgcgcagctgctgcggggcctcctgctgcggagctgcccgctgcagggctcccccgggcgcccgcgctctgtctgcggccgggaaggagaggaaaaaccacccttatctgcagaaacacaatggaaagacagagcagaaacagtgataattggaggtggctgtgttggtgtgagtctggcttatcacctggccaaagcagggatgaaagatgtggtcctgctggagaaatcagagctcacggctggatctacctggcacgcaatatggcataatccacgctggtggggtagggaaatatctcagtgactggatcctgcatggagaacctccttttgatctgatagaattggatcctaatcgctatggcaaatggacaacaacccagtacactgaggccaaagcaagagaatcatatggattcaacaatattgttggttatcctaaagaagaacggtttgctgggaggccgactcaacgagtcagtgggctctatcaaaggctggagtctaagtgttccatggggttccatgctggctgggagcagccgcactggttctacaaaccaggccaggacactcagtacaggccaagttttcgccgcacaaactggtttgagcctgtgggctcggagtataaacaggttatgcaaagagtagcggtaactgacctatcaccatttggcaagtttaacatcaaaggccaagattccattagactactggaccatctctttgcaaatgtcattccaaaggtgggttttacaaatataagtcacatgttaacacccaagggtcgagtgtatgctgagctgactgtttctcaccaatctcctggggagtttcttttaattactggctctggatcagaacttcatgatcttagatggattgaagaagaagcagtcaaaggtggatatgatgttgaaattaaaaacataactgatgagcttggagttcttggagttgctgggccacaggcaagaaaggtccttcagaaactgacctctgaagatcttagtgatgatgttttcaagtttcttcaaaccaagtccttaaaggtttccaacattcctgtcactgctattaggatatcttatactggtgagctgggttgggagctgtatcacagaagagaagattctgtggcgctgtatgacgctatcatgaatgcaggccaggaggagggaatcgacaattttggaacctatgccatgaatgccttacgcctggagaaagccttcagagcctgggggttagagatgaactgtgatacaaatcctttggaagctggactggaatattttgtgaagttaaataaggatcagaatagctgctttgcccattttaaggaggaaaatggctgggtgagcagatgggccatcaggccttattagggtgaatcgtgttcttgtcaaaacctgtcagcaagtagggaaaagaacaatggagtactgaagaactctttcatcacaaagggagacggcgcagtggccc

SEQ ID NO: 287979 - protein, 190 aa, Artificial Sequence
  derived and/or modified sequence
MKASQCCCCLSHLLASVLLLLLLPELSGPLAVLLQAAEAAPGLGPPDPRPRTLPPLPPGPTPAQQPGRGLAEAAGPRGSEGGNGSNPVAGLETDDHGGKAGEGSVGGGLAVSPNPGDKPMTQRALTVLMVVSGAVLVYFVVRTVRMRRRNRKTRRYGVLDTNIENMELTPLEQDDEDDDNTLFDANHPRR

SEQ ID NO: 287980 - protein, 134 aa, Artificial Sequence
  derived and/or modified sequence
MRMLLHLSLLALGAAYVYAIPTEIPTSALVKETLALLSTHRTLLIANETLRIPVPVHKNHQLCTEEIFQGIGTLESQTVQGGTVERLFKNLSLIKKYIDGQKKKCGEERRRVNQFLDYLQEFLGVMNTEWIIES

SEQ ID NO: 287981 - DNA, 816 bp, Artificial Sequence
  derived and/or modified sequence
atgcactttctttgccaaaggcaaacgcagaacgtttcagagccatgaggatgcttctgcatttgagtttgctagctcttggagctgcctacgtgtatgccatccccacagaaattcccacaagtgcattggtgaaagagaccttggcactgctttctactcatcgaactctgctgatagccaatgagactctgaggattcctgttcctgtacataaaaatcaccaactgtgcactgaagaaatctttcagggaataggcacactggagagtcaaactgtgcaagggggtactgtggaaagactattcaaaaacttgtccttaataaagaaatacattgacggccaaaaaaaaaagtgtggagaagaaagacggagagtaaaccaattcctagactacctgcaagagtttcttggtgtaatgaacaccgagtggataatagaaagttgagactaaactggtttgttgcagccaaagattttggaggagaaggacattttactgcagtgagaatgagggccaagaaagagtcaggccttaattttcagtataatttaacttcagagggaaagtaaatatttcaggcatactgacactttgccagaaagcataaaattcttaaaatatatttcagatatcagaatcattgaagtattttcctccaggcaaaattgatatacttttttcttatttaacttaacattctgtaaaatgtctgttaacttaatagtatttatgaaatggttaagaatttggtaaattagtatttatttaatgttatgttgtgttctaataaaacaaaaatagacaactgttc

SEQ ID NO: 287982 - protein, 2429 aa, Artificial Sequence
  derived and/or modified sequence
MDMSDPNFWTVLSNFTLPHLRSGNRLRRTQSCRTSNRKSLIGNGQSPALPRPHSPLSAHAGNSPQDSPRNFSPSASAHFSFARRTDGRRWSLASLPSSGYGTNTPSSTVSSSCSSQEKLHQLPYQPTPDELHFLSKHFCTTESIATENRCRNTPMRPRSRSLSPGRSPACCDHEIIMMNHVYKERFPKATAQMEERLKEIITSYSPDNVLPLADGVLSFTHHQIIELARDCLDKSHQGLITSRYFLELQHKLDKLLQEAHDRSESGELAFIKQLVRKILIVIARPARLLECLEFDPEEFYYLLEAAEGHAKEGQGIKTDIPRYIISQLGLNKDPLEEMAHLGNYDSGTAETPETDESVSSSNASLKLRRKPRESDFETIKLISNGAYGAVYFVRHKESRQRFAMKKINKQNLILRNQIQQAFVERDILTFAENPFVVSMYCSFETRRHLCMVMEYVEGGDCATLMKNMGPLPVDMARMYFAETVLALEYLHNYGIVHRDLKPDNLLVTSMGHIKLTDFGLSKVGLMSMTTNLYEGHIEKDAREFLDKQVCGTPEYIAPEVILRQGYGKPVDWWAMGIILYEFLVGCVPFFGDTPEELFGQVISDEINWPEKDEAPPPDAQDLITLLLRQNPLERLGTGGAYEVKQHRFFRSLDWNSLLRQKAEFIPQLESEDDTSYFDTRSEKYHHMETEEEDDTNDEDFNVEIRQFSSCSHRFSKVFSSIDRITQNSAEEKEDSVDKTKSTTLPSTETLSWSSEYSEMQQLSTSNSSDTESNRHKLSSGLLPKLAISTEGEQDEAASCPGDPHEEPGKPALPPEECAQEEPEVTTPASTISSSTLSVGSFSEHLDQINGRSECVDSTDNSSKPSSEPASHMARQRLESTEKKKISGKVTKSLSASALSLMIPGDMFAVSPLGSPMSPHSLSSDPSSSRDSSPSRDSSAASASPHQPIVIHSSGKNYGFTIRAIRVYVGDSDIYTVHHIVWNVEEGSPACQAGLKAGDLITHINGEPVHGLVHTEVIELLLKSGNKVSITTTPFENTSIKTGPARRNSYKSRMVRRSKKSKKKESLERRRSLFKKLAKQPSPLLHTSRSFSCLNRSLSSGESLPGSPTHSLSPRSPTPSYRSTPDFPSGTNSSQSSSPSSSAPNSPAGSGHIRPSTLHGLAPKLGGQRYRSGRRKSAGNIPLSPLARTPSPTPQPTSPQRSPSPLLGHSLGNSKIAQAFPSKMHSPPTIVRHIVRPKSAEPPRSPLLKRVQSEEKLSPSYGSDKKHLCSRKHSLEVTQEEVQREQSQREAPLQSLDENVCDVPPLSRARPVEQGCLKRPVSRKVGRQESVDDLDRDKLKAKVVVKKADGFPEKQESHQKSHGPGSDLENFALFKLEEREKKVYPKAVERSSTFENKASMQEAPPLGSLLKDALHKQASVRASEGAMSDGRVPAEHRQGGGDFRRAPAPGTLQDGLCHSLDRGISGKGEGTEKSSQAKELLRCEKLDSKLANIDYLRKKMSLEDKEDNLCPVLKPKMTAGSHECLPGNPVRPTGGQQEPPPASESRAFVSSTHAAQMSAVSFVPLKALTGRVDSGTEKPGLVAPESPVRKSPSEYKLEGRSVSCLKPIEGTLDIALLSGPQASKTELPSPESAQSPSPSGDVRASVPPVLPSSSGKKNDTTSARELSPSSLKMNKSYLLEPWFLPPSRGLQNSPAVSLPDPEFKRDRKGPHPTARSPGTVMESNPQQREGSSPKHQDHTTDPKLLTCLGQNLHSPDLARPRCPLPPEASPSREKPGLRESSERGPPTARSERSAARADTCREPSMELCFPETAKTSDNSKNLLSVGRTHPDFYTQTQAMEKAWAPGGKTNHKDGPGEARPPPRDNSSLHSAGIPCEKELGKVRRGVEPKPEALLARRSLQPPGIESEKSEKLSSFPSLQKDGAKEPERKEQPLQRHPSSIPPPPLTAKDLSSPAARQHCSSPSHASGREPGAKPSTAEPSSSPQDPPKPVAAHSESSSHKPRPGPDPGPPKTKHPDRSLSSQKPSVGATKGKEPATQSLGGSSREGKGHSKSGPDVFPATPGSQNKASDGIGQGEGGPSVPLHTDRAPLDAKPQPTSGGRPLEVLEKPVHLPRPGHPGPSEPADQKLSAVGEKQTLSPKHPKPSTVKDCPTLCKQTDNRQTDKSPSQPAANTDRRAEGKKCTEALYAPAEGDKLEAGLSFVHSENRLKGAERPAAGVGKGFPEARGKGPGPQKPPTEADKPNGMKRSPSATGQSSFRSTALPEKSLSCSSSFPETRAGVREASAASSDTSSAKAAGGMLELPAPSNRDHRKAQPAGEGRTHMTKSDSLPSFRVSTLPLESHHPDPNTMGGASHRDRALSVTATVGETKGKDPAPAQPPPARKQNVGRDVTKPSPAPNTDRPISLSNEKDFVVRQRRGKESLRSSPHKKAL

SEQ ID NO: 287983 - protein, 168 aa, Artificial Sequence
  derived and/or modified sequence
MDMSDPNFWTVLSNFTLPHLRSGNRLRRTQSCRTSNRKSLIGNGQSPALPRPHSPLSAHAGNSPQDSPRNFSPSASAHFSFARRTDGRRWSLASLPSSGYGTNTPSSTVSSSCSSQEKLHQLPYQPTPDELHFLSKHFCTTESIATENRCRNTPMRPRSRSLSPGRSP

SEQ ID NO: 287984 - DNA, 7290 bp, Artificial Sequence
  derived and/or modified sequence
atggacatgagcgaccccaacttctggaccgtgctgagcaacttcaccctgccccacctgagaagcggcaacagactgagaagaacccagagctgcagaaccagcaacagaaagagcctgatcggcaacggccagagccccgccctgcccagaccccacagccccctgagcgcccacgccggcaacagcccccaggacagccccagaaacttcagccccagcgccagcgcccacttcagcttcgccagaagaaccgacggcagaagatggagcctggccagcctgcccagcagcggctacggcaccaacacccccagcagcaccgtgagcagcagctgcagcagccaggagaagctgcaccagctgccctaccagcccacccccgacgagctgcacttcctgagcaagcacttctgcaccaccgagagcatcgccaccgagaacagatgcagaaacacccccatgagacccagaagcagaagcctgagccccggcagaagccccgcctgctgcgaccacgagatcatcatgatgaaccacgtgtacaaggagagattccccaaggccaccgcccagatggaggagagactgaaggagatcatcaccagctacagccccgacaacgtgctgcccctggccgacggcgtgctgagcttcacccaccaccagatcatcgagctggccagagactgcctggacaagagccaccagggcctgatcaccagcagatacttcctggagctgcagcacaagctggacaagctgctgcaggaggcccacgacagaagcgagagcggcgagctggccttcatcaagcagctggtgagaaagatcctgatcgtgatcgccagacccgccagactgctggagtgcctggagttcgaccccgaggagttctactacctgctggaggccgccgagggccacgccaaggagggccagggcatcaagaccgacatccccagatacatcatcagccagctgggcctgaacaaggaccccctggaggagatggcccacctgggcaactacgacagcggcaccgccgagacccccgagaccgacgagagcgtgagcagcagcaacgccagcctgaagctgagaagaaagcccagagagagcgacttcgagaccatcaagctgatcagcaacggcgcctacggcgccgtgtacttcgtgagacacaaggagagcagacagagattcgccatgaagaagatcaacaagcagaacctgatcctgagaaaccagatccagcaggccttcgtggagagagacatcctgaccttcgccgagaaccccttcgtggtgagcatgtactgcagcttcgagaccagaagacacctgtgcatggtgatggagtacgtggagggcggcgactgcgccaccctgatgaagaacatgggccccctgcccgtggacatggccagaatgtacttcgccgagaccgtgctggccctggagtacctgcacaactacggcatcgtgcacagagacctgaagcccgacaacctgctggtgaccagcatgggccacatcaagctgaccgacttcggcctgagcaaggtgggcctgatgagcatgaccaccaacctgtacgagggccacatcgagaaggacgccagagagttcctggacaagcaggtgtgcggcacccccgagtacatcgcccccgaggtgatcctgagacagggctacggcaagcccgtggactggtgggccatgggcatcatcctgtacgagttcctggtgggctgcgtgcccttcttcggcgacacccccgaggagctgttcggccaggtgatcagcgacgagatcaactggcccgagaaggacgaggcccccccccccgacgcccaggacctgatcaccctgctgctgagacagaaccccctggagagactgggcaccggcggcgcctacgaggtgaagcagcacagattcttcagaagcctggactggaacagcctgctgagacagaaggccgagttcatcccccagctggagagcgaggacgacaccagctacttcgacaccagaagcgagaagtaccaccacatggagaccgaggaggaggacgacaccaacgacgaggacttcaacgtggagatcagacagttcagcagctgcagccacagattcagcaaggtgttcagcagcatcgacagaatcacccagaacagcgccgaggagaaggaggacagcgtggacaagaccaagagcaccaccctgcccagcaccgagaccctgagctggagcagcgagtacagcgagatgcagcagctgagcaccagcaacagcagcgacaccgagagcaacagacacaagctgagcagcggcctgctgcccaagctggccatcagcaccgagggcgagcaggacgaggccgccagctgccccggcgacccccacgaggagcccggcaagcccgccctgccccccgaggagtgcgcccaggaggagcccgaggtgaccacccccgccagcaccatcagcagcagcaccctgagcgtgggcagcttcagcgagcacctggaccagatcaacggcagaagcgagtgcgtggacagcaccgacaacagcagcaagcccagcagcgagcccgccagccacatggccagacagagactggagagcaccgagaagaagaagatcagcggcaaggtgaccaagagcctgagcgccagcgccctgagcctgatgatccccggcgacatgttcgccgtgagccccctgggcagccccatgagcccccacagcctgagcagcgaccccagcagcagcagagacagcagccccagcagagacagcagcgccgccagcgccagcccccaccagcccatcgtgatccacagcagcggcaagaactacggcttcaccatcagagccatcagagtgtacgtgggcgacagcgacatctacaccgtgcaccacatcgtgtggaacgtggaggagggcagccccgcctgccaggccggcctgaaggccggcgacctgatcacccacatcaacggcgagcccgtgcacggcctggtgcacaccgaggtgatcgagctgctgctgaagagcggcaacaaggtgagcatcaccaccacccccttcgagaacaccagcatcaagaccggccccgccagaagaaacagctacaagagcagaatggtgagaagaagcaagaagagcaagaagaaggagagcctggagagaagaagaagcctgttcaagaagctggccaagcagcccagccccctgctgcacaccagcagaagcttcagctgcctgaacagaagcctgagcagcggcgagagcctgcccggcagccccacccacagcctgagccccagaagccccacccccagctacagaagcacccccgacttccccagcggcaccaacagcagccagagcagcagccccagcagcagcgcccccaacagccccgccggcagcggccacatcagacccagcaccctgcacggcctggcccccaagctgggcggccagagatacagaagcggcagaagaaagagcgccggcaacatccccctgagccccctggccagaacccccagccccaccccccagcccaccagcccccagagaagccccagccccctgctgggccacagcctgggcaacagcaagatcgcccaggccttccccagcaagatgcacagcccccccaccatcgtgagacacatcgtgagacccaagagcgccgagccccccagaagccccctgctgaagagagtgcagagcgaggagaagctgagccccagctacggcagcgacaagaagcacctgtgcagcagaaagcacagcctggaggtgacccaggaggaggtgcagagagagcagagccagagagaggcccccctgcagagcctggacgagaacgtgtgcgacgtgccccccctgagcagagccagacccgtggagcagggctgcctgaagagacccgtgagcagaaaggtgggcagacaggagagcgtggacgacctggacagagacaagctgaaggccaaggtggtggtgaagaaggccgacggcttccccgagaagcaggagagccaccagaagagccacggccccggcagcgacctggagaacttcgccctgttcaagctggaggagagagagaagaaggtgtaccccaaggccgtggagagaagcagcaccttcgagaacaaggccagcatgcaggaggccccccccctgggcagcctgctgaaggacgccctgcacaagcaggccagcgtgagagccagcgagggcgccatgagcgacggcagagtgcccgccgagcacagacagggcggcggcgacttcagaagagcccccgcccccggcaccctgcaggacggcctgtgccacagcctggacagaggcatcagcggcaagggcgagggcaccgagaagagcagccaggccaaggagctgctgagatgcgagaagctggacagcaagctggccaacatcgactacctgagaaagaagatgagcctggaggacaaggaggacaacctgtgccccgtgctgaagcccaagatgaccgccggcagccacgagtgcctgcccggcaaccccgtgagacccaccggcggccagcaggagcccccccccgccagcgagagcagagccttcgtgagcagcacccacgccgcccagatgagcgccgtgagcttcgtgcccctgaaggccctgaccggcagagtggacagcggcaccgagaagcccggcctggtggcccccgagagccccgtgagaaagagccccagcgagtacaagctggagggcagaagcgtgagctgcctgaagcccatcgagggcaccctggacatcgccctgctgagcggcccccaggccagcaagaccgagctgcccagccccgagagcgcccagagccccagccccagcggcgacgtgagagccagcgtgccccccgtgctgcccagcagcagcggcaagaagaacgacaccaccagcgccagagagctgagccccagcagcctgaagatgaacaagagctacctgctggagccctggttcctgccccccagcagaggcctgcagaacagccccgccgtgagcctgcccgaccccgagttcaagagagacagaaagggcccccaccccaccgccagaagccccggcaccgtgatggagagcaacccccagcagagagagggcagcagccccaagcaccaggaccacaccaccgaccccaagctgctgacctgcctgggccagaacctgcacagccccgacctggccagacccagatgccccctgccccccgaggccagccccagcagagagaagcccggcctgagagagagcagcgagagaggcccccccaccgccagaagcgagagaagcgccgccagagccgacacctgcagagagcccagcatggagctgtgcttccccgagaccgccaagaccagcgacaacagcaagaacctgctgagcgtgggcagaacccaccccgacttctacacccagacccaggccatggagaaggcctgggcccccggcggcaagaccaaccacaaggacggccccggcgaggccagacccccccccagagacaacagcagcctgcacagcgccggcatcccctgcgagaaggagctgggcaaggtgagaagaggcgtggagcccaagcccgaggccctgctggccagaagaagcctgcagccccccggcatcgagagcgagaagagcgagaagctgagcagcttccccagcctgcagaaggacggcgccaaggagcccgagagaaaggagcagcccctgcagagacaccccagcagcatcccccccccccccctgaccgccaaggacctgagcagccccgccgccagacagcactgcagcagccccagccacgccagcggcagagagcccggcgccaagcccagcaccgccgagcccagcagcagcccccaggacccccccaagcccgtggccgcccacagcgagagcagcagccacaagcccagacccggccccgaccccggcccccccaagaccaagcaccccgacagaagcctgagcagccagaagcccagcgtgggcgccaccaagggcaaggagcccgccacccagagcctgggcggcagcagcagagagggcaagggccacagcaagagcggccccgacgtgttccccgccacccccggcagccagaacaaggccagcgacggcatcggccagggcgagggcggccccagcgtgcccctgcacaccgacagagcccccctggacgccaagccccagcccaccagcggcggcagacccctggaggtgctggagaagcccgtgcacctgcccagacccggccaccccggccccagcgagcccgccgaccagaagctgagcgccgtgggcgagaagcagaccctgagccccaagcaccccaagcccagcaccgtgaaggactgccccaccctgtgcaagcagaccgacaacagacagaccgacaagagccccagccagcccgccgccaacaccgacagaagagccgagggcaagaagtgcaccgaggccctgtacgcccccgccgagggcgacaagctggaggccggcctgagcttcgtgcacagcgagaacagactgaagggcgccgagagacccgccgccggcgtgggcaagggcttccccgaggccagaggcaagggccccggcccccagaagccccccaccgaggccgacaagcccaacggcatgaagagaagccccagcgccaccggccagagcagcttcagaagcaccgccctgcccgagaagagcctgagctgcagcagcagcttccccgagaccagagccggcgtgagagaggccagcgccgccagcagcgacaccagcagcgccaaggccgccggcggcatgctggagctgcccgcccccagcaacagagaccacagaaaggcccagcccgccggcgagggcagaacccacatgaccaagagcgacagcctgcccagcttcagagtgagcaccctgcccctggagagccaccaccccgaccccaacaccatgggcggcgccagccacagagacagagccctgagcgtgaccgccaccgtgggcgagaccaagggcaaggaccccgcccccgcccagcccccccccgccagaaagcagaacgtgggcagagacgtgaccaagcccagccccgcccccaacaccgacagacccatcagcctgagcaacgagaaggacttcgtggtgagacagagaagaggcaaggagagcctgagaagcagcccccacaagaaggccctgtag

SEQ ID NO: 287985 - DNA, 507 bp, Artificial Sequence
  derived and/or modified sequence
atggacatgagcgaccccaacttctggaccgtgctgagcaacttcaccctgccccacctgagaagcggcaacagactgagaagaacccagagctgcagaaccagcaacagaaagagcctgatcggcaacggccagagccccgccctgcccagaccccacagccccctgagcgcccacgccggcaacagcccccaggacagccccagaaacttcagccccagcgccagcgcccacttcagcttcgccagaagaaccgacggcagaagatggagcctggccagcctgcccagcagcggctacggcaccaacacccccagcagcaccgtgagcagcagctgcagcagccaggagaagctgcaccagctgccctaccagcccacccccgacgagctgcacttcctgagcaagcacttctgcaccaccgagagcatcgccaccgagaacagatgcagaaacacccccatgagacccagaagcagaagcctgagccccggcagaagcccctag

SEQ ID NO: 287986 - DNA, 7290 bp, Artificial Sequence
  derived and/or modified sequence
atggacatgtccgatcccaatttctggactgttctgagtaactttaccctgcctcacttacgctcaggaaaccgactgcgacggacgcagtcgtgcaggacctccaatcgaaagtctctcatcggcaatggacagtcacctgccctgccaaggcctcactcccctctttccgcccatgcgggcaatagcccccaagatagtcctcggaatttcagcccctcagcttctgcgcattttagttttgctagacgaacggatgggcgaagatggagtctggctagcctcccgagctccggctacggcacaaacacgccatcttctaccgtgtcaagtagctgttcatcccaggaaaagctgcatcaattgccctaccagcctaccccggacgaactgcatttcctgtccaaacacttttgtaccactgaaagcatcgccaccgagaatcgctgtaggaacacgccgatgaggcctcgctcccgatctcttagtccagggcgttcccccgcctgctgtgaccatgagataattatgatgaaccacgtgtacaaggagaggttccctaaggccaccgcccagatggaggagcgtctgaaagaaattatcacatcctattcccctgacaacgttctgcccctggccgacggcgtactgtcattcacccaccatcagataatcgaacttgccagggattgcctggataagagccaccaaggcctgattacctctcggtacttcctggagctgcagcacaaattggataagctgctgcaagaggcccacgatagatcagaatccggcgagctggcgtttatcaagcaactcgtccgcaagattctgatagtgatagcccggccggccagactgttagagtgcctggagttcgacccagaggaattttactatctgctagaggcggccgagggccatgccaaggagggtcagggaatcaaaactgatatcccaaggtacatcatctcacaactgggcttgaacaaggatcctctggaagagatggcacacctggggaactacgactcaggaacagcagaaactcctgaaaccgatgaaagtgtgtcttcaagcaatgcttctcttaagctccggaggaagccccgcgaatcagacttcgagaccattaagctcatctcgaatggggcctatggagcagtgtatttcgttcgacacaaggaatcacgccagaggttcgcaatgaagaaaatcaataagcagaatctcatcttacggaaccagatccagcaggctttcgtcgaacgagatattctaacttttgccgagaaccccttcgtagtgagcatgtattgcagcttcgagactcgcagacatttgtgtatggtcatggagtacgtggagggcggagattgtgccaccttaatgaaaaatatggggcccctgcctgtggatatggcccgcatgtattttgctgagaccgtcttggccctcgaatacttgcataactatggcatcgtgcatagagacctgaagcccgataatctgcttgttacaagcatgggccacatcaaactcaccgacttcgggctctccaaagtgggcctgatgtccatgacaactaatttatacgaaggtcatatcgagaaagatgcgagggaatttctagataagcaggtttgtgggactccagaatacattgccccggaggtgatcctgcgtcagggctacggcaagcccgtggactggtgggccatggggatcattctgtatgagtttctagttggatgcgtcccctttttcggggacaccccggaagagctatttggccaagttatctctgacgagataaactggcccgagaaagacgaggcccctccaccagatgcacaggacttgattactctgctgctgcggcagaaccctctcgagcggcttggcacaggcggagcatatgaggtgaaacagcatagattctttaggtccctcgactggaatagcctccttcgtcagaaggcggaatttattccacagctcgaatcagaggacgacacttcctattttgacacccgctccgagaagtaccatcacatggagacggaagaggaggacgacaccaatgatgaggactttaatgtcgagatccgacaattctcttcatgtagtcatagattcagcaaagtgttcagctcaattgaccgcatcacccagaattctgcagaagagaaggaggactcagtggataagactaaaagcaccactctcccttctacagaaaccctgtcttggtccagcgagtactcagagatgcagcagttgtctaccagcaactctagcgataccgagtctaacaggcacaaactttcctccggcctcctccctaaattggccatcagcacagagggcgaacaggacgaagcagcctcctgccctggcgacccacatgaggagcccggaaagcctgctttaccacctgaagagtgcgcacaggaggaaccggaagtaaccactcccgccagtaccatctcatcctccaccctcagcgtggggagctttagtgagcacttggaccagattaatggccgctctgagtgcgtggactccacggataatagtagcaaaccaagttctgagcccgcatcacacatggctaggcagaggcttgaatcaacggagaaaaaaaagattagcggtaaagttacgaagagcttgagcgctagtgcccttagcctcatgatccccggagacatgttcgctgtatcccccctgggctcaccaatgtcgccccacagcctgtcctcggaccccagttctagcagggactcttctccatccagggactcaagtgctgcctctgctagtccacatcagcccatcgttatccactcttcgggcaagaattacggatttaccatccgcgcaattcgggtctacgtgggagattccgatatctataccgttcatcatattgtttggaacgtcgaagaaggtagccctgcctgccaggcggggctgaaggcgggagatcttatcacccatataaacggtgagcctgtccatggtctagtgcacacagaagtcatcgagctgctgctgaagagcggtaacaaagtgagcattacgaccacaccctttgaaaacacctctattaagaccggccctgctaggagaaattcatacaagtccagaatggtacgacgctctaagaaatccaagaaaaaggagagtctggaaaggcgcagatccctgttcaaaaaactggctaagcagccaagtccccttttacacacgtcgcggtccttttcctgtctgaatcgcagcttgtcctcaggggagagcctaccagggagtcctacccacagcctgagtccacgatctccaactccatcctatcgtagcactccagacttccccagcggtacgaactccagccaatcctcctcaccttccagcagtgcacccaattcacccgccggttccgggcacatccgcccatccaccctgcacgggctggccccgaagctaggcggccaacggtacaggtccggtcggcgcaagagcgccgggaacatcccactttctccactcgcgcgcacacctagccctacccctcaaccaactagccctcagaggtcccctagtccacttctggggcacagcttgggaaattcaaaaattgctcaggcatttccaagtaaaatgcactctccccccacaatcgtgcggcatatcgttcgccccaaaagcgccgagccacccaggagccctttgttgaagcgcgtccagagcgaggaaaagttgtctccatcttatgggagtgacaaaaagcacttgtgttcccgaaaacactccttggaggttactcaggaagaagttcagagagagcaaagccagagagaggcaccgctccagtctttggatgagaacgtttgcgacgtgcctcctctcagccgggctaggccagtcgaacagggctgccttaagaggccggtctcgcggaaggtcggaaggcaagagtctgtggatgatttggacagagacaagctgaaggccaaggtggtggtgaaaaaagcggatggatttccggagaagcaggagtcacaccaaaagtcacacgggcccggcagcgacctcgagaattttgccttgtttaagctggaggaacgagagaagaaagtgtaccccaaggccgttgaaagaagcagcacctttgaaaataaagcctccatgcaagaggctccacctctgggctcgctcctgaaggatgctcttcacaagcaagcctctgtgagggcctcggaaggcgctatgagtgacggaagagttcctgccgaacaccgccagggcggtggagattttcgacgcgcgcccgccccaggaacactgcaggacgggctgtgccatagcctggacagggggatcagcggcaagggcgagggcaccgaaaagtccagccaagcaaaggaattacttaggtgcgaaaagcttgacagcaagctggcaaatattgactacctcagaaagaagatgagcttggaagacaaagaggacaacctctgccccgtgctgaagcccaaaatgactgccggctcacatgaatgtcttcctggcaaccccgttaggccaacaggtggacagcaagagcccccacctgccagtgagtcccgcgcattcgtgagcagcacccatgcagctcagatgtctgccgtgtccttcgttcccctgaaggccctcactggcagagtggacagcggaacggagaagcctgggctggtggcaccggaaagcccagtgcgtaagtccccttcagaatacaaactagagggccgctcagtctcttgcctaaagcccattgaaggcactctcgatatagctctgctgtccgggccgcaagcttcgaagactgagctgccgagcccagaatccgcacagagtccttccccatcaggagatgtgagggcaagtgttcctcccgtcctgcctagcagctccggcaaaaaaaacgatactacttcagccagagagctatccccttcgtcactgaagatgaataaatcttacctcctagagccatggttcctgccaccctcaagagggctgcagaatagccccgctgtgtcactaccggaccctgagttcaaacgcgaccgcaaaggaccacatcccacggctcggtccccaggaacagtcatggagtccaacccacagcagcgcgaaggttccagtcccaaacaccaggaccacacaaccgatccaaagcttctgacgtgtctgggccaaaatcttcacagcccagacttggctaggcccagatgcccacttccacccgaggcctcacctagcagggaaaagccaggactgagagagagctcggagagaggcccccccacagctagatctgagaggtcagcagcccgggcagatacctgtcgggaacctagtatggagctttgttttcctgagaccgccaaaacctcagacaattctaagaatctgctgtccgtgggtaggacacaccctgacttctacacccagactcaagctatggagaaagcttgggcccccggcggaaagaccaaccataaggacggcccaggagaagcgcgaccaccccctagagacaactcttcactccactccgccgggatcccgtgtgagaaggagctgggcaaagtcaggagaggggttgaacccaagccggaggcgcttttggcaagacgaagtttgcagccaccaggtatcgagtccgaaaagtcagagaagctgtcatcctttccctcccttcagaaggacggagccaaagaaccagagcggaaggagcaacccttacagcgccacccgtctagtatccccccccctcccttaactgcaaaagacttatcgtcgcccgcagcgaggcagcattgctctagcccttcccacgcctccggcagggaacccggagctaaacccagcaccgctgagccctcttccagtcctcaggaccccccgaagccggtagctgcgcattccgagagcagctcgcataagcccaggccgggtcctgatccaggccccccaaaaaccaaacatccggaccgaagtcttagtagccaaaaacccagcgtgggggctacgaagggcaaagagcctgctacccagtcgctcggaggatcctcaagggagggtaaaggccattctaagagtggacctgacgtctttcccgcaactcctggcagccagaataaggcttctgacgggataggtcagggcgagggcggcccctctgtgcctctccacacagaccgagcccctttggacgctaagccccaacccacctcaggcggccgccccctcgaagtcctcgagaagcccgtgcatctgccaagaccagggcacccgggaccctccgaacctgcggatcaaaaactgtcagcagtgggagagaagcagactctgagccccaaacacccaaagccatcaaccgtgaaggattgtccaaccctgtgcaaacagacagacaataggcaaaccgataagtctccatctcagccggcagcgaataccgaccgccgcgccgagggtaaaaagtgcaccgaggctctttatgctccggccgaaggcgacaagttagaagctggcctgtctttcgttcactctgaaaatcggctaaagggtgcggagcgacccgcagcaggggttggaaagggattccccgaagccaggggcaaaggtccgggaccacagaaacctcctaccgaggcggacaagcccaacggcatgaaaagatcgccatctgccacaggacagtcatccttccgtagcaccgcactcccagagaagagtctcagctgcagctcatctttccctgaaacgagggctggtgtgcgagaagcatcagctgcctccagcgacacatcttcagccaaagccgcaggagggatgcttgagctgccagccccatcgaacagggatcaccgaaaggcacagccagccggggagggccggactcatatgaccaagtcagactccttgccttcttttcgggtgagtactttgcctctggaaagccaccaccccgaccctaacacaatggggggcgcttctcaccgagacagggctctctccgtgaccgccaccgtcggtgagacaaagggcaaggaccccgcgccggcacagccccccccagcgagaaaacagaacgtgggacgcgatgtgactaaacctagcccagcacccaacaccgaccggcccatctctctttccaacgagaaagactttgttgttagacagagacgcgggaaggagtcactgaggagctctccgcataagaaggctctctag

SEQ ID NO: 287987 - DNA, 507 bp, Artificial Sequence
  derived and/or modified sequence
atggacatgtcagaccccaacttttggaccgtgcttagtaacttcacactgccccacctgagatctggcaatcggctccgtcgcactcagtcctgtcgcacgtctaaccgaaagagcttgatcggaaatgggcaaagtccagcgctcccaagaccacatagtcccctctctgcccatgccggtaactcaccacaagactcaccacgcaatttcagtccaagtgcctctgcacacttttccttcgcccgtaggaccgatggccggcgctggagccttgcatccttaccatcgtccgggtacggtacgaacaccccctcaagtacggtcagcagcagctgctcaagccaggagaaattgcatcagctcccttaccagcctactcctgacgagcttcacttcctctctaagcacttttgtaccacagaaagcatagctacggagaaccggtgtagaaacacaccaatgaggccgcggtcccggagtctttcgccgggccggagcccttag

SEQ ID NO: 287988 - DNA, 7290 bp, Artificial Sequence
  derived and/or modified sequence
atggacatgtctgaccccaacttctggacagtgctgagcaacttcaccctgccccacctgcggagcggcaaccggctgcggaggacccagagctgcaggaccagcaacaggaagagcctgattggaaatggccagagccctgccctgccccggccccacagccccctgagcgcccacgccggcaacagcccccaggacagccccaggaacttcagccccagcgccagcgcccacttctcctttgccaggagaacagatggccgccgctggagcctggccagcctgcccagcagcggctacggcaccaacacccccagcagcacagtgagcagcagctgcagcagccaggagaagctgcaccagctgccctaccagcccaccccagatgagctgcacttcctgagcaagcacttctgcaccacagagagcatcgccacagaaaatcgctgcaggaacacccccatgaggcccaggagccgcagcctgagccctggccgcagccctgcctgctgtgaccacgagatcatcatgatgaaccacgtgtacaaggagcgcttccccaaggccacagcccagatggaggagcggctgaaggagatcatcaccagctacagcccagacaacgtgctgcccctggctgatggagtgctgtccttcacccaccaccagatcatcgagctggcccgggactgcctggacaagagccaccagggcctcatcaccagccgctacttcctggagctgcagcacaagctggacaagctgctgcaggaggcccatgacagaagtgaaagtggagagctggccttcatcaagcagctggtgaggaagatcctgattgtcatcgcccggcctgcccggctgctggagtgcctggagtttgatcctgaggagttctactacctgctggaggccgctgagggccacgccaaggagggccagggcatcaagacagacatcccccgctacatcatcagccagctgggcctgaacaaggaccccctggaggagatggcccacctgggcaactatgacagcggcacagctgagaccccagagacagatgaatctgtgagcagcagcaatgccagcctgaagctgcggaggaagccccgggagagtgactttgagaccatcaagctgatcagcaatggagcctatggagctgtgtactttgtgcgccacaaggagagccggcagagatttgccatgaagaagatcaacaagcagaacctgatcctgaggaaccagatccagcaggcctttgtggagcgggacatcctgacctttgctgagaacccctttgtggtgtccatgtactgcagctttgagacccggcggcacctgtgcatggtgatggagtatgtggagggcggggactgtgccaccctgatgaagaacatgggccccctgcctgtggacatggccaggatgtactttgctgagaccgtgctggccctggagtacctgcacaactatggaattgtgcaccgggacctgaagccagacaacctgctggtgacctccatgggccacatcaagctgacagactttggcctgagcaaggtgggcctgatgtccatgaccaccaacctgtatgagggccacatcgagaaggatgcccgggagttcctggacaagcaggtgtgtggcaccccagagtacatcgcccctgaggtgatcctgcggcagggctacggcaagcctgtggactggtgggccatgggcatcatcctgtatgagttcctggtgggctgtgtgcccttcttcggggacaccccagaggagctgtttggccaggtgatcagtgatgagatcaactggccagagaaggatgaggcccctcctccagatgcccaggacctgatcaccctgctgctgcggcagaaccccctggagcggctgggcactggaggagcctatgaggtgaagcagcaccgcttcttccgcagcctggactggaacagcctgctgcggcagaaggccgagttcatcccccagctggagagtgaagatgacaccagctactttgacaccaggtctgagaagtaccaccacatggagacagaggaggaggatgacaccaatgatgaggacttcaacgtggagatccggcagttcagcagctgcagccaccgcttcagcaaggtgttcagcagcattgaccgcatcacccagaacagcgctgaggagaaggaggacagcgtggacaagaccaagagcaccaccctgcccagcacagagaccctgtcctggagcagcgagtacagcgagatgcagcagctgagcaccagcaacagcagtgacacagagagcaacagacacaagctgagcagcggcctgctgcccaagctggccatcagcacagaaggagagcaggatgaggccgccagctgccctggggacccccatgaggagcccgggaagccagccctgcccccagaggagtgtgcccaggaggagcctgaggtgaccaccccagccagcaccatcagcagcagcaccctgtctgtgggcagcttcagcgagcacctggaccagatcaatggccgctcagaatgtgtggacagcacagacaacagcagcaagcccagcagcgagcccgccagccacatggcccggcagaggctggagagcacagagaagaagaagatcagcggcaaggtgaccaagagcctgagcgccagcgccctgagcctgatgatccctggggacatgtttgctgtgagccccctgggcagccccatgagcccccacagcctgagcagtgaccccagcagcagccgggacagcagccccagccgggacagcagcgctgccagcgccagcccccaccagcccatcgtcatccacagcagcggcaagaactacggcttcaccatccgggccatccgggtgtatgtgggggacagcgacatctacacagtgcaccacatcgtgtggaatgtggaggagggcagccctgcctgccaggccggcctgaaggccggggacctgatcacccacatcaacggggagcctgtgcacggcctggtgcacacagaggtgattgagctgctgctgaagagcggcaacaaggtgtccatcaccaccaccccatttgagaacaccagcatcaagacaggccctgcccggaggaacagctacaagagcaggatggtgagaagaagcaagaagagcaagaagaaggagagcctggagaggagaagaagcctcttcaagaagctggccaagcagcccagccccctgctgcacaccagccgctccttcagctgcctgaacagaagcctgagcagtggagagagcctgcccggcagccccacccacagcctgagccccaggagccccacccccagctaccgcagcaccccagacttccccagcggcaccaacagcagccagagcagcagccccagcagcagcgcccccaacagccctgctggcagcggccacatccggcccagcaccctgcacggcctggcccccaagctgggcggccagcgctacagaagtggaagaaggaagtctgctggcaacatccccctgagccccctggcccggacccccagccccaccccccagcccaccagcccccagaggagccccagccccctgctgggccacagcctgggcaacagcaagatcgcccaggccttccccagcaagatgcacagcccccccaccatcgtgcgccacatcgtgcggcccaagtctgctgagcccccaagaagccccctgctgaagagggtgcagagcgaggagaagctgagccccagctatggcagtgacaagaagcacctgtgcagcaggaagcacagcctggaggtgacccaggaggaggtgcagcgggagcagagccagcgggaggcccccctgcagagcctggatgaaaatgtgtgtgatgtgccccccctgagccgggcccggcctgtggagcagggctgcctgaagaggcctgtgtccaggaaggtgggccggcaggagagcgtggatgacctggaccgggacaagctgaaggccaaggtggtggtgaagaaggcagatggcttccctgagaagcaggagagccaccagaagagccacggccctggcagtgacctggagaactttgccctcttcaagctggaggagcgggagaagaaggtgtaccccaaggctgtggagaggagcagcacctttgagaacaaggcctccatgcaggaggccccacccctgggcagcctgctgaaggatgccctgcacaagcaggcctctgtgcgggccagcgagggcgccatgtctgatggccgggtgcctgctgagcaccggcagggcggcggggacttcagaagagccccagcccctggcaccctgcaggacggcctgtgccacagcctggaccggggcatcagcggcaagggggagggcacagagaagagcagccaggccaaggagctgctgcgctgtgagaagctggacagcaagctggccaacatcgactacctgaggaagaagatgagcctggaggacaaggaggacaacctgtgccctgtgctgaagcccaagatgacagctggcagccatgagtgcctgcccggcaaccctgtgcggcccaccggcggccagcaggagcccccaccagccagcgagagccgggcctttgtgagcagcacccatgctgcccagatgtctgctgtgtcctttgtgcccctgaaggccctgaccggccgggtggacagcggcacagagaagccaggcctggtggcccctgagagccctgtgaggaagagccccagcgagtacaagctggagggccgctctgtgtcctgcctgaagcccatcgagggcaccctggacatcgccctgctgagcggcccccaggccagcaagacagagctgcccagccctgagagcgcccagagccccagccccagcggagatgtgcgggcctctgtgccccctgtgctgcccagcagcagcggcaagaagaatgacaccaccagcgcccgggagctgagccccagcagcctgaagatgaacaagagctacctgctggagccctggttcctgccccccagccggggcctgcagaacagccctgctgtgtccctgcctgaccctgagttcaagagggacaggaagggcccccaccccacagcccggagccctggcaccgtgatggagagcaacccccagcagcgggagggcagcagccccaagcaccaggaccacaccacagaccccaagctgctgacctgcctgggccagaacctgcacagcccagacctggcccggccccgctgccccctgcccccagaggccagccccagccgggagaagccaggcctgcgggagagcagcgagcggggccccccaacagcccggtctgagaggtctgctgcccgggctgacacctgccgggagcccagcatggagctgtgcttccctgagacagccaagaccagtgacaacagcaagaacctgctgtctgtgggccgcacccacccagacttctacacccagacccaggccatggagaaggcctgggcccctgggggcaagaccaaccacaaggatggccctggagaggcccggcccccaccccgggacaacagcagcctgcacagcgctggcatcccctgtgagaaggagctgggcaaggtgcggcggggcgtggagcccaagccagaggccctgctggcccggcgcagcctgcagcccccaggcattgaaagtgagaagtctgagaagctgagcagcttccccagcctgcagaaggatggagccaaggagcctgagaggaaggagcagcccctgcagaggcaccccagcagcatccccccaccacccctgacagccaaggacctgagcagccctgctgcccggcagcactgcagcagccccagccacgccagcggccgggagcccggggccaagcccagcacagctgagcccagcagcagcccccaggacccccccaagcctgtggccgcccacagcgagagcagcagccacaagccccggcccggccctgaccccggcccccccaagaccaagcacccagacaggagcctgagcagccagaagcccagcgtgggcgccaccaagggcaaggagcccgccacccagagcctgggcggcagcagccgggagggcaagggccacagcaagagcggcccagatgtgtttcctgccaccccaggcagccagaacaaggccagtgatggcatcggccagggcgagggcggccccagcgtgcccctgcacacagaccgggcccccctggatgccaagccccagcccaccagcggcggccggcccctggaggtgctggagaagcctgtgcacctgcccaggcctggccaccctggccccagcgagcctgctgaccagaagctgtctgctgtgggggagaagcagaccctgagccccaagcaccccaagcccagcacagtgaaggactgccccaccctgtgcaagcagacagacaaccggcagacagacaagagccccagccagcctgctgccaacacagacagaagagctgagggcaagaagtgcacagaggccctgtatgccccagctgagggggacaagctggaggccggcctgagctttgtgcacagtgaaaatcggctgaagggagctgagaggcctgctgctggggtgggcaagggcttccctgaggcccggggcaagggccctggcccccagaagcccccaacagaagctgacaagcccaacggcatgaagaggagccccagcgccaccggccagagcagcttccgcagcacagccctgcctgagaagagcctgagctgcagcagcagcttccctgagacccgggccggcgtgcgggaggccagcgctgccagcagtgacaccagcagcgccaaggccgccggcggcatgctggagctgcctgcccccagcaacagagaccacaggaaggcccagcctgctggggagggccgcacccacatgaccaagagtgacagcctgcccagcttccgggtgtccaccctgcccctggagagccaccacccagaccccaacaccatgggcggggccagccaccgggaccgggccctgtctgtgacagccaccgtgggggagaccaagggcaaggaccctgccccagcccagcccccaccagccaggaagcagaatgtgggcagagatgtgaccaagcccagccctgcccccaacacagaccggcccatcagcctgagcaatgagaaggactttgtggtgcggcagaggcggggcaaggagagcctgcggagcagcccccacaagaaggccctgtag

SEQ ID NO: 287989 - DNA, 507 bp, Artificial Sequence
  derived and/or modified sequence
atggacatgtctgaccccaacttctggacagtgctgagcaacttcaccctgccccacctgcggagcggcaaccggctgcggaggacccagagctgcaggaccagcaacaggaagagcctgattggaaatggccagagccctgccctgccccggccccacagccccctgagcgcccacgccggcaacagcccccaggacagccccaggaacttcagccccagcgccagcgcccacttctcctttgccaggagaacagatggccgccgctggagcctggccagcctgcccagcagcggctacggcaccaacacccccagcagcacagtgagcagcagctgcagcagccaggagaagctgcaccagctgccctaccagcccaccccagatgagctgcacttcctgagcaagcacttctgcaccacagagagcatcgccacagaaaatcgctgcaggaacacccccatgaggcccaggagccgcagcctgagccctggccgcagcccctag

SEQ ID NO: 287990 - DNA, 7290 bp, Artificial Sequence
  derived and/or modified sequence
atggacatgagcgaccccaacttctggaccgtgctgagcaacttcacccttccccacctaaggtctgggaacagactgagacggacgcagtcgtgtcggaccagtaaccgtaagtcccttatcggaaatggccagagtcccgctctccccagaccccactcccctctgtccgcccacgctggaaactccccccaggactctcctcggaacttcagtccctcagcaagcgcccacttcagttttgcaagacgcactgatggtcgacggtggtccttggccagtttaccctcttccggctacgggaccaacactccaagctccacagtctccagctcatgcagcagccaggaaaaacttcatcagttaccatatcagcccactccagacgaattgcacttcctaagcaaacatttctgcaccactgagtccattgctacggagaatcgttgccgaaatactcccatgagaccaagaagcaggtctctcagtccaggccggtctccagcttgctgtgaccacgagattatcatgatgaatcatgtctacaaggaaagattcccaaaagccaccgctcagatggaagagcgcctcaaggaaatcatcacttcgtactctccagacaatgtgctgccactggctgatggtgttctatcgttcacccaccaccagatcatcgagctggcacgggattgcctcgataagagtcaccaggggctgattacctctcgctattttctggaactgcagcacaaactggataagttgctgcaagaggctcacgatcgttctgaatctggggaactggcctttatcaagcagctggtacggaagattctcatcgttatcgccagacccgccagactgctcgagtgtttggaattcgatccggaagaattctactatctcctggaggctgcagaggggcacgcgaaggaagggcaggggatcaaaaccgacatcccccgatatattattagccagctggggctcaataaagatccactggaggagatggcccacttaggcaactatgactccgggacagcagagacacccgaaacggacgagtccgtttcctccagcaacgcgagcctgaagctccgccgcaaaccccgggaatctgattttgagaccattaaattgatttcaaatggcgcttacggggctgtatattttgtccggcacaaagaaagcaggcaacgttttgctatgaaaaagattaacaaacaaaacctaatccttagaaatcagatccagcaggccttcgtggaacgggatattctcacgtttgccgagaaccccttcgtggtgagcatgtattgctcatttgagactagaagacacctgtgcatggtgatggagtatgtggagggaggcgactgcgcaactctcatgaagaatatgggacccctccccgtagatatggccagaatgtactttgctgaaaccgttctcgcattggaatacctccacaactatgggatcgtccatcgggatctgaagcccgacaaccttctcgtaacttctatgggacatattaaattaactgacttcggtttaagtaaggtggggctgatgtcgatgacaactaatctttacgaaggtcatatcgagaaggacgcaagagagtttttagataagcaggtttgtggcactccagaatacattgcaccagaagttatcctgcgacaaggttacggaaagccagtggactggtgggccatggggattatcttgtacgagtttctggtcggctgtgtgcccttcttcggagatactcccgaagagttgtttggacaggttatcagcgatgagattaactggccagaaaaggatgaagcgccccccccagacgcacaagatctgatcacactgctgctgcgccagaacccacttgagcgattagggacaggcggcgcttatgaggtcaagcagcacaggttctttagaagtcttgattggaacagtctcctgcggcagaaagccgagttcatccctcagctggaatcagaggacgatacctcttattttgatactcgtagtgaaaagtatcatcatatggagactgaagaggaggacgataccaatgatgaagacttcaacgtggagatccggcaattctcttcatgctcccatagatttagtaaggtattcagctccattgatcgaatcacccagaacagtgctgaagagaaggaggactctgtcgataagacaaagtctactactctcccttcgacagagactctatcttggtcatctgagtactcagagatgcaacaactgagcacatcgaattcatctgataccgagtctaatcggcacaagttaagtagtggactgctcccgaagctagccatatccactgaaggagagcaagacgaggcagcctcgtgtccaggcgacccccatgaggagccaggtaagcctgcactcccacccgaagagtgcgctcaggaggagcccgaggtcacaacacccgcttccactatttccagctccacgctctccgttgggtccttctcagagcatttggaccaaatcaacggacggtcggagtgcgtggacagtaccgataacagtagcaagcctagctctgagcccgccagccatatggctaggcagcgactcgagtcgacagagaagaaaaaaattagtggaaaagtgaccaaaagcctctccgcaagcgccctgtcactgatgattcctggggatatgtttgctgtaagtccccttggtagtcctatgagtccccactcactgtccagcgacccctcttctagccgcgatagctccccgagccgagatagctcggccgccagtgctagtccccaccagcccatcgtcattcactcttccggcaagaattacggctttactattcgcgctattcgagtgtacgtcggtgattcagacatttatacagtacatcacatcgtgtggaatgtcgaagagggcagtcctgcatgccaagcaggcttaaaggctggcgacctgattactcatattaacggagaacccgttcacgggctggtgcacacagaggtcattgagttgctcctaaagagtgggaataaggtgagcatcaccactaccccttttgagaacacttctattaagacagggcctgcacgaaggaacagctataagtcccgaatggttaggagaagtaaaaagtccaaaaaaaaggaatcccttgaaagacgccgtagcctgttcaagaagctggcaaagcagcctagcccgttgcttcatacatcccgcagcttctcttgtctgaatagatccttgtcttctggcgaaagtctgccgggctcaccaactcatagcttaagcccacgcagcccaacgccatcttacagatcaaccccagattttccaagtggaacaaattcatcccagtcgagtagcccctctagctctgcgccgaacagccccgccgggagtggacatattcggccaagcacattacacggactcgcaccaaaactgggtggtcagagatacagaagtggacggcggaaatctgccggtaatatacccctgtccccactggctcgtaccccatcccctacacctcagccgaccagcccccaaagatccccctcccccctgctgggacatagtcttgggaatagtaagatcgcccaggcgtttccctctaagatgcactctccacctacaattgtcagacacatagtgaggcccaagagtgcggaacccccacgcagccctctacttaaacgagtacagagcgaagaaaagctgtccccttcctacggctctgataaaaagcatctgtgttccagaaaacacagtctggaagttacccaggaggaagtgcagcgagaacagtctcagcgagaggcccccctccagtccctggatgagaatgtctgcgacgtgccacctctcagccgagcccggcctgtagagcagggctgccttaagaggcccgtatcaaggaaagtgggcagacaggaatcagtagatgacctcgacagagacaagctaaaagcaaaggttgtcgttaagaaagccgatgggttccccgaaaagcaggagagtcaccaaaaatcacatggccctgggtcggacctcgagaacttcgctctgttcaaacttgaggagcgggagaagaaagtgtatcccaaagccgtggagcggtcctcaacgttcgagaacaaagccagtatgcaggaagcacccccactaggctcgctcctaaaagatgctctacacaaacaggcctcggtgcgagcatctgagggtgcgatgagcgatggtcgcgtgccagcagagcacagacaagggggcggggacttccgcagagctcctgcacctggcactctacaggacgggctgtgccacagtcttgatcggggaatttctgggaagggcgagggaaccgagaaatcatcgcaggcaaaagagcttctcaggtgcgaaaagctggactccaagttggcaaacatcgactatctgcgtaagaaaatgtcacttgaagacaaagaggacaacctgtgcccggtgctgaagcctaagatgaccgctggatctcacgaatgtttgcctggtaaccctgtgcgccctacgggcggacaacaggaaccacccccggcttccgagtcacgtgccttcgtcagctcaacacatgctgcccaaatgtcagcggtgagtttcgtgcccttgaaggccttgaccggccgcgtggatagtggcaccgagaaaccaggcctagtggcccccgagtcacccgtacgcaaatcaccgagtgaatacaaactagaaggccgttccgtgtcctgtctgaaacccatagagggcacgttggatatcgctttactcagcggaccccaggcttcaaagactgagctgcccagccctgagtcagctcagagcccaagcccttccggggacgtccgggcatccgtgcctcctgtgctgccttcttcttctggaaaaaaaaacgacaccacatcagcacgcgagctttctccctcttctctgaaaatgaataaatcgtacctgttggagccgtggttcctccctcccagtcgcggcctgcagaatagtcctgcagtgtccctgcctgaccctgagtttaagcgggacagaaagggcccccacccaactgctaggagccccggtaccgttatggaatcaaatcctcagcagcgtgaaggcagcagtccgaaacaccaggatcatactacagatccgaagctgcttacgtgtctggggcagaacctccactcacccgaccttgcccgtccaagatgtcctctgccaccagaggctagtccctcccgtgagaagccagggcttagggagtcttctgagcgaggacctcctaccgcacgtagcgagagatcagctgctagagccgacacttgccgagagccctcgatggagctatgttttcccgagacagccaagacctcagacaattctaagaatttgttgagtgtgggccggacgcacccagatttctacacccagacccaggccatggagaaagcctgggcacctggtgggaagacaaatcacaaggatggtccaggcgaagcgaggccccctccacgcgataatagctcactccactccgcgggaattccatgcgagaaggaactcggcaaggttaggcgcggagtcgaacctaagcctgaggcgctgctggcgagacgcagtttgcagccccctggaattgaaagcgaaaagagcgagaaactttcctccttcccttccttgcagaaggacggagctaaggagccggagagaaaggagcagcccctgcagcggcatcccagttcaatacctccacccccactcaccgccaaagacctgtcaagtccagcagctcgacagcactgttcttccccctcgcacgcctccggccgtgaaccaggagccaaaccctcgaccgcagaacccagcagcagcccccaggacccaccaaaaccagtggctgcccacagtgaatctagctcccacaagcctagaccaggtccggacccgggcccacccaaaacaaagcaccccgaccggtctttgagctcccagaagccttcagtcggagcaactaagggcaaagagcctgcgacccagtcgctgggggggtcaagccgtgagggaaaaggccattccaaaagtgggcctgacgtcttccccgcaacgccggggtcacagaataaggcgtccgacggaataggccagggcgagggaggtccatcagtgccactgcacaccgacagggcgccactggacgcaaagccgcaaccaaccagtgggggcagaccactggaggtcctggaaaaacccgttcatctcccccggccaggccaccctggccccagtgagcccgctgaccagaaactgtctgccgttggggaaaagcagacccttagccccaagcacccaaagccgagcacggtgaaggattgccctactctgtgtaaacagacagataatcggcagaccgacaagtccccttcccagccggccgctaataccgatcgtagggctgagggcaagaagtgcacagaggcgctttacgcaccggccgagggtgataaactggaagccggcctgagcttcgtgcattccgagaacagactcaagggcgcggagcgcccggctgctggtgtgggcaaaggctttccagaggctcgtggcaagggcccaggcccacaaaagcccccaactgaggccgataaacctaatggaatgaaacgcagtccatcggcaactggccaatccagtttccgtagtacagcactgcctgagaagagtctgtcctgctcatccagctttcccgagactcgagctggcgtacgcgaggcatcagccgcaagtagcgacacaagtagtgccaaggctgcaggaggcatgttggaactcccagccccctcgaaccgcgatcatagaaaggcccaacccgcaggagaaggccgaacacacatgacgaaaagtgactctctacccagcttccgggtgtctacactgcccttagaatcccatcaccccgaccctaataccatggggggtgcctcacacagagaccgcgctctgagcgtcacagccacggtcggcgagaccaagggaaaggacccagctccggcacaaccccctcccgccagaaagcaaaacgtagggagggacgtgaccaagccatcaccagcaccaaacacagataggccaatatcactttccaatgagaaggacttcgtagtgaggcaacggaggggaaaggagagcttgcggtccagtcctcataagaaagcgttgtag

SEQ ID NO: 287991 - DNA, 507 bp, Artificial Sequence
  derived and/or modified sequence
atggacatgagcgaccccaacttctggaccgtgctgagcaacttcacattgccccatctgcggtcagggaacagactccgtcgcacgcaatcatgtcgcacgagcaacaggaagtcactaatcggaaatggccagtcacccgcgcttccgcgcccgcattctcccctaagcgctcacgccggcaactctcctcaggactctccacgaaacttttccccttccgcaagcgctcacttctcattcgctagacgcacagatggcagacggtggtccttggcatccctgccctcgtctggttacggtactaacactcccagtagcacggtgtcctcctcttgttcttcacaagaaaagctgcaccagctaccataccagcccactccagatgagcttcacttcctatccaagcacttctgtaccacggaatctatcgcgactgaaaatcggtgtagaaatacacctatgcgccctaggtcacgtagtctttcccccggaagatctccctag

SEQ ID NO: 287992 - DNA, 7664 bp, Artificial Sequence
  derived and/or modified sequence
aaacagatgacaaagtacctccgactgaatcccacagacagcgctttgagcagaacgcacggctcaactcatgtaattactgtttatagctggccgagcctgactaggagagggcagacccgagaggaaatcagtttcccggacctttgagaggaggctgtgtgttaattaaaggctaggacgggacgggtacttctcagacatgctccaagttgttcttgagatcacagttcccatcacattttctctggagggagtgagtagataattgggattttttttttatttttggccttgtctttcttccttttttttacctctccccattttagtcatatggccttgaacccacagtgaattgaagagagaaagaaatggatatgtctgaccccaatttttggactgtgctctcaaactttactttgcctcatttgaggagtgggaacaggcttcggcgaacacaaagttgccgaacaagcaaccggaaaagcttaataggcaatgggcagtcaccagcattgcctcgaccacactcacctctctctgctcatgcaggaaatagccctcaagatagtccaagaaatttctcccccagtgcctcagcccatttttcatttgcacggaggactgatggacgccgctggtcgttggcttctctcccttcctctggctatgggacaaacacacccagctctacggtctcttcatcctgttcctcccaggagaagttgcatcagttaccataccaaccaacaccagacgagttacacttcttatcaaaacatttctgtaccaccgaaagcatcgccactgagaacagatgcaggaacacgccgatgcgcccccgttcccgaagtctgagccctggacgttctcccgcctgctgtgaccatgaaataattatgatgaaccatgtctacaaagaaaggttcccaaaggctacagctcagatggaagaacgtctaaaggaaattatcaccagctactctcctgacaacgttctacccttagcagatggagtgcttagtttcactcaccaccagattattgaactggctcgagattgcttggataaatcccaccagggcctcatcacctcacgatacttccttgaattacagcacaaattagataagttgctacaggaggctcatgatcgttcagaaagtggagaattggcatttattaaacaactagttcgaaagatcctaattgttattgcccgccctgctcggttattagagtgcctggaatttgatccggaagaattttactacctattggaagcagcagaaggccatgccaaagaaggacagggtattaaaaccgacattcccaggtacatcattagccaactgggactcaataaggatcccttggaagaaatggctcatttgggaaactacgatagtgggacagcagaaacaccagaaacagatgaatcagtgagtagctctaatgcctccctgaaacttcgaaggaaacctcgggaaagtgattttgaaacgattaaattgattagcaatggagcctatggggcagtctactttgttcggcataaagaatcccggcagaggtttgccatgaagaagattaataaacagaacctcatccttcgaaaccagatccagcaggcctttgtggagcgggatatcctgacttttgcagaaaacccctttgttgtcagcatgtattgctcctttgaaacaaggcgccacttgtgcatggtcatggaatatgtggaagggggagactgtgctactttaatgaaaaacatgggtcctctccctgttgatatggccagaatgtactttgctgagacggtcttggccttggaatatttacataattatggaattgtacacagggatttgaaaccagacaacttgttggttacctccatggggcacataaagctgacagattttggattatctaaggtgggactaatgagcatgactaccaacctttacgagggtcatattgagaaggatgctagagagttcctggataaacaggtctgtggcacacctgaatacattgcaccagaagtgattctgaggcagggttatggaaagccggtggactggtgggccatggggattatcctctatgaatttctggttggatgcgtgccattctttggggatactccagaggagctatttggacaagtcatcagtgatgagatcaactggcctgagaaggatgaggcacccccacctgatgcccaggatctgattaccttactcctcaggcagaatcccctggagaggctgggaacaggtggtgcatatgaagtcaaacagcatcgattcttccgttctttagactggaacagtttgctgagacagaaggcagaatttattccccaactggaatctgaggatgacacaagttattttgatactcggtctgagaagtatcatcatatggaaacggaggaagaagatgacacaaatgatgaagactttaatgtggaaataaggcagttttcttcatgttcacacaggttttcaaaagttttcagcagtatagatcgaatcactcagaattcagcagaagagaaggaagactctgtggacaaaaccaaaagcaccaccttgccatccacagaaacactgagctggagttcagaatattctgaaatgcaacagctatcaacatccaactcttcagatactgaaagcaacagacataaactcagttctggcctacttcccaaactggctatttcaacagagggagagcaagatgaagctgcctcctgccctggagacccccatgaggagccaggaaagccagcccttcctcctgaagagtgtgcccaggaggagcctgaggtcaccaccccagccagcaccatcagcagctccaccctgtcagttggcagtttttcagagcacttggatcagataaatggacgaagcgagtgtgtggacagtacagataattcctcaaagccatccagtgaacccgcttctcacatggctcggcagcgattagaaagcacagaaaaaaagaaaatctcggggaaagtcacaaagtccctctctgccagtgctctttccctcatgatcccaggagatatgtttgctgtttcccctctgggaagtccaatgtctccccattccctgtcctcggacccttcttcttcacgagattcctctcccagccgagattcctcagcagcttctgccagtccacatcagccgattgtgatccacagttcggggaagaactacggctttaccatccgagccatccgggtgtatgtgggagacagtgacatctatacagtgcaccatatcgtctggaatgtagaagaaggaagtccggcatgccaggcaggactgaaggctggagatcttatcactcacatcaatggagaaccagtgcatggacttgtccacacagaagttatagaactcctactgaagagtgggaataaggtgtcaatcactactaccccatttgaaaacacatcaatcaaaactggaccagccaggagaaacagctataagagccggatggtgaggcggagcaagaaatccaagaagaaagaaagtctcgaaaggaggagatctcttttcaaaaagctagccaagcagccttctcctttactccacaccagccgaagtttctcctgcttgaacagatccctgtcatcgggtgagagcctcccaggttcccccactcatagcttgtctccccggtctccaacaccaagctaccgctccacccctgacttcccatctggtactaattcctcccagagcagctcccctagttctagtgcccccaattccccagcagggtccgggcacatccggcccagcactctccacggtcttgcacccaaactcggcgggcagcggtaccggtccggaaggcgaaagtccgccggcaacatcccactgtccccgctggcccggacgccctctccaaccccgcaacccacctccccgcagcggtcaccatcccctcttctgggacactcactgggcaattccaagatcgcgcaagcctttcccagcaagatgcactccccgcccaccatcgtcagacacatcgtgaggcccaagagtgcggagccccccaggtccccgctgctcaagcgcgtgcagtccgaggagaagctgtcgccctcttacggcagtgacaagaagcacctgtgctcccgcaagcacagcctggaggtgacccaagaggaggtgcagcgggagcagtcccagcgggaggcgccgctgcagagcctggatgagaacgtgtgcgacgtgccgccgctcagccgcgcccggccagtggagcaaggctgcctgaaacgcccagtctcccggaaggtgggccgccaggagtctgtggacgacctggaccgcgacaagctgaaggccaaggtggtggtgaagaaagcagacggcttcccagagaaacaggaatcccaccagaaatcccatggacccgggagtgatttggaaaactttgctctgtttaagctggaagagagagagaagaaagtctatccgaaggctgtggaaaggtcaagtacttttgaaaacaaagcgtctatgcaggaggcgccaccgctgggcagcctgctgaaggatgctcttcacaagcaggccagcgtgcgcgccagcgagggtgcgatgtcggatggccgggtgcctgcggagcaccgccagggtggcggggacttcagacgggcccccgctcctggcaccctccaggatggtctctgccactccctcgacaggggcatctctgggaagggggaaggcacggagaagtcctcccaggccaaggagcttctccgatgtgaaaagttagacagcaagctggccaacatcgattacctccgaaagaaaatgtcacttgaggacaaagaggacaacctctgccctgtgctgaagcccaagatgacagctggctcccacgaatgcctgccagggaacccagtccgacccacgggtgggcagcaggagcccccgccggcttctgagagccgagcttttgtcagcagcacccatgcagctcagatgagtgccgtctcttttgttcccctcaaggccttaacaggccgggtggacagtggaacggagaagcctggcttggttgctcctgagtcccctgttaggaagagcccctccgagtataagctggaaggtaggtctgtctcatgcctgaagccgatcgagggcactctggacattgctctcctgtccggacctcaggcctccaagacagaactgccttccccagagtctgcacagagccccagcccaagtggtgacgtgagggcctctgtgccaccagttctccccagcagcagtgggaaaaagaacgataccaccagtgcaagagagctttctccttccagcttaaagatgaataaatcctacctgctggagccttggttcctgccccccagccgaggtctccagaattcaccagcagtttccctgcctgacccagagttcaagagggacaggaaaggtccccatcctactgccaggagccctggaacagtcatggaaagcaatccccaacagagagagggcagctcccctaaacaccaagaccacaccactgaccccaagcttctgacctgcctggggcagaacctccacagccctgacctggccaggccacgctgcccgctcccacctgaagcttccccctcaagggagaagccaggcctgagggaatcgtctgaaagaggccctcccacagccagaagcgagcgctctgctgcgagggctgacacatgcagagagccctccatggaactgtgctttccagaaactgcgaaaaccagtgacaactccaaaaatctcctctctgtgggaaggacccacccagatttctatacacagacccaggccatggagaaagcatgggcgccgggtgggaaaacgaaccacaaagatggcccaggtgaggcgaggcccccgcccagagacaactcctctctgcactcagctggaattccctgtgagaaggagctgggcaaggtgaggcgtggcgtggaacccaagcccgaagcgcttcttgccaggcggtctctgcagccacctggaattgagagtgagaagagtgaaaagctctccagtttcccatctttgcagaaagatggtgccaaggaacctgaaaggaaggagcagcctctacaaaggcatcccagcagcatccctccgccccctctgacggccaaagacctgtccagcccggctgccaggcagcattgcagttccccaagccacgcttctggcagagagccgggggccaagcccagcactgcagagcccagctcgagcccccaggaccctcccaagcctgttgctgcgcacagtgaaagcagcagccacaagccccggcctggccctgacccgggccctccaaagactaagcaccccgaccggtccctctcctctcagaaaccaagtgtcggggccacaaagggcaaagagcctgccactcagtccctcggtggctctagcagagaggggaagggccacagtaagagtgggccggatgtgtttcctgctaccccaggctcccagaacaaagccagcgatgggattggccagggagaaggtgggccctctgtcccactgcacactgacagggctcctctagacgccaagccacaacccaccagtggtgggcggcccctggaggtgctggagaagcctgtgcatttgccaaggccgggacacccagggcctagtgagccagcggaccagaaactgtccgctgttggtgaaaagcaaaccctgtctccaaagcaccccaaaccatccactgtgaaagattgccccaccctgtgcaaacagacagacaacagacagacagacaaaagcccgagtcagccggccgccaacaccgacagaagggcggaagggaagaaatgcactgaagcactttatgctccagcagagggcgacaagctcgaggccggcctttcctttgtgcatagcgagaaccggttgaaaggcgcggagcggccagccgcgggggtggggaagggcttccctgaggccagagggaaagggcccggtccccagaagccaccgacggaggcagacaagcccaatggcatgaaacggtccccctcagccactgggcagagttctttccgatccacggccctcccggaaaagtctctgagctgctcctccagcttccctgaaaccagggccggagttagagaggcctctgcagccagcagcgacacctcttctgccaaggccgccgggggcatgctggagcttccagcccccagcaacagggaccataggaaggctcagcctgccggggagggccgaacccacatgacaaagagtgactccctgccctccttccgggtctccaccctgcctctggagtcacaccaccccgacccaaacaccatgggcggggccagccaccgggacagggctctctcggtgactgccaccgtaggggaaaccaaagggaaggaccctgccccagcccagcctcccccagctaggaaacagaacgtgggcagagacgtgaccaagccatccccagccccaaacactgaccgccccatctctctttctaatgagaaggactttgtggtacggcagaggcgggggaaagagagtttgcgtagcagccctcacaaaaaggccttgtaa

SEQ ID NO: 287993 - DNA, 582 bp, Artificial Sequence
  derived and/or modified sequence
agacagcgctttgagcagaacgcacggctcaactcattcatatggccttgaacccacagtgaattgaagagagaaagaaatggatatgtctgaccccaatttttggactgtgctctcaaactttactttgcctcatttgaggagtgggaacaggcttcggcgaacacaaagttgccgaacaagcaaccggaaaagcttaataggcaatgggcagtcaccagcattgcctcgaccacactcacctctctctgctcatgcaggaaatagccctcaagatagtccaagaaatttctcccccagtgcctcagcccatttttcatttgcacggaggactgatggacgccgctggtcgttggcttctctcccttcctctggctatgggacaaacacacccagctctacggtctcttcatcctgttcctcccaggagaagttgcatcagttaccataccaaccaacaccagacgagttacacttcttatcaaaacatttctgtaccaccgaaagcatcgccactgagaacagatgcaggaacacgccgatgcgcccccgttcccgaagtctgagccctggacgttctcc

SEQ ID NO: 287994 - DNA, 7290 bp, Artificial Sequence
  derived and/or modified sequence
atggatatgtcagacccaaatttctggaccgtactttcaaactttaccttgcctcacctgagaagcggaaaccgcctccggcgaactcaaagttgccgaacgagtaaccggaaatcactgataggcaacggccagtccccagcacttcccagaccccattcccccttgagtgctcatgctggcaacagtccccaggattcaccacgcaatttctcgccttccgcaagcgcgcacttttcatttgctcgcagaactgatggaaggcggtggtctctggcatccctgccctcctcaggttacggcaccaatactcctagctccacggtgagtagcagctgctcaagccaagaaaagctgcatcagcttccataccaacccactcctgacgagcttcatttcttatccaaacacttttgcaccacagaatccatcgccaccgaaaatcgttgccgcaatacaccaatgagaccaaggtctcgatcactgagcccgggaagaagccctgcctgctgcgatcacgaaataataatgatgaaccatgtgtataaagaacgctttcccaaggccacagcacagatggaagaaagactcaaggagattatcacatcttattccccagacaatgtgcttccacttgcggacggcgtgttaagcttcacacaccaccagattatcgaactggccagagactgcctggataaaagccaccaaggactgatcacttcacgctactttcttgaactgcagcacaaacttgataagttgctgcaggaagctcatgataggtccgagtcgggagagttagctttcattaaacagctagttcgaaagattctgatcgtcattgcccgtcccgctcggctactcgaatgtctggagttcgatcctgaggagttctactatttgctggaagccgctgagggccacgccaaagaaggccagggaattaagaccgacatcccacgctacattatcagccagttgggcttaaacaaagaccccttggaggagatggcccacttgggaaattatgacagtgggaccgcagaaacccccgagacagatgaaagtgtatcttctagcaatgcctccctgaaactgcgacgaaaacccagagaatcggattttgaaaccataaagctgatctccaatggcgcttacggggcagtgtatttcgtgagacacaaagagtcacgccagcgctttgctatgaagaaaattaacaaacagaacttaatattgaggaatcaaatccagcaggcattcgttgagcgagatatcctaaccttcgcagaaaatcccttcgtcgtctcaatgtattgcagttttgagacgcggagacatctgtgcatggttatggagtacgtcgagggtggcgactgtgcgacacttatgaagaatatgggaccactgccagtagacatggctaggatgtatttcgcagagacagtgctggccctcgaatacctccacaattatggcatcgtgcaccgcgatctcaagcctgacaatctcctcgtcacctccatgggtcatatcaaactgaccgatttcggtctatccaaggtaggactgatgtctatgacaaccaacctgtacgagggacatatagaaaaagacgctagagagtttttagataagcaggtgtgcgggacgcccgagtatattgctcctgaggtgattttgcgacaaggttatggaaagccagtagattggtgggccatgggcatcatcctgtacgagtttttagtgggatgtgtccccttcttcggcgacactcccgaagagctgttcggtcaagtcatcagtgacgagatcaattggcccgagaaggatgaggcacctccgcctgacgctcaggatctgatcactctattgcttcgccaaaaccctttagaacgacttggcaccggcggagcctatgaagtgaaacaacatagatttttccggtcactcgattggaattctctccttcgtcagaaggctgagttcatcccccagctggagtccgaagacgacacttcctattttgatacgcggtctgagaaataccaccatatggagacggaagaagaagatgacaccaatgatgaggatttcaatgtggagattcgtcagttctcctcgtgtagtcatcgattttctaaggttttcagcagtatcgacaggatcacacagaacagcgccgaggaaaaggaagacagtgtggacaaaaccaaaagcacaactctcccttctacagaaacactttcttggtcttccgagtacagtgagatgcaacagcttagtacatcaaactcttcggacaccgagtccaacagacataagctgagctctggcctgctgccaaagctcgctatctctactgagggagaacaggacgaggcagcctcttgccccggtgatcctcacgaggaacctggaaaacccgctttgcctccggaggagtgtgcccaggaggagcctgaggtcactacacccgcatcaaccatttcttcatccaccctatccgtaggctcgttttccgagcatctcgatcagatcaatggtagatctgaatgcgtggattcgaccgacaattcctcaaagccatcctcggagcccgcaagtcacatggcacgacagcgcctcgagtctaccgagaagaaaaaaatttccgggaaagtgaccaagtccctatcagcatcagcgctctcattgatgataccaggcgacatgtttgcggtttccccactgggctccccgatgagcccccacagtctgtccagtgacccctctagtagtcgggatagcagccccagccgagattctagcgccgcttctgcctcacctcaccagccaattgtcatacacagctctggcaaaaattacggttttaccattagggctatcagggtttatgtaggagattctgacatctatactgttcatcatatagtctggaatgtcgaggagggttcccccgcatgtcaggctggactcaaagcaggagatctgatcacccatatcaacggcgagcccgtgcacggtctggtgcacaccgaggtcattgagcttctgctcaaatcaggaaacaaggtgtcaatcacaacaaccccatttgagaatacttcaataaagactggaccggctcggcgtaactcatacaagagccgcatggtcagaagatcaaagaaatccaaaaaaaaggaatccttggagcggcgaaggtcactgttcaagaaactggccaagcaacctagccccctgctacacacgagcaggtctttctcctgtctgaatcgatccctttctagcggggaaagcctgcccggaagtccaacacattccctttctccacgctctccaacgccctcctatcggtcaacacctgacttcccatccggaacaaacagttcccagtctagctctcctagcagttccgctccaaattctccggctggttctggacacatcaggccatcaacactgcacggcctggcacctaagctcggcggtcaacggtacagaagcggacgcagaaaaagcgccggtaatatcccactgtccccactggccagaacaccatcgcctacgccacagccaacgagccctcaaagaagcccctccccgttgctcggccactccttagggaatagcaaaatagcacaagcctttccctccaagatgcactcccctcccacaattgtgagacatattgtccgccctaagagcgctgaacccccacggagtccgctgctaaagagggtgcagtctgaagaaaagctctcacctagctacggtagtgataaaaagcacctgtgtagtagaaagcacagtctcgaagtaacgcaagaagaggttcaaagggagcaatcacaacgcgaggctcccctccagagcctggacgaaaacgtgtgtgacgttccccctctctcaagggcacggccagtagagcaaggatgtctgaaaagacccgtcagcaggaaggtcggcaggcaagagagcgttgacgaccttgacagggacaagctcaaagcaaaagtggttgtgaagaaggccgacggcttccccgagaaacaagagtctcaccagaagtcgcatggacctggctctgatctggagaattttgctctgtttaaactggaagaaagggagaagaaagtatatccaaaagctgtcgagagatccagtactttcgagaataaagccagcatgcaggaagcccctccactgggaagcctcctaaaagacgcgctgcacaagcaagcatccgttagggcctctgagggggctatgtccgacggacgagtaccagccgaacatcgccagggaggcggagacttcagacgggcacccgctcctgggactttacaagatggtctgtgtcacagcctggatcggggaatctctggaaagggagaaggaacagaaaaaagctcccaggccaaggagcttctgcgctgcgagaaattagacagtaaactggccaatatcgactacctcaggaaaaagatgagcttagaagataaggaagacaacctgtgccctgtgttgaagccaaaaatgactgctgggtctcatgaatgcctccctgggaatccggttcggcctacaggtggccagcaggagcctcccccagcttctgaaagtcgcgcttttgttagcagcacgcatgcggcacagatgtcagcagtttccttcgtgccactaaaagccctgacggggcgagtggacagtggaaccgagaaaccaggcctcgtggctcccgagtcccctgtgcgaaagtccccctccgaatacaaattggagggaagatccgtgagttgtctcaaacccatcgagggcacactcgacatcgctctcctcagcgggcctcaggcaagtaagacggagctaccatcccctgagtccgcgcagagtccttcaccgtctggagatgtccgggcatcagttccccctgtcctgccctcaagcagtggcaagaagaatgacaccacatccgcacgggagctctctcccagcagtctcaaaatgaacaagtcatacctgctggagccttggtttctccccccatcgcggggtctccagaattcccctgcggtgtctctgccagacccggagttcaaacgcgatcgcaaagggccacatcccacagctcgtagccccggtaccgtcatggagagtaacccgcagcagcgggaagggagttcacccaaacaccaggaccacaccacagacccaaagttgctaacatgtctaggccagaacctgcatagtccagacctcgctagaccgaggtgtccgctcccccctgaggcttctccttccagagagaagccaggcttgcgcgaatctagtgagagaggcccaccaaccgccagatccgaacgaagcgctgcaagggccgacacctgtcgggaacctagcatggaactttgctttcccgaaactgcgaaaacatccgacaactcaaagaacctgctgtcagtcgggaggactcaccccgatttttatacgcaaacacaggccatggaaaaagcatgggcccctggaggtaagacgaaccacaaggacggtcccggagaggccaggccacccccaagagataatagctctctacacagcgcagggatcccgtgtgaaaaagagctcggtaaagtgagacgcggagtcgagcctaaaccagaggcgctccttgctcgcaggagcttacaaccacccggtatcgaatcagagaagtccgaaaagttgtcatccttccccagcttacagaaggacggggcaaaggaacccgaacgtaaagagcagccactgcagcgccatcccagctccatccctccgcctcctctgactgcgaaggatctgtcctcccccgctgcaagacaacactgttcatctccctcgcacgcctccgggcgagagccaggtgctaagccgtccacagctgaacctagctccagcccccaagacccgccaaaaccagtcgccgctcactctgagagttcttctcataaacctagaccgggacccgaccctggacccccaaagacgaagcatcctgaccggtctctaagttcacagaaaccatctgtgggcgcaacgaagggcaaagaaccagctacacagagcttgggcggatctagccgggaaggaaaaggacactccaagagcggacccgatgtcttcccagccacacccggaagccagaataaggcgtccgatggcatcggacagggagaaggaggcccaagcgtgcctctccacactgacagagccccactggatgctaaaccccagccaacgagcggagggagacccctggaagtgctcgagaagccagtgcacctgccgcgacccggacaccctggtcctagcgagccggctgaccagaagctttccgccgtgggtgaaaaacaaaccctcagtcctaaacacccaaaacccagcaccgtgaaggattgccccaccctgtgtaagcagaccgacaatcgacaaacagataagagccccagtcagcccgctgccaacactgatcggagagcagagggaaaaaagtgcactgaggcattgtacgcccctgccgaaggggacaagctcgaggcaggactctcctttgtacattcagaaaatagactgaaaggggctgagcgtccagccgcaggcgtcggcaaaggcttccctgaggcaagaggtaaaggaccaggccctcaaaaacccccaactgaggccgataaacctaatggtatgaaacgcagccccagtgcaacagggcaatcatcctttcgcagcacagcactcccagaaaagtctctgagctgcagctcatccttcccagaaacacgcgctggagtgcgggaggcctctgcagcatcaagcgacacaagttcagccaaggccgcaggcggtatgctggagttacccgctccctccaatcgagatcatcggaaagcacagcccgcaggggaagggagaacgcatatgaccaaaagtgattctctgccatcttttagagtaagtaccctgccgcttgagagccatcatcctgaccccaatacaatgggcggagcatcccaccgggatagggctttgtccgtcactgccaccgttggagaaacaaaaggaaaggacccagcccctgcacagccgccacctgctagaaaacagaacgttggccgtgatgtcacaaaacccagccccgctcctaataccgatcgtcccattagtctgagcaatgaaaaagattttgtcgtgcgacagcgccgtggaaaggagtcgcttcggagttcacctcacaagaaagctctatat

SEQ ID NO: 287995 - DNA, 507 bp, Artificial Sequence
  derived and/or modified sequence
atggatatgtcagatcccaacttttggaccgtgctgtctaattttacgttaccacacttaagaagcggaaaccggctgagacggactcagtcatgccgtacgtcgaataggaagtcgctgatcggtaatggtcagtcccctgccctgcctcgtccccattctccgttatctgcccacgccggtaatagccctcaggactctcccagaaacttcagcccatccgcctcagcccatttttcttttgcaaggagaacagatggtaggcggtggagcctcgcctccctgccatcttctggctatggaacgaatacgccctcctcaactgtgtcaagttcttgttcgtctcaagaaaagctgcaccaactgccttatcaaccaacccccgatgaactgcactttctttccaagcacttctgcacgacagagtccatcgccacagagaatcggtgccgcaatacacccatgcgccctcgcagtagatcattgtctcccggtcgttctccttag

SEQ ID NO: 287996 - protein, 45 aa, Artificial Sequence
  derived and/or modified sequence
MGPRGAASLPRGPGPRRLLLPVVLPLLLLLLLAPPGSGAGASRPP

SEQ ID NO: 287997 - protein, 974 aa, Artificial Sequence
  derived and/or modified sequence
MAGRVPSLLVLLVFPSSCLAFRSPLSVFKRFKETTRPFSNECLGTTRPVVPIDSSDFALDIRMPGVTPKQSDTYFCMSMRIPVDEEAFVIDFKPRASMDTVHHMLLFGCNMPSSTGSYWFCDEGTCTDKANILYAWARNAPPTRLPKGVGFRVGGETGSKYFVLQVHYGDISAFRDNNKDCSGVSLHLTRLPQPLIAGMYLMMSVDTVIPAGEKVVNSDISCHYKNYPMHVFAYRVHTHHLGKVVSGYRVRNGQWTLIGRQSPQLPQAFYPVGHPVDVSFGDLLAARCVFTGEGRTEATHIGGTSSDEMCNLYIMYYMEAKHAVSFMTCTQNVAPDMFRTIPPEANIPIPVKSDMVMMHEHHKETEYKDKIPLLQQPKREEEEVLDQGDFYSLLSKLLGEREDVVHVHKYNPTEKAESESDLVAEIANVVQKKDLGRSDAREGAEHERGNAILVRDRIHKFHRLVSTLRPPESRVFSLQQPPPGEGTWEPEHTGDFHMEEALDWPGVYLLPGQVSGVALDPKNNLVIFHRGDHVWDGNSFDSKFVYQQIGLGPIEEDTILVIDPNNAAVLQSSGKNLFYLPHGLSIDKDGNYWVTDVALHQVFKLDPNNKEGPVLILGRSMQPGSDQNHFCQPTDVAVDPGTGAIYVSDGYCNSRIVQFSPSGKFITQWGEESSGSSPLPGQFTVPHSLALVPLLGQLCVADRENGRIQCFKTDTKEFVREIKHSSFGRNVFAISYIPGLLFAVNGKPHFGDQEPVQGFVMNFSNGEIIDIFKPVRKHFDMPHDIVASEDGTVYIGDAHTNTVWKFTLTEKLEHRSVKKAGIEVQEIKEAEAVVETKMENKPTSSELQKMQEKQKLIKEPGSGVPVVLITTLLVIPVVVLLAIAIFIRWKKSRAFGADSEHKLETSSGRVLGRFRGKGSGGLNLGNFFASRKGYSRKGFDRLSTEGSDQEKEDDGSESEEEYSAPLPALAPSSS

SEQ ID NO: 287998 - DNA, 2925 bp, Artificial Sequence
  derived and/or modified sequence
atggcgggccgggtgccgagtcttctggtgttactggtttttccttcctcttgcctcgccttcagaagtcctctgtcggtgttcaaaaggtttaaagagactacgcgacccttctccaacgaatgcctcggcacaacaaggccagtggtgcccatcgacagctcagacttcgctttagacatcaggatgcccggagtgactcccaaacaaagcgatacttatttttgcatgtctatgaggatacccgtggacgaggaagccttcgtgatcgattttaaaccacgggcctctatggataccgtacatcacatgttgctcttcggatgcaacatgcctagtagcaccggatcttactggttctgcgacgaggggacctgtaccgacaaggcaaacattctgtatgcctgggcacgtaatgcgccaccaacacggctgccaaagggggtcggctttcgggtcggaggtgaaaccggaagcaagtatttcgttctgcaggtacattacggtgatatttctgccttcagagataacaataaggattgctccggagtgagccttcacttaaccagactaccccaacccttaatcgccgggatgtatctgatgatgagtgtcgacaccgttatccccgctggcgagaaggttgttaattctgacatcagttgtcactacaaaaactacccaatgcatgtgttcgcctaccgggtgcatacccatcatctgggcaaggtggtgtccggctaccgtgtcaggaacggacaatggaccctcatcggccgccagtcacctcagctaccacaggccttctatccagtgggacatcccgtggatgtgtccttcggcgacctgctagcggcccgatgcgtgtttacaggtgaaggaagaactgaagccacacacattggaggaaccagctcggatgagatgtgcaacctctacataatgtactacatggaagccaagcacgctgtctctttcatgacttgtacccaaaacgttgcacctgacatgtttcggaccattccaccagaggctaacattcctattccagtgaagagcgacatggtgatgatgcatgaacaccacaaagagacagagtacaaggataagatcccattacttcagcagccaaaacgtgaggaagaggaggtccttgaccagggcgatttttactccctgttatccaaactgctcggggagagagaggacgtcgtgcacgtgcacaaatataatccgaccgaaaaggcagagagcgagtcagacctggtggccgagatcgccaacgtggtgcaaaaaaaggacttgggacgtagcgacgcccgcgaaggggctgaacatgagcgcggcaatgcaatcctcgtcagggaccggatccacaaatttcataggctggtctcgactctgcggcccccagaatcgcgagtcttctcactccagcagccacccccaggcgagggaacgtgggagccagagcatacaggcgacttccacatggaagaggctctggattggccaggtgtgtatctgctacccggacaagtttccggcgtagccctggaccccaagaacaacctagtgatctttcacaggggggatcacgtctgggatggtaatagttttgattctaaatttgtgtatcagcagatcggactcggcccaattgaagaagatacaatcttggtgattgatccgaataacgctgccgtgcttcaaagtagcgggaagaacctgttttatcttccacacggcctgtctattgacaaggatggtaactactgggttacagatgtggcattgcaccaggtgtttaaactcgatccaaacaataaggaagggcctgtcctgattctcggccgatccatgcaacctgggtccgaccaaaaccatttctgccagcccacggacgttgctgtcgatcctggaaccggcgccatttatgtaagcgacggctattgtaactccaggattgttcaattctctcctagtgggaaatttattacacagtggggggaggagagttccgggtcaagcccactgcccggccaattcaccgttccgcactcactggccttggttcctttgttaggccagctgtgcgtggcagatcgggagaacggcagaatacagtgtttcaaaacagacactaaagaattcgtccgtgaaattaagcacagctcttttggcaggaatgtcttcgcgatttcatacatacctgggctcctctttgccgtaaatggaaagccccacttcggcgatcaggagcccgtgcagggctttgtgatgaacttctccaacggggaaatcatcgatatcttcaagcccgtgagaaaacattttgatatgccccacgatattgttgccagcgaagacgggacggtgtatattggcgacgctcacaccaacaccgtttggaagttcacattaaccgagaagctcgaacatcgtagcgtgaagaaagctggaattgaagtacaagagatcaaagaggctgaggctgtcgttgagaccaagatggagaataaacctaccagcagtgagctacaaaagatgcaggagaagcagaaactaatcaaggaaccgggtagcggcgttcctgtggtcctaattactactttgctggtcatcccagttgtggtgctgctagccatcgctatctttatccgttggaagaaaagtagggcctttggagccgacagcgagcataaactggagacttctagtggaagggtgttaggacgttttaggggaaagggctctgggggtttaaacttaggcaatttctttgcctcacggaagggctattcccgcaaagggttcgacaggctctctacagaggggagtgaccaggagaaggaagatgacggatccgagtctgaggaagagtattccgccccactgccagcacttgctccatcatcgtcatag

SEQ ID NO: 287999 - DNA, 2925 bp, Artificial Sequence
  derived and/or modified sequence
atggccggccgggtgcccagcctgctggtgctgctggtgttccccagcagctgcctggccttccgcagccccctgagcgtcttcaagcgcttcaaggagaccacccggcccttcagcaatgaatgtctgggcaccaccaggcctgtggtgcccatcgacagcagtgactttgccctggacatccgcatgcctggggtgacccccaagcagagcgacacctacttctgcatgtccatgagaattcctgtggatgaggaggccttcgtcatcgacttcaagccccgggcctccatggacacagtgcaccacatgctgctgtttggctgcaacatgcccagcagcacaggcagctactggttctgtgatgagggcacctgcacagacaaggccaacatcctgtatgcctgggccagaaatgccccacccacccggctgcccaagggcgtgggcttccgggtgggcggggagaccggcagcaagtactttgtgctgcaggtgcactacggggacatcagcgccttccgggacaacaacaaggactgcagcggcgtgtccctgcacctgacccggctgccccagcccctgattgctggcatgtacctgatgatgtctgtggacaccgtcatcccagctggggagaaggtggtgaacagcgacatcagctgccactacaagaactaccccatgcacgtgtttgcctacagagtgcacacccaccacctgggcaaggtggtgtctggctacagagtgagaaatggccagtggaccctcatcggccggcagagcccccagctgccccaggccttctaccctgtgggccaccctgtggatgtgtcctttggagacctgctggccgcccgctgtgtgttcaccggggagggccgcacagaggccacccacatcggcggcaccagcagtgatgagatgtgcaacctgtacatcatgtactacatggaggccaagcatgctgtgtccttcatgacctgcacccagaatgtggccccagacatgttccgcaccatccccccagaggccaacatccccatccctgtgaagagtgacatggtgatgatgcatgagcaccacaaggagacagagtacaaggacaagatccccctgctgcagcagcccaagcgggaggaggaggaggtgctggaccagggcgacttctacagcctgctgagcaagctgctgggggagcgggaggatgtggtgcacgtgcacaagtacaaccccacagagaaggccgagagcgagagtgacctggtggccgagatcgccaacgtggtgcagaagaaggacctgggccgcagtgatgcccgggagggcgctgagcacgagagaggaaatgccatcctggtgcgggaccgcatccacaagttccaccggctggtgtccaccctgcggcccccagagagcagggtcttcagcctgcagcagcccccacctggagagggcacctgggagcctgagcacactggagacttccacatggaggaggccctggactggccaggagtgtacctgctgcccggccaggtgtctggagtggccctggaccccaagaacaacctggtgatcttccacagaggagaccacgtgtgggatggcaacagctttgacagcaagtttgtgtaccagcagatcggcctgggccccatcgaggaggacaccatcctggtgattgaccccaacaatgctgctgtgctgcagagcagcggcaagaacctcttctacctgccccacggcctgagcattgacaaggatggcaactactgggtgacagatgtggccctgcaccaggtgttcaagctggaccccaacaacaaggagggccctgtgctgatcctgggccgctccatgcagcccggcagtgaccagaaccacttctgccagcccacagatgtggccgtggaccccggcaccggggccatctacgtgtctgatggctactgcaacagccgcatcgtgcagttcagccccagcggcaagttcatcacccagtggggcgaggagagcagcggcagcagccccctgcccggccagttcaccgtgccccacagcctggccctggtgcccctgctgggccagctgtgtgtggccgaccgggagaatggccgcatccagtgcttcaagacagacaccaaggagtttgtgcgggagatcaagcacagcagctttggaagaaatgtgtttgccatctcctacatccctggcctgctgtttgctgtgaatggcaagccccactttggagaccaggagcctgtgcagggctttgtgatgaacttcagcaatggagagatcatcgacatcttcaagcctgtgaggaagcactttgacatgcctcatgacatcgtggcctctgaagatggcaccgtgtacatcggagatgcccacaccaacacagtgtggaagttcaccctgacagagaagctggagcacaggtctgtgaagaaggccggcatcgaggtgcaggagatcaaggaggccgaggccgtggtggagaccaagatggagaacaagcccaccagcagcgagctgcagaagatgcaggagaagcagaagctgatcaaggagcccggcagcggcgtgcctgtggtgctgatcaccaccctgctggtgattcctgtggtggtgctgctggccatcgccatcttcatccgctggaagaagagccgggcctttggagctgacagcgagcacaagctggagaccagcagcggccgggtgctgggccgcttccggggcaaaggaagtggcggcctgaacctgggcaacttctttgccagcaggaagggctacagcaggaaaggatttgaccggctgagcacagagggcagtgaccaggagaaggaggatgatggcagcgagagcgaggaggagtacagcgcccccctgcctgccctggcccccagcagcagctag

SEQ ID NO: 288000 - DNA, 2925 bp, Artificial Sequence
  derived and/or modified sequence
atggccggccgggtgcccagcctgctggtgctgctggtgttccccagttcttgcctggctttccgtagtccgctctctgtgtttaagcgcttcaaggagacaacccgcccattttctaatgagtgccttgggaccacgagacccgtggtgcccatagattcgagcgattttgccctcgatattcggatgcctggggtaacacctaagcagtcagacacttacttttgtatgtctatgagaatccccgtcgacgaagaggctttcgtgatcgatttcaaacctagagcttctatggacactgtgcatcacatgttgctgttcggctgcaatatgccatctagtactggctcctactggttctgcgatgaaggcacgtgtacagacaaggcgaacatcttgtatgcttgggcccggaatgcgccaccaacccgactccccaagggcgtggggtttagagtgggcggagaaaccggtagtaaatatttcgttttgcaggtgcattatggggacatttcagccttccgcgacaacaacaaggattgcagcggagtttcactgcacctaacaaggctcccacagcctcttatagccggcatgtatctgatgatgagtgtcgacactgttatcccagcgggagagaaggttgtgaactccgatatatcctgtcattacaagaactaccccatgcacgtttttgcctacagggttcatacgcatcatcttgggaaggttgtgtcaggatatcgggtgaggaacgggcagtggaccctcattggccggcagagtccccagctgccacaggcattttacccggtgggtcaccctgtcgacgtgtcctttggcgatcttctggctgcgcgatgcgtcttcaccggggaaggaaggactgaggccacccacattggcggcacttcaagcgatgagatgtgcaatctctatataatgtattacatggaggcaaaacatgctgtgtccttcatgacatgtacccaaaatgtcgcacccgacatgtttagaaccattccacctgaggccaacattcccattccagtcaaaagcgacatggtaatgatgcacgagcatcacaaagaaactgagtataaggacaagatacccctgctgcagcagccaaagcgagaggaggaggaagtcctggatcagggcgatttttatagtctcctcagcaagttgcttggagagagagaagacgtggtacatgtccacaaatataacccgactgaaaaagctgagagcgaatcagaccttgtggcggaaattgctaacgtagtgcagaagaaggacttgggacgatccgatgcaagggaaggagccgagcacgaacgcggaaatgctatcctggtcagggatagaatacataagttccacagactggtgagtacccttagacctccagaaagtcgggtgttcagccttcagcagccccctcccggcgagggcacttgggagccagaacatacaggtgacttccacatggaggaggctttagactggcctggcgtatacctcctgcctggacaagtgtccggtgtggccctggaccccaaaaataatctcgtaattttccacagaggggaccatgtatgggacgggaactctttcgatagtaagttcgtgtaccagcagataggcctaggccccatagaagaagacaccatactagtgattgaccccaacaacgcagctgtgctgcagagctccggtaagaatctgttctatttgccccatgggctgtccattgacaaggacggaaactactgggtcaccgatgtagctctgcaccaggtgttcaagctggaccctaacaataaagaaggcccagtgctgattctcggtcgatccatgcaacccggatctgaccaaaaccacttttgtcagcccactgacgtggctgttgatccaggcaccggggctatttatgtatcggatggatactgcaacagccgaatagtgcaattctcgcccagcggaaagttcattactcagtggggtgaagaaagctccggctctagcccattgcccggccaattcactgttccgcattcccttgcacttgtcccacttctgggacagctttgcgtcgcagaccgggaaaatggccgcatccaatgcttcaaaacagacaccaaagagttcgttcgcgagataaaacatagtagtttcgggcgtaatgtgtttgctatttcctacatccccggcctgctctttgcagttaatgggaagcctcacttcggagaccaggagcccgtgcagggatttgtgatgaatttctccaatggcgaaatcatagacatatttaagcctgtgagaaaacacttcgacatgcctcacgatatcgtggcctcagaagacggcaccgtttacatcggtgacgcccataccaatactgtctggaagtttaccctcacggagaagctcgaacataggtctgtgaagaaagcgggcatagaagttcaagagatcaaagaagccgaagccgtcgtcgagaccaaaatggagaacaagcctaccagctcagagcttcagaagatgcaggaaaaacaaaaattgatcaaggaaccaggctcaggggtcccagtggttctcattactaccttgctggtcatccccgtcgtggtcttattagccattgcgatattcattaggtggaagaaatcccgtgcctttggagcagatagcgaacacaagttggagacaagctctggaagagtgcttgggagattccgaggcaaaggctcaggaggactcaacctcggaaatttttttgctagtcgtaaaggctatagtcgaaaggggttcgaccggctctccacggagggctcggaccaggagaaagaggacgatgggtcagaaagcgaggaggaatacagcgctcccctgccggccttggcaccttcgtcctcatag

SEQ ID NO: 288001 - DNA, 3156 bp, Artificial Sequence
  derived and/or modified sequence
gaccgagacgcctcgccgcggccagctcgctgctctcgctggcggatggtgtgtggccgccgcaggacgcccgccgtgcccgggccatgaagtagcggctgctggcggcgccgctgcccaaccgccagccccagccccgcgctgcgctgcccggtcctctcccggcggggtcgtatcggcgtggacatggctggccgcgtccctagcctgctagttctccttgtttttccaagcagctgtttggctttccgaagcccactttctgtctttaagaggtttaaagaaactaccagaccattttccaatgaatgtcttggtaccaccagacccgtagttcctattgattcatcagattttgcattggatattcgcatgcctggggttacacctaaacagtccgatacatacttctgcatgtctatgcgaataccagtggatgaggaagccttcgtgattgacttcaagcctcgagccagcatggatactgtccatcacatgttactttttggatgcaatatgccttcatccactggaagttactggttttgtgatgaaggaacctgtacagataaagccaatattctgtatgcctgggcgagaaatgctccccctacccggctccccaaaggtgttggattcagagttggaggagagactggaagtaaatactttgtactacaggtacactatggggatattagtgcttttagagataataacaaggactgttctggtgtgtccttacacctcacacgtctgccacagcctttaattgctggcatgtaccttatgatgtctgttgacactgttatcccagcaggagaaaaagtggtgaattctgacatttcatgccattataaaaattatccaatgcatgtctttgcctatagagttcacactcaccatttaggtaaggtagtaagtggatacagagtaagaaatggacagtggacactgattggacggcagagccctcagctgccacaggctttctaccctgtggggcatccagttgatgtaagttttggtgacctactggctgcaagatgtgtattcactggtgaaggaaggacagaagccacacacattggtggcacgtctagtgatgaaatgtgcaacttatacattatgtattacatggaagccaagcatgcagtttctttcatgacctgtacccagaatgtagctccagatatgttcagaaccataccaccagaggccaacattccaattcccgtgaagtctgatatggttatgatgcatgaacatcataaagaaacagaatataaagataagattcctttactacagcagccaaaacgagaagaagaagaagtgttagaccagggtgatttctattcactactttccaagctgctaggagaaagggaagatgttgttcatgtgcacaaatataatcctacagaaaaggcagaatcagagtcagacctggtagctgagattgcaaatgtagtccaaaaaaaggatcttggtcgatctgatgccagagagggtgcagaacatgagaggggtaatgctattcttgtcagagacagaattcacaaattccacagactagtatctaccttgaggccaccagagagcagagttttctcattacagcagcccccacctggtgaaggcacctgggaaccagaacacacaggagatttccacatggaagaggcactggattggcctggagtatacttgttaccaggccaggtttctggggtggctctagaccctaagaataacctggtgattttccacagaggtgaccatgtctgggatggaaactcgtttgacagcaagtttgtttaccagcaaataggactcggaccaattgaagaagacactattcttgtcatagatccaaataatgctgcagtactccagtccagtggaaaaaatctgttttacttgccacatggcttgagtatagataaagatgggaattattgggtcacagacgtggctctccatcaggtgttcaaactggatccaaacaataaagaaggccctgtattaatcctgggaaggagcatgcaaccaggcagtgaccagaatcacttctgtcaacccactgatgtggctgtggatccaggcactggagccatttatgtatcagatggttactgcaacagcaggattgtgcagttttcaccaagtggaaagttcatcacacagtggggagaagagtcttcagggagcagtcctctgccaggccagttcactgttcctcacagcttggctcttgtgcctcttttgggccaattatgtgtggcagaccgggaaaatggtcggatccagtgttttaaaactgacaccaaagaatttgtgagagagattaagcattcatcatttggaagaaatgtatttgcaatttcatatataccaggcttgctctttgcagtgaatgggaagcctcattttggggaccaagaacctgtacaaggatttgtgatgaacttttccaatggggaaattatagacatcttcaagccagtgcgcaagcactttgatatgcctcatgatattgttgcatctgaagatgggactgtgtacattggagatgctcataccaacaccgtgtggaagttcaccttgactgagaaattggaacatcgatcagttaaaaaggctggcattgaggtccaggaaatcaaagaagccgaggcagttgttgaaaccaaaatggagaacaaacccacctcctcagaattgcagaagatgcaagagaaacagaaactgatcaaagagccaggctcgggagtgcctgttgttctcattacaacccttctggttattccggtggttgtcctgctggccattgccatatttattcggtggaaaaaatcaagggcctttggagcagattctgaacacaaactcgagacgagttcaggaagagtactgggaagatttagaggaaagggaagtggaggcttaaaccttggtaatttctttgcaagccgtaagggctacagtcgaaaagggtttgaccggcttagcactgagggcagtgaccaagagaaagaggatgatggaagtgaatcagaagaggagtattcagcacctctgcctgcgctcgcaccttcctcctcctgaaaaccaagctttgatttagattgagtaagatttacccagaatgtc

SEQ ID NO: 288002 - DNA, 2925 bp, Artificial Sequence
  derived and/or modified sequence
atggctggtcgggtgcccagcttgttggtgttgttggtgttcccctcttcctgcctcgcatttaggagccctctgtctgtattcaagcgattcaaagaaactactagaccattctctaacgaatgtctcgggactacccggccagtggtgccaattgatagtagcgatttcgctctcgacatacgcatgcctggggtcacccccaaacagagcgatacatatttttgcatgagtatgcggatacccgtcgacgaggaggctttcgtgattgattttaaacccagagcctctatggatacagtgcatcatatgctgctgttcgggtgcaacatgccctcatcaacgggttcatattggttctgtgatgaagggacgtgcaccgacaaggccaatattctctacgcatgggcacgaaatgccccacccacccgtctgcctaagggcgtgggtttccgcgttgggggagagactgggtcaaagtatttcgtgctccaggtccattatggcgacattagcgcgtttagggacaataataaggattgttctggggtatccctccatctcacgcgtctcccacaacccctaatcgccggaatgtaccttatgatgtcagtggacaccgtgattcccgcaggggagaaggttgtgaattcagatatctcatgtcactacaaaaattatccgatgcacgtctttgcctacagagtacatactcaccacctgggaaaagtcgtgtctggataccgtgtcagaaacgggcagtggaccctcattggacgccaaagcccccagctgccacaggcattctaccctgtgggacaccccgttgatgtatcctttggggatctgttggctgccagatgcgtgttcacaggcgagggcaggactgaagccacccacatcgggggtacctcctccgatgaaatgtgtaacctctatatcatgtattatatggaggccaaacatgccgtatctttcatgacttgcacccagaacgtggcaccagatatgttcaggactatcccccctgaagccaatatcccaattcctgttaaatctgacatggttatgatgcatgaacaccacaaagagacggagtacaaggacaagattccactgttgcagcagcctaagagagaggaagaggaagtccttgatcaaggagacttctactccttgctctctaagctgctcggagagcgggaggacgttgtgcatgttcacaagtacaatcctacggaaaaggcagagtccgaaagtgatctggtggcagaaatcgcaaatgtggtccagaagaaagatctaggtagaagcgatgccagagaaggggctgagcatgagcgagggaacgcaatacttgtgagagatcgtattcacaagtttcataggctggtgagcaccttgcggcctccagagagcagggtcttctcacttcagcagccaccgccaggggagggaacctgggaacctgagcacacaggagactttcacatggaggaagctctggactggccgggagtgtatttattaccaggccaggtgagcggcgtcgccctggaccctaagaacaacttagtgatttttcacagaggagatcatgtctgggatggcaactcttttgattcaaaatttgtataccagcaaattgggctcggcccaatcgaagaagacacaattctggttattgaccccaacaatgcagcggtcctccagtctagtggcaaaaatctgttttacctgccgcacggcctcagtattgacaaggatgggaattattgggtgactgacgtcgcattgcaccaggtattcaagcttgaccctaacaacaaggagggccctgtgctgatcctgggtagatccatgcagcctggaagcgatcaaaatcatttttgccagcctaccgacgtggcggtcgaccctggaacaggcgctatatatgtttccgacggatattgcaactcacggattgtgcagttcagcccttccggaaagtttattactcagtggggagaggaaagctctggctcctctccattgccagggcagtttaccgtgcctcactcacttgcgcttgtgcccctgctcggacaattatgcgtggccgacagagaaaacgggaggatccagtgcttcaagacagacactaaggaattcgtgcgggagatcaagcactcctcattcggcaggaacgtgtttgcaatttcttacatcccaggtctactgtttgccgtgaacggaaagccgcactttggtgaccaggagccagttcaaggctttgtcatgaacttctccaacggcgagattatagatatctttaaacctgttcggaagcatttcgatatgcctcacgatatcgtggcctcagaagacggaacagtgtatatcggcgatgcacacaccaacacggtttggaagttcacccttaccgaaaaactcgaacatcgcagtgtaaaaaaagctggaattgaggtccaggagattaaagaggcagaggcggtcgttgaaacaaaaatggagaacaaacccacatcctctgaactccagaagatgcaagaaaagcaaaagttaatcaaagaacccggatcgggcgttcctgtggtactcatcactacacttctggtgattcctgtggtcgtattactcgctatagccattttcatccgttggaagaaaagccgtgcctttggggctgacagtgagcacaaactggagacctcaagcggccgtgttcttggcaggttcagaggtaagggatccgggggtctgaatctgggaaacttttttgctagtcgtaaggggtattcgcgaaagggctttgaccggttgagtaccgaaggaagcgaccaggagaaggaggacgatggcagcgagagcgaagaggagtatagtgcgccattacctgcactcgctcccagcagtagctag

SEQ ID NO: 288003 - DNA, 2925 bp, Artificial Sequence
  derived and/or modified sequence
atggccggcagagtgcccagcctgctggtgctgctggtgttccccagcagctgcctggccttcagaagccccctgagcgtgttcaagagattcaaggagaccaccagacccttcagcaacgagtgcctgggcaccaccagacccgtggtgcccatcgacagcagcgacttcgccctggacatcagaatgcccggcgtgacccccaagcagagcgacacctacttctgcatgagcatgagaatccccgtggacgaggaggccttcgtgatcgacttcaagcccagagccagcatggacaccgtgcaccacatgctgctgttcggctgcaacatgcccagcagcaccggcagctactggttctgcgacgagggcacctgcaccgacaaggccaacatcctgtacgcctgggccagaaacgccccccccaccagactgcccaagggcgtgggcttcagagtgggcggcgagaccggcagcaagtacttcgtgctgcaggtgcactacggcgacatcagcgccttcagagacaacaacaaggactgcagcggcgtgagcctgcacctgaccagactgccccagcccctgatcgccggcatgtacctgatgatgagcgtggacaccgtgatccccgccggcgagaaggtggtgaacagcgacatcagctgccactacaagaactaccccatgcacgtgttcgcctacagagtgcacacccaccacctgggcaaggtggtgagcggctacagagtgagaaacggccagtggaccctgatcggcagacagagcccccagctgccccaggccttctaccccgtgggccaccccgtggacgtgagcttcggcgacctgctggccgccagatgcgtgttcaccggcgagggcagaaccgaggccacccacatcggcggcaccagcagcgacgagatgtgcaacctgtacatcatgtactacatggaggccaagcacgccgtgagcttcatgacctgcacccagaacgtggcccccgacatgttcagaaccatcccccccgaggccaacatccccatccccgtgaagagcgacatggtgatgatgcacgagcaccacaaggagaccgagtacaaggacaagatccccctgctgcagcagcccaagagagaggaggaggaggtgctggaccagggcgacttctacagcctgctgagcaagctgctgggcgagagagaggacgtggtgcacgtgcacaagtacaaccccaccgagaaggccgagagcgagagcgacctggtggccgagatcgccaacgtggtgcagaagaaggacctgggcagaagcgacgccagagagggcgccgagcacgagagaggcaacgccatcctggtgagagacagaatccacaagttccacagactggtgagcaccctgagaccccccgagagcagagtgttcagcctgcagcagcccccccccggcgagggcacctgggagcccgagcacaccggcgacttccacatggaggaggccctggactggcccggcgtgtacctgctgcccggccaggtgagcggcgtggccctggaccccaagaacaacctggtgatcttccacagaggcgaccacgtgtgggacggcaacagcttcgacagcaagttcgtgtaccagcagatcggcctgggccccatcgaggaggacaccatcctggtgatcgaccccaacaacgccgccgtgctgcagagcagcggcaagaacctgttctacctgccccacggcctgagcatcgacaaggacggcaactactgggtgaccgacgtggccctgcaccaggtgttcaagctggaccccaacaacaaggagggccccgtgctgatcctgggcagaagcatgcagcccggcagcgaccagaaccacttctgccagcccaccgacgtggccgtggaccccggcaccggcgccatctacgtgagcgacggctactgcaacagcagaatcgtgcagttcagccccagcggcaagttcatcacccagtggggcgaggagagcagcggcagcagccccctgcccggccagttcaccgtgccccacagcctggccctggtgcccctgctgggccagctgtgcgtggccgacagagagaacggcagaatccagtgcttcaagaccgacaccaaggagttcgtgagagagatcaagcacagcagcttcggcagaaacgtgttcgccatcagctacatccccggcctgctgttcgccgtgaacggcaagccccacttcggcgaccaggagcccgtgcagggcttcgtgatgaacttcagcaacggcgagatcatcgacatcttcaagcccgtgagaaagcacttcgacatgccccacgacatcgtggccagcgaggacggcaccgtgtacatcggcgacgcccacaccaacaccgtgtggaagttcaccctgaccgagaagctggagcacagaagcgtgaagaaggccggcatcgaggtgcaggagatcaaggaggccgaggccgtggtggagaccaagatggagaacaagcccaccagcagcgagctgcagaagatgcaggagaagcagaagctgatcaaggagcccggcagcggcgtgcccgtggtgctgatcaccaccctgctggtgatccccgtggtggtgctgctggccatcgccatcttcatcagatggaagaagagcagagccttcggcgccgacagcgagcacaagctggagaccagcagcggcagagtgctgggcagattcagaggcaagggcagcggcggcctgaacctgggcaacttcttcgccagcagaaagggctacagcagaaagggcttcgacagactgagcaccgagggcagcgaccaggagaaggaggacgacggcagcgagagcgaggaggagtacagcgcccccctgcccgccctggcccccagcagcagctag

SEQ ID NO: 288004 - protein, 973 aa, Artificial Sequence [sequence omitted]

SEQ ID NO: 288005 - DNA, 2922 bp, Artificial Sequence
  derived and/or modified sequence
atggccggcagggtgcccagcttactcgtgcttctggtcttcccttccagctgcttagcatttcggtcccccctctctgtatttaagaggtttaaggagaccactcggccatttagcaatgagtgccttgggaccacgagacccgtcgtacctattgacagctctgacttcgcactggatatcaggatgcctggggtaacccccaaacagagtgatacttacttctgcatgagcatgcgcattcctgtcgacgaagaagcattcgtgattgactttaaaccgcgcgcttccatggatacagtccaccacatgttactgtttgggtgcaatatgccgtcctctaccggctcctactggttttgcgatgagggcacctgcactgacaaagcgaatattctctacgcgtgggcccgaaatgctccaccaacgaggcttcccaaaggcgtgggatttcgcgtgggaggggagacaggaagcaaatatttcgtactgcaggtccactatggtgacatcagcgcctttcgcgataataacaaagactgctcaggtgtttctctgcatctcacccggttgccacagccactcatagccgggatgtatttgatgatgtccgtggatacggtgatccctgccggtgagaaggtggtcaattccgacatatcgtgccattacaagaattaccctatgcacgtattcgcataccgggtgcatactcatcacctcggaaaagtcgtcagcggctaccgggtgcggaacggtcaatggaccctgatcggcagacagtcccctcaacttcctcaggccttctaccccgtgggacaccctgtagacgtttccttcggcgatctcctggccgcccggtgcgttttcaccggggagggaagaactgaggctacccacataggaggaaccagttccgacgaaatgtgcaacctctatatcatgtactatatggaggctaagcatgccgtgtcttttatgacttgtacccagaacgttgctcctgacatgttcagaacgattcctcctgaagcaaacattccgatcccagtgaagtctgatatggtgatgatgcacgagcaccacaaggagactgaatataaagacaagattccactattacaacagccgaaaagggaagaggaggaggtgttagaccagggtgatttttacagtttactcagcaaacttctgggtgaacgcgaagatgtcgttcatgtacacaaatataacccaacagagaaggctgaaagtgaaagtgatctggtggcagaaatagccaatgtggtgcagaaaaaggatttgggccgatccgacgcgagggaaggtgcagagcacgagaggggcaacgcaattttggtgagagatagaattcataagtttcaccgcctcgtgtcaacattacgaccacctgagagcagagttttttctttgcaacagccaccacctggcgagggcacttgggagcccgagcacactggggatttccacatggaggaagccctggactggcctggcgtttatcttctcccaggacaggtctctggggtggctttagaccccaaaaacaacttggtgatttttcatcgcggagatcatgtgtgggacggaaacagtttcgactccaagttcgtctatcaacagatcggcctcggccctatcgaggaggatacaattctcgtgattgaccccaacaacgccgccgttctgcagagctcaggaaagaaccttttttacctgcctcacgggctgtccatcgacaaggacgggaactattgggtgacggatgtggcgctccaccaagtgttcaagttagatcccaataacaaagaaggccctgtgctgatactgggtcggtccatgcagcctggctccgaccagaaccacttctgccagccaaccgatgttgctgtagaccctggtaccggggctatttacgtgtccgacggttactgcaatagccgtattgtgcagttcagtccgtccgggaaattcatcacccaatggggcgaggaaagcagtggttcatcccctctacccggccaatttacggtcccccacagtttagctctcgtgcccctgctcggccagttgtgcgttgctgatcgggagaatggaaggattcaatgtttcaagacagataccaaggaatttgtacgagagatcaagcattcaagtttcgggcgtaacgtgtttgccatctcttatatccctgggctgcttttcgctgttaatgggaaaccccactttggtgaccaggagccggtgcagggattcgttatgaatttttctaacggcgaaatcattgacatttttaagccagttcggaagcattttgacatgccccatgacatcgtcgctagtgaagatgggacagtgtatataggtgatgctcacactaacactgtttggaagttcacgctgactgagaagctcgaacaccgatcagtaaaaaaggccgggatcgaggtgcaggagatcaaagaggcggaagcggttgtggaaaccaaaatggagaataaacccacttcttccgaattgcaaaagatgcaggagaagcaaaaactcataaaagagcctggatccggggtgcccgtggttcttattactaccttactggttatccctgtggtagtcctcttggccatcgcgatttttataagatggaaaaaatctcgagcctttggagacagtgagcataagttagagacatcttcagggcgggtgctggggaggttcaggggcaaaggaagcggcggacttaatctgggcaactttttcgcctcgaggaaggggtactcccggaagggctttgatagactgagcacagagggctcggaccaggagaaagaagacgacggaagcgaaagcgaggaagagtatagtgcgccactaccagcactagcccctagcagtagctag

SEQ ID NO: 288006 - DNA, 2922 bp, Artificial Sequence
  derived and/or modified sequence
atggccggccgggtgcccagcctgctggtgctgctggtgttccccagcagctgcctggccttccgcagccccctgagcgtcttcaagcgcttcaaggagaccacccggcccttcagcaatgaatgtctgggcaccaccaggcctgtggtgcccatcgacagcagtgactttgccctggacatccgcatgcctggggtgacccccaagcagagcgacacctacttctgcatgtccatgagaattcctgtggatgaggaggccttcgtcatcgacttcaagccccgggcctccatggacacagtgcaccacatgctgctgtttggctgcaacatgcccagcagcacaggcagctactggttctgtgatgagggcacctgcacagacaaggccaacatcctgtatgcctgggccagaaatgccccacccacccggctgcccaagggcgtgggcttccgggtgggcggggagaccggcagcaagtactttgtgctgcaggtgcactacggggacatcagcgccttccgggacaacaacaaggactgcagcggcgtgtccctgcacctgacccggctgccccagcccctgattgctggcatgtacctgatgatgtctgtggacaccgtcatcccagctggggagaaggtggtgaacagcgacatcagctgccactacaagaactaccccatgcacgtgtttgcctacagagtgcacacccaccacctgggcaaggtggtgtctggctacagagtgagaaatggccagtggaccctcatcggccggcagagcccccagctgccccaggccttctaccctgtgggccaccctgtggatgtgtcctttggagacctgctggccgcccgctgtgtgttcaccggggagggccgcacagaggccacccacatcggcggcaccagcagtgatgagatgtgcaacctgtacatcatgtactacatggaggccaagcatgctgtgtccttcatgacctgcacccagaatgtggccccagacatgttccgcaccatccccccagaggccaacatccccatccctgtgaagagtgacatggtgatgatgcatgagcaccacaaggagacagagtacaaggacaagatccccctgctgcagcagcccaagcgggaggaggaggaggtgctggaccagggcgacttctacagcctgctgagcaagctgctgggggagcgggaggatgtggtgcacgtgcacaagtacaaccccacagagaaggccgagagcgagagtgacctggtggccgagatcgccaacgtggtgcagaagaaggacctgggccgcagtgatgcccgggagggcgctgagcacgagagaggaaatgccatcctggtgcgggaccgcatccacaagttccaccggctggtgtccaccctgcggcccccagagagcagggtcttcagcctgcagcagcccccacctggagagggcacctgggagcctgagcacactggagacttccacatggaggaggccctggactggccaggagtgtacctgctgcccggccaggtgtctggagtggccctggaccccaagaacaacctggtgatcttccacagaggagaccacgtgtgggatggcaacagctttgacagcaagtttgtgtaccagcagatcggcctgggccccatcgaggaggacaccatcctggtgattgaccccaacaatgctgctgtgctgcagagcagcggcaagaacctcttctacctgccccacggcctgagcattgacaaggatggcaactactgggtgacagatgtggccctgcaccaggtgttcaagctggaccccaacaacaaggagggccctgtgctgatcctgggccgctccatgcagcccggcagtgaccagaaccacttctgccagcccacagatgtggccgtggaccccggcaccggggccatctacgtgtctgatggctactgcaacagccgcatcgtgcagttcagccccagcggcaagttcatcacccagtggggcgaggagagcagcggcagcagccccctgcccggccagttcaccgtgccccacagcctggccctggtgcccctgctgggccagctgtgtgtggccgaccgggagaatggccgcatccagtgcttcaagacagacaccaaggagtttgtgcgggagatcaagcacagcagctttggaagaaatgtgtttgccatctcctacatccctggcctgctgtttgctgtgaatggcaagccccactttggagaccaggagcctgtgcagggctttgtgatgaacttcagcaatggagagatcatcgacatcttcaagcctgtgaggaagcactttgacatgcctcatgacatcgtggcctctgaagatggcaccgtgtacatcggagatgcccacaccaacacagtgtggaagttcaccctgacagagaagctggagcacaggtctgtgaagaaggccggcatcgaggtgcaggagatcaaggaggccgaggccgtggtggagaccaagatggagaacaagcccaccagcagcgagctgcagaagatgcaggagaagcagaagctgatcaaggagcccggcagcggcgtgcctgtggtgctgatcaccaccctgctggtgattcctgtggtggtgctgctggccatcgccatcttcatccgctggaagaagagccgggcctttggagacagcgagcacaagctggagaccagcagcggccgggtgctgggccgcttccggggcaagggcagcggcggcctgaacctgggcaacttctttgccagcaggaagggctacagcaggaagggctttgaccggctgagcacagagggcagtgaccaggagaaggaggatgatggcagcgagagcgaggaggagtacagcgcccccctgcctgccctggcccccagcagcagctag

SEQ ID NO: 288007 - DNA, 2922 bp, Artificial Sequence
  derived and/or modified sequence
atggccggccgggtgcccagcctgctggtgctgctggtgttcccctcctcctgccttgcctttcggtctccgttatccgttttcaaaagatttaaagagactactagacctttcagtaacgagtgtctgggaaccactaggccagtggtgcctattgactcctctgactttgcactggatatcaggatgcctggggtaactcctaagcagagcgatacctacttctgtatgtcaatgcgcataccagttgatgaggaggccttcgttatcgacttcaaacctcgcgcttccatggatactgtacaccatatgctgttgtttgggtgcaatatgccaagcagtaccggttcctactggttctgcgatgagggaacttgtaccgataaggctaacattctctacgcctgggctcggaacgcaccacctaccagactgcctaagggagtgggatttagggttggcggagagaccgggtccaaatattttgtccttcaggttcactacggagatatatctgcttttcgggacaataataaagactgctccggcgtttccttacaccttacgaggcttcctcaacctctgatagccggtatgtacctgatgatgtctgtggacaccgttatccccgccggggagaaggtggtgaactctgacatctcgtgtcattacaagaactacccaatgcacgtcttcgcttatagggtccacacacatcacctgggaaaggtcgttagtgggtaccgggtgcgtaatggccagtggacattgattggccgtcaatcacctcaattgccccaggcattttatcctgtggggcaccctgttgatgtttccttcggcgacttgctcgctgctcggtgtgtcttcacaggggaagggcgtactgaggccacccacatcgggggtacgagctccgacgagatgtgcaatctctacattatgtactatatggaagctaaacacgctgtgtccttcatgacctgcacacaaaacgtggcccccgacatgtttcggactattccccccgaggctaacataccgatacccgtgaaatccgatatggtcatgatgcacgagcaccataaggaaaccgaatataaggacaaaatacctctcctccagcagccaaaacgagaggaggaggaagtgctcgaccaaggcgacttttattcactcctgtccaaacttttaggagaaagagaggatgtggtgcacgtgcataaatataacccgactgagaaggctgagtctgaaagcgacctggtggcggaaatcgccaatgtggtgcagaaaaaagaccttggacgcagcgatgcgcgggagggtgcagagcatgagcgtggtaacgccatactggtacgagatcggatccataaattccacagactagtgtctacgctgcggccacccgaatcccgtgtgtttagccttcagcagccacctccgggcgagggaacttgggagcccgaacataccggagattttcacatggaggaggcactcgattggccaggcgtatatcttctcccaggtcaagtgtccggcgtggccctcgacccaaaaaacaacctcgtcatcttccaccgtggagatcatgtttgggatggtaactcatttgatagtaaatttgtgtaccagcagattggactcgggcccatagaggaagacactatcctagtgatcgatcctaacaacgccgccgtgctgcagagctccggtaaaaacctcttctacctcccacacggactgagcatcgacaaggatggtaactattgggtaactgacgtcgcccttcaccaggtcttcaagctggacccaaataacaaagagggtcctgtgctgattctggggcgaagtatgcagcccggaagcgaccagaaccacttttgccagcccacagacgtcgcggtggaccctggcacaggcgctatctacgtttctgacggttattgtaacagcagaatagtgcagttctcaccctcagggaaatttatcacccagtggggcgaggaatcctcgggatcttcgccactgcctggacaatttaccgtgccgcattctctggcccttgtccccctcttggggcagttatgtgtggccgaccgggagaacggacggatccaatgttttaaaacagacactaaggagtttgttcgtgaaataaagcactcaagtttcggccggaacgtgtttgcgatcagttatatccccggattactcttcgccgtgaacggaaaaccacatttcggagatcaggagcctgtgcaggggtttgtcatgaacttttccaatggcgagatcatagacatttttaagcctgttcgcaaacatttcgacatgcctcatgatatagttgcctctgaagatggtacagtatatatcggcgatgctcatacgaacacggtgtggaagttcacacttacagagaagctggaacaccgctctgtgaagaaggccggaatcgaggtgcaggagattaaagaggccgaggcggttgttgaaactaagatggaaaacaaacctacgagcagcgaactccagaaaatgcaagagaagcaaaaacttataaaggaacctgggtccggtgtcccagttgttctcattaccacactactggtgatccctgtggttgtgctgctagccatcgccatctttattcggtggaaaaaatccagagccttcggagattctgagcataagctcgaaactagtagcggccgcgttttggggcggtttcgtggcaagggatccggagggctgaatctgggcaactttttcgccagccggaaaggctacagcagaaaaggcttcgaccgcttatctaccgagggatctgaccaggagaaggaggacgacggatcagagagcgaagaggaatacagtgcacccctgcctgcgctggcccctagctcaagctag

SEQ ID NO: 288008 - DNA, 5432 bp, Artificial Sequence
  derived and/or modified sequence
gtgaaactactaatgtattaaagaacctcagctgggatttgctgaggacaaatgctgtaacgtgttagtcatccattatctgcttctatttttgcaggttctgaatgatgactgacgcgggtttgggtgatacccctcacagcccctgtcattccggagtcataaggcacccgcgcgtctagccccagcgccagggcacgcgagcggcgctggagggaggaaagcttccgcctgcgggccggacaaaagtcccgcctgcccacggctttttgcccgccgctcgtgaccgagacgcctcgccgcggccagctcgctgctctcgctggcggatggtgtgtggccgccgcaggacgcccgccgtgcccgggccatgaagtagcggctgctggcggcgccgctgcccaaccgccagccccagccccgcgctgcgctgcccggtcctctcccggcggggtcgtatcggcgtggacatggctggccgcgtccctagcctgctagttctccttgtttttccaagcagctgtttggctttccgaagcccactttctgtctttaagaggtttaaagaaactaccagaccattttccaatgaatgtcttggtaccaccagacccgtagttcctattgattcatcagattttgcattggatattcgcatgcctggggttacacctaaacagtccgatacatacttctgcatgtctatgcgaataccagtggatgaggaagccttcgtgattgacttcaagcctcgagccagcatggatactgtccatcacatgttactttttggatgcaatatgccttcatccactggaagttactggttttgtgatgaaggaacctgtacagataaagccaatattctgtatgcctgggcgagaaatgctccccctacccggctccccaaaggtgttggattcagagttggaggagagactggaagtaaatactttgtactacaggtacactatggggatattagtgcttttagagataataacaaggactgttctggtgtgtccttacacctcacacgtctgccacagcctttaattgctggcatgtaccttatgatgtctgttgacactgttatcccagcaggagaaaaagtggtgaattctgacatttcatgccattataaaaattatccaatgcatgtctttgcctatagagttcacactcaccatttaggtaaggtagtaagtggatacagagtaagaaatggacagtggacactgattggacggcagagccctcagctgccacaggctttctaccctgtggggcatccagttgatgtaagttttggtgacctactggctgcaagatgtgtattcactggtgaaggaaggacagaagccacacacattggtggcacgtctagtgatgaaatgtgcaacttatacattatgtattacatggaagccaagcatgcagtttctttcatgacctgtacccagaatgtagctccagatatgttcagaaccataccaccagaggccaacattccaattcccgtgaagtctgatatggttatgatgcatgaacatcataaagaaacagaatataaagataagattcctttactacagcagccaaaacgagaagaagaagaagtgttagaccagggtgatttctattcactactttccaagctgctaggagaaagggaagatgttgttcatgtgcacaaatataatcctacagaaaaggcagaatcagagtcagacctggtagctgagattgcaaatgtagtccaaaaaaaggatcttggtcgatctgatgccagagagggtgcagaacatgagaggggtaatgctattcttgtcagagacagaattcacaaattccacagactagtatctaccttgaggccaccagagagcagagttttctcattacagcagcccccacctggtgaaggcacctgggaaccagaacacacaggagatttccacatggaagaggcactggattggcctggagtatacttgttaccaggccaggtttctggggtggctctagaccctaagaataacctggtgattttccacagaggtgaccatgtctgggatggaaactcgtttgacagcaagtttgtttaccagcaaataggactcggaccaattgaagaagacactattcttgtcatagatccaaataatgctgcagtactccagtccagtggaaaaaatctgttttacttgccacatggcttgagtatagataaagatgggaattattgggtcacagacgtggctctccatcaggtgttcaaactggatccaaacaataaagaaggccctgtattaatcctgggaaggagcatgcaaccaggcagtgaccagaatcacttctgtcaacccactgatgtggctgtggatccaggcactggagccatttatgtatcagatggttactgcaacagcaggattgtgcagttttcaccaagtggaaagttcatcacacagtggggagaagagtcttcagggagcagtcctctgccaggccagttcactgttcctcacagcttggctcttgtgcctcttttgggccaattatgtgtggcagaccgggaaaatggtcggatccagtgttttaaaactgacaccaaagaatttgtgagagagattaagcattcatcatttggaagaaatgtatttgcaatttcatatataccaggcttgctctttgcagtgaatgggaagcctcattttggggaccaagaacctgtacaaggatttgtgatgaacttttccaatggggaaattatagacatcttcaagccagtgcgcaagcactttgatatgcctcatgatattgttgcatctgaagatgggactgtgtacattggagatgctcataccaacaccgtgtggaagttcaccttgactgagaaattggaacatcgatcagttaaaaaggctggcattgaggtccaggaaatcaaagaagccgaggcagttgttgaaaccaaaatggagaacaaacccacctcctcagaattgcagaagatgcaagagaaacagaaactgatcaaagagccaggctcgggagtgcctgttgttctcattacaacccttctggttattccggtggttgtcctgctggccattgccatatttattcggtggaaaaaatcaagggcctttggagattctgaacacaaactcgagacgagttcaggaagagtactgggaagatttagaggaaagggaagtggaggcttaaaccttggtaatttctttgcaagccgtaagggctacagtcgaaaagggtttgaccggcttagcactgagggcagtgaccaagagaaagaggatgatggaagtgaatcagaagaggagtattcagcacctctgcctgcgctcgcaccttcctcctcctgaaaaccaagctttgatttagattgagtaagatttacccagaatgtcagattcctttccctttagcacgtttaaagttctgtgtatttaattgtaaactgtactagtctgtgtgggactgtacacactttatttacttcgttttggttaagttggcttctgtttctagttgaggagtttcctaaaagttcataacagtgccattgtctttatatgaacatagactagagaaaccgtcctctttttccatcataattctaatctaacaatggaagatttgcccatttacacttttgagactttttggtggatgtaaataaccccattctttgcttgaacacagtattttcccaatagcactttcattgccagtgtctttctttggtgcctttcctgttcagcattcttagcctgtggcagtaaagagaaactttgtgctacatgacgacaaagctgctaaatctcctatttttttaaaatcactaacattatattgcaatgaaggaaataaaaaagtctctatttaaattcttttttaaattttcttcagttggtgtgtttttgggatgtcttatttttagatggttacactgttagaacactattttcagaatctgaatgtaatttgtgtaataaagtgttttcagagcattagctgtcagtgtattttccagtttttgcgtatttgcagattttacatacaacttttataataattacacaaacccacaaatattagtgaaacttactcgatgtcttcaactaaaagaaatgtgtgtattgtacaaaatttagaagatactttagccaatataaattaaaaaccagcctgagtttacataaatttgtaaagtcaggctcttctaaaatccaaagagggtttttgcctatatatcaatcagaggataaatactttaataaaaggtaatcacagctaagtggatacctgtgtctcaaattacatatgcaaatgatccatcagtagggatcactaataatagttttccttttaaaaaataatttcagggcaggtacagtggctcaagcctatacttccaggactttgggaggccaagcagaaggattgtgggaggccaagcagaaggattgtttgagcccagaaattcaaggctgcagtgagctatgatcaatccactgtactccagcctaggctacagagtgagatcctttctctaaaataaaatacaatttccatgtatccataggaatatattcatcttttacagtgattgcagattagttttaaaacgtctttttcgtaattcgtcaatgcaagttagtaagaaccagataattttccattttaaaatgataggaatctaaaactctttttcaaaaatgccaacctgtttttccggcatcatagtagttggaataatacagatataattgactaatcataaagtacatgagagtacagaagggaaatttggaaacggtaagtctgctagggcattacaatcctgtcctagcactccacctttattctgccaacctgggttaattaaagatggtagcctggaaagtaatgaatgacattgacttcaggcaatctttccactgattattcttggctgaacttcatttatcgagtcagagaatgcactgcctgagaaatgtcccagaggagtgaatcctaggcctggccacagtagaatcgcctggagaatttaagaaaaaaattgttgggcactcactctttccagtgatctttatttagttggcttacaatggaatacaggtatggttcatgtttttaaatttgtccaggtgtttctattgtgcagtcacagttgaaaaccattgtcttcgagaatagctattctatcttgccagttacaataagtggatagctatattttcacataaattatagtttacagatgtttggagggggaagacaggatctgaggtgttttgatatgactgttagcaccaaaatctgaatgccttaattgttgaatgtgttaaattggataattaaaatgggcataaatgacttattaaaaaagcaaagggaaa

SEQ ID NO: 288009 - DNA, 2922 bp, Artificial Sequence
  derived and/or modified sequence
atggcaggcagggtaccctcgcttctggttttgctagtctttccatcttcctgtctggctttcaggtcaccgctgtcagtttttaagaggtttaaggaaaccactcgccctttctctaatgaatgcctcggtacaacccgtccagtggttcccattgactcgtccgacttcgctctcgacattagaatgcccggagtaactccaaaacagtctgacacatacttctgtatgtccatgagaatcccagttgatgaggaggctttcgtaattgactttaagccgcgagctagcatggataccgtgcatcatatgttgctgttcggttgcaatatgccttcttctacaggctcatactggttctgcgatgaagggacgtgcaccgataaagctaacatactgtacgcatgggcgcgaaatgcccctcccacaagactgccaaagggcgtggggttcagagtgggcggagagacaggtagcaagtactttgtgctgcaggtccattatggagatattagtgccttccgtgataacaataaggactgctctggagtgtccctgcacttaactagactcccgcagcctctcatcgcaggcatgtatctcatgatgtccgtcgacactgtgatccctgccggagagaaggttgtgaattcggacatatcttgccactacaagaactatcctatgcacgtgttcgcctatcgagtccatactcatcatctgggcaaggtggtaagcggatatagagtgaggaatggccagtggaccctcatcggccgacaatcaccacagctaccgcaggccttctatcctgtgggtcatcctgtagatgtctctttcggagatctattggccgcacgttgcgtatttacgggcgagggcagaaccgaagccacacacatcggagggacctccagtgatgagatgtgtaacctgtacattatgtattatatggaggcaaagcatgcagtgagcttcatgacttgcacgcagaatgttgcaccagatatgttcaggactatccccccagaagcaaatatacctattccagtcaagtccgatatggtaatgatgcatgaacaccacaaggagaccgagtataaggataaaatccctcttcttcagcagcctaagcgcgaagaagaggaagttttagaccagggggatttctattccctactgtcaaaactgctcggcgaacgcgaggacgtggttcacgttcataagtacaatcctacagaaaaggctgagagtgagtcggaccttgtggcagaaattgcaaacgtagtgcagaaaaaggatttaggcaggagcgatgcacgggagggcgcagagcacgaacggggaaacgctatactagtgagagacaggattcacaagttccatcgtttggtatcaacattgaggccccctgagagtagagttttcagcttgcagcaaccccctcccggtgaaggtacttgggaacctgaacacaccggggatttccatatggaggaggcactagactggccaggagtctatctgctacccggacaagttagcggggtggcattagatccgaagaataatttagtgatctttcatcgcggtgatcacgtttgggatgggaactccttcgattctaagtttgtgtatcaacaaatcgggctggggccaattgaggaagataccattcttgttatcgatccaaacaacgccgcagtgttacagtcatcaggcaaaaacctgttttaccttcctcacggcctgagcattgacaaggatggcaactactgggtgacggacgttgctcttcatcaggtgttcaaactggatccgaataataaagaaggccctgtgctgatcttgggacgtagtatgcagccaggcagcgatcaaaaccacttttgtcaacccacagatgtcgcagtggatcccggaaccggtgcgatctacgttagcgacggatattgcaattcacgcattgtccagttcagtccgtcagggaaatttataacacagtggggtgaagaatccagcggatcgtcaccgcttccaggtcagttcactgtgcctcattcactggctctcgtgccattgctaggacaactgtgcgtggccgaccgggaaaatgggaggattcagtgcttcaaaacggataccaaagagttcgtgcgggagataaaacattctagctttggcaggaacgtcttcgcaatcagctacatcccgggtctgctgtttgccgtcaacggtaagccccacttcggtgaccaagagcctgtgcagggttttgttatgaacttctctaacggagaaataatagacatttttaagccagtgcgaaaacactttgatatgccacacgatatcgtagcctccgaagatggcacagtttacataggcgacgctcacacaaacaccgtgtggaagttcactctcactgaaaagttagaacatcgctctgtcaagaaagctggcatcgaggtgcaagaaatcaaagaagccgaggcagttgtcgagaccaagatggagaacaagcccacttcatccgaactacagaagatgcaggagaagcagaagcttatcaaagagccaggttccggggttccagtcgtccttataactacgctgctggtgatcccagtggtggtgctcctggcaatcgctatctttattagatggaaaaaaagtagagcattcggcgattccgaacataaactcgaaacatcgagcggacgtgtcctgggacggtttcggggaaagggctcaggaggcctgaacctggggaatttttttgccagcaggaagggatatagtcggaagggatttgataggctgtctactgaaggctcagatcaggagaaagaagacgacggctccgagtcagaggaggaatacagcgcacccttacctgcactcgcgccatcaagttcatag

SEQ ID NO: 288010 - DNA, 2922 bp, Artificial Sequence
  derived and/or modified sequence
atggccggcagagtgcccagcctgctggtgctgctggtgttccccagcagctgcctggccttcagaagccccctgagcgtgttcaagagattcaaggagaccaccagacccttcagcaacgagtgcctgggcaccaccagacccgtggtgcccatcgacagcagcgacttcgccctggacatcagaatgcccggcgtgacccccaagcagagcgacacctacttctgcatgagcatgagaatccccgtggacgaggaggccttcgtgatcgacttcaagcccagagccagcatggacaccgtgcaccacatgctgctgttcggctgcaacatgcccagcagcaccggcagctactggttctgcgacgagggcacctgcaccgacaaggccaacatcctgtacgcctgggccagaaacgccccccccaccagactgcccaagggcgtgggcttcagagtgggcggcgagaccggcagcaagtacttcgtgctgcaggtgcactacggcgacatcagcgccttcagagacaacaacaaggactgcagcggcgtgagcctgcacctgaccagactgccccagcccctgatcgccggcatgtacctgatgatgagcgtggacaccgtgatccccgccggcgagaaggtggtgaacagcgacatcagctgccactacaagaactaccccatgcacgtgttcgcctacagagtgcacacccaccacctgggcaaggtggtgagcggctacagagtgagaaacggccagtggaccctgatcggcagacagagcccccagctgccccaggccttctaccccgtgggccaccccgtggacgtgagcttcggcgacctgctggccgccagatgcgtgttcaccggcgagggcagaaccgaggccacccacatcggcggcaccagcagcgacgagatgtgcaacctgtacatcatgtactacatggaggccaagcacgccgtgagcttcatgacctgcacccagaacgtggcccccgacatgttcagaaccatcccccccgaggccaacatccccatccccgtgaagagcgacatggtgatgatgcacgagcaccacaaggagaccgagtacaaggacaagatccccctgctgcagcagcccaagagagaggaggaggaggtgctggaccagggcgacttctacagcctgctgagcaagctgctgggcgagagagaggacgtggtgcacgtgcacaagtacaaccccaccgagaaggccgagagcgagagcgacctggtggccgagatcgccaacgtggtgcagaagaaggacctgggcagaagcgacgccagagagggcgccgagcacgagagaggcaacgccatcctggtgagagacagaatccacaagttccacagactggtgagcaccctgagaccccccgagagcagagtgttcagcctgcagcagcccccccccggcgagggcacctgggagcccgagcacaccggcgacttccacatggaggaggccctggactggcccggcgtgtacctgctgcccggccaggtgagcggcgtggccctggaccccaagaacaacctggtgatcttccacagaggcgaccacgtgtgggacggcaacagcttcgacagcaagttcgtgtaccagcagatcggcctgggccccatcgaggaggacaccatcctggtgatcgaccccaacaacgccgccgtgctgcagagcagcggcaagaacctgttctacctgccccacggcctgagcatcgacaaggacggcaactactgggtgaccgacgtggccctgcaccaggtgttcaagctggaccccaacaacaaggagggccccgtgctgatcctgggcagaagcatgcagcccggcagcgaccagaaccacttctgccagcccaccgacgtggccgtggaccccggcaccggcgccatctacgtgagcgacggctactgcaacagcagaatcgtgcagttcagccccagcggcaagttcatcacccagtggggcgaggagagcagcggcagcagccccctgcccggccagttcaccgtgccccacagcctggccctggtgcccctgctgggccagctgtgcgtggccgacagagagaacggcagaatccagtgcttcaagaccgacaccaaggagttcgtgagagagatcaagcacagcagcttcggcagaaacgtgttcgccatcagctacatccccggcctgctgttcgccgtgaacggcaagccccacttcggcgaccaggagcccgtgcagggcttcgtgatgaacttcagcaacggcgagatcatcgacatcttcaagcccgtgagaaagcacttcgacatgccccacgacatcgtggccagcgaggacggcaccgtgtacatcggcgacgcccacaccaacaccgtgtggaagttcaccctgaccgagaagctggagcacagaagcgtgaagaaggccggcatcgaggtgcaggagatcaaggaggccgaggccgtggtggagaccaagatggagaacaagcccaccagcagcgagctgcagaagatgcaggagaagcagaagctgatcaaggagcccggcagcggcgtgcccgtggtgctgatcaccaccctgctggtgatccccgtggtggtgctgctggccatcgccatcttcatcagatggaagaagagcagagccttcggcgacagcgagcacaagctggagaccagcagcggcagagtgctgggcagattcagaggcaagggcagcggcggcctgaacctgggcaacttcttcgccagcagaaagggctacagcagaaagggcttcgacagactgagcaccgagggcagcgaccaggagaaggaggacgacggcagcgagagcgaggaggagtacagcgcccccctgcccgccctggcccccagcagcagctag

SEQ ID NO: 288011 - protein, 875 aa, Artificial Sequence
  derived and/or modified sequence
MDTVHHMLLFGCNMPSSTGSYWFCDEGTCTDKANILYAWARNAPPTRLPKGVGFRVGGETGSKYFVLQVHYGDISAFRDNNKDCSGVSLHLTRLPQPLIAGMYLMMSVDTVIPAGEKVVNSDISCHYKNYPMHVFAYRVHTHHLGKVVSGYRVRNGQWTLIGRQSPQLPQAFYPVGHPVDVSFGDLLAARCVFTGEGRTEATHIGGTSSDEMCNLYIMYYMEAKHAVSFMTCTQNVAPDMFRTIPPEANIPIPVKSDMVMMHEHHKETEYKDKIPLLQQPKREEEEVLDQGDFYSLLSKLLGEREDVVHVHKYNPTEKAESESDLVAEIANVVQKKDLGRSDAREGAEHERGNAILVRDRIHKFHRLVSTLRPPESRVFSLQQPPPGEGTWEPEHTGDFHMEEALDWPGVYLLPGQVSGVALDPKNNLVIFHRGDHVWDGNSFDSKFVYQQIGLGPIEEDTILVIDPNNAAVLQSSGKNLFYLPHGLSIDKDGNYWVTDVALHQVFKLDPNNKEGPVLILGRSMQPGSDQNHFCQPTDVAVDPGTGAIYVSDGYCNSRIVQFSPSGKFITQWGEESSGSSPLPGQFTVPHSLALVPLLGQLCVADRENGRIQCFKTDTKEFVREIKHSSFGRNVFAISYIPGLLFAVNGKPHFGDQEPVQGFVMNFSNGEIIDIFKPVRKHFDMPHDIVASEDGTVYIGDAHTNTVWKFTLTEKLEHRSVKKAGIEVQEIKAEAVVETKMENKPTSSELQKMQEKQKLIKEPGSGVPVVLITTLLVIPVVVLLAIAIFIRWKKSRAFGDSEHKLETSSGRVLGRFRGKGSGGLNLGNFFASRKGYSRKGFDRLSTEGSDQEKEDDGSESEEEYSAPLPALAPSSS

SEQ ID NO: 288012 - DNA, 2628 bp, Artificial Sequence
  derived and/or modified sequence
atggacactgtccaccatatgttgctgtttgggtgcaatatgccatcaagtaccgggagctactggttttgtgatgaggggacttgtacggataaggcaaacatactctacgcgtgggctcgaaacgcgcctccaacccggttaccgaaaggcgtgggctttcgcgtgggaggcgagaccggcagtaagtacttcgtcctccaagttcattatggagacatcagtgctttccgggataataacaaagactgtagcggtgtttctttacatctgactagactccctcagccactgattgcagggatgtacctcatgatgagcgtggacaccgtgataccagcaggggagaaggtagttaactccgacatttcctgtcactacaagaactaccctatgcatgtttttgcctatagggtgcacacacatcatttgggaaaagtggtttctggctatagagtacggaacggacagtggacgctgatcggtaggcagagtcctcagcttcctcaggccttttacccagtgggacaccctgtcgacgtcagctttggggatctattggctgctcggtgcgtgtttacaggcgagggtcgaactgaggcaactcacataggggggaccagttcagacgaaatgtgcaacctgtatattatgtactacatggaagcaaaacacgccgtgtctttcatgacctgcactcagaatgtggctccagacatgttcaggactatcccccctgaagcgaacatccctattccagtgaaatcagatatggtgatgatgcacgagcaccacaaggagaccgagtacaaagacaaaattcctttgctccagcagccgaagcgagaggaagaggaggtcctggatcagggcgacttttactccctgctgtcgaaactactgggggagagagaggatgttgtgcatgtgcacaaatacaaccccaccgaaaaagcagaaagtgagtctgatctagtggcggaaatcgctaatgttgttcaaaaaaaggatcttggccgctccgacgctcgtgaaggggctgagcatgaaaggggtaacgctatcctggtcagagatcgcatccataagtttcatcgcctggtgtcaactctacgccccccagaaagtcgcgtgttcagcctacagcaacctcctccaggggaggggacttgggagcccgaacatacaggagattttcacatggaggaggcactagattggcctggagtgtacttattacccggccaggtctccggcgtggctcttgatcccaaaaataatcttgttattttccaccgaggtgaccacgtgtgggatggaaactcctttgattccaaatttgtgtaccagcagatcggccttggccctatagaggaggataccattcttgttatcgaccctaataatgctgccgtgctgcagagctcggggaagaatctgttttatctgccccacgggctcagcattgataaagatggcaactattgggtcaccgatgtggcgttgcaccaggttttcaaacttgatccaaacaataaggagggcccagtcctgatcctagggagaagcatgcagcccggcagcgatcagaaccacttctgccagcccaccgacgttgccgtggacccagggaccggggccatctatgtgtctgacgggtattgcaattctcgcattgttcaattctctcccagtgggaagttcataactcagtggggtgaagaaagcagcggttcttcccctctgcctgggcaattcactgtacctcactccttagccctggtcccccttctgggtcagctgtgcgttgctgatcgggagaatggcaggatccagtgctttaagactgataccaaggaatttgtgagggaaatcaaacactcatcgttcggcagaaacgtgtttgctatctcttacattcctggactgcttttcgcagtgaacggaaaacctcattttggggatcaagaacctgtgcaaggatttgtcatgaatttcagcaatggtgagatcatcgacattttcaagccagtccgcaagcacttcgatatgccgcatgacattgtagcctccgaggatggaaccgtgtacataggcgacgcgcacaccaatactgtatggaagttcactctaacagagaaactggagcacaggagcgtaaaaaaagcagggatagaagttcaggaaataaaggccgaagcagtcgtggagaccaagatggaaaataagccaaccagcagtgagctgcagaagatgcaggaaaagcagaagctgatcaaggagcccggcagtggggtgcccgtggtcctcattaccactctcctcgtgatacccgtcgtagtactgctggccattgccatcttcatccgatggaagaagagtagggctttcggtgactctgaacacaaattggagaccagctcgggccgcgtgttagggaggttcagaggaaagggctccggggggctgaatcttgggaatttttttgcgagccgaaagggatatagtcgtaaagggtttgaccgtctgagcactgaagggtctgaccaggaaaaggaagatgatggaagcgagtccgaagaggaatactccgcccccctccctgctttggccccttcgagcagctag

SEQ ID NO: 288013 - DNA, 2628 bp, Artificial Sequence
  derived and/or modified sequence
atggacacagtgcaccacatgctgctgtttggctgcaacatgcccagcagcacaggcagctactggttctgtgatgagggcacctgcacagacaaggccaacatcctgtatgcctgggccagaaatgccccacccacccggctgcccaagggcgtgggcttccgggtgggcggggagaccggcagcaagtactttgtgctgcaggtgcactatggagacatcagcgccttccgggacaacaacaaggactgcagcggcgtgtccctgcacctgacccggctgccccagcccctgattgctggcatgtacctgatgatgtctgtggacaccgtcatcccagctggggagaaggtggtgaacagcgacatcagctgccactacaagaactaccccatgcacgtgtttgcctacagagtgcacacccaccacctgggcaaggtggtgtctggctacagagtgagaaatggccagtggaccctgattggccggcagagcccccagctgccccaggccttctaccctgtgggccaccctgtggatgtgtcctttggagacctgctggccgcccgctgtgtgttcaccggggagggccgcacagaggccacccacatcggcggcaccagcagtgatgagatgtgcaacctgtacatcatgtactacatggaggccaagcatgctgtgtccttcatgacctgcacccagaatgtggccccagacatgttccgcaccatccccccagaggccaacatccccatccctgtgaagagtgacatggtgatgatgcatgagcaccacaaggagacagagtacaaggacaagatccccctgctgcagcagcccaagcgggaggaggaggaggtgctggaccagggcgacttctacagcctgctgagcaagctgctgggggagagagaagatgtggtgcacgtgcacaagtacaaccccacagagaaggccgagagcgagagtgacctggtggccgagatcgccaacgtggtgcagaagaaggacctgggccgcagtgatgcccgggagggcgctgagcacgagagaggaaatgccatcctggtgcgggaccgcatccacaagttccaccggctggtgtccaccctgcggcccccagagagcagggtcttcagcctgcagcagcccccacctggagagggcacctgggagcctgagcacactggagacttccacatggaggaggccctggactggccaggagtgtacctgctgcccggccaggtgtctggagtggccctggaccccaagaacaacctggtgatcttccacagaggagaccacgtgtgggatggcaacagctttgacagcaagtttgtgtaccagcagatcggcctgggccccatcgaggaggacaccatcctggtgattgaccccaacaatgctgctgtgctgcagagcagcggcaagaacctcttctacctgccccacggcctgagcattgacaaggatggcaactactgggtgacagatgtggccctgcaccaggtgttcaagctggaccccaacaacaaggagggccctgtgctgatcctgggccgctccatgcagcccggcagtgaccagaaccacttctgccagcccacagatgtggccgtggaccccggcactggagccatctacgtgtctgatggctactgcaacagcagaattgtgcagttcagccccagcggcaagttcatcacccagtggggcgaggagagcagcggcagcagccccctgcccggccagttcaccgtgccccacagcctggccctggtgcccctgctgggccagctgtgtgtggccgacagagaaaatggccgcatccagtgcttcaagacagacaccaaggagtttgtgcgggagatcaagcacagcagctttggaagaaatgtgtttgccatctcctacatccctggcctgctgtttgctgtgaatggcaagccccactttggagaccaggagcctgtgcagggctttgtgatgaacttcagcaatggagagatcatcgacatcttcaagcctgtgaggaagcactttgacatgcctcatgacatcgtggcctctgaagatggcaccgtgtacatcggagatgcccacaccaacacagtgtggaagttcaccctgacagagaagctggagcacaggtctgtgaagaaggccggcatcgaggtgcaggagatcaaggccgaggccgtggtggagaccaagatggagaacaagcccaccagcagcgagctgcagaagatgcaggagaagcagaagctgatcaaggagcccggcagcggcgtgcctgtggtgctgatcaccaccctgctggtgattcctgtggtggtgctgctggccatcgccatcttcatccgctggaagaagagccgggcctttggagacagcgagcacaagctggagaccagcagcggccgggtgctgggccgcttccggggcaagggcagcggcggcctgaacctgggcaacttctttgccagcaggaagggctacagcaggaagggctttgaccggctgagcacagagggcagtgaccaggagaaggaggatgatggcagcgagagcgaggaggagtacagcgcccccctgcctgccctggcccccagcagcagctag

SEQ ID NO: 288014 - DNA, 2628 bp, Artificial Sequence
  derived and/or modified sequence
atggacaccgtgcaccacatgctgctgttcggctgcaacatgccctcttccactggctcctactggttctgtgacgaggggacttgtactgacaaagcgaacattctatatgcgtgggctagaaacgcaccacctactagactcccaaaaggcgtaggcttccgggttggcggtgagaccggttccaaatactttgtgctgcaagtgcattacggcgatatctccgcattccgtgacaacaacaaggactgtagcggtgtgtccctgcacctaaccaggttaccacagccgctgattgctggaatgtatctgatgatgagtgtagacacagtgatccctgcgggagagaaagtagtcaactctgatatatcctgccactataagaattaccccatgcacgtttttgcctacagggtgcatacacatcatttaggaaaggtcgtcagcggatacagagtgcgcaacggacagtggacattgatcgggagacagtcaccgcaattgcctcaggcattctatcccgtggggcaccccgtggatgttagcttcggggatcttctcgccgctcgttgtgtgttcacaggcgaggggagaactgaagctacgcacataggagggacatcgtcagacgaaatgtgcaacctttatattatgtactacatggaggccaaacatgctgtgtccttcatgacctgcacccaaaacgtggcccccgacatgttccgtacgatccccccagaagcaaacattccaatccccgtcaaaagcgatatggtgatgatgcatgaacatcacaaagagactgaatacaaggataagattccccttttgcagcagccgaagagggaagaggaagaagtcttagatcaaggcgacttttacagcctgttgagtaagctactgggagagcgcgaagacgttgttcacgttcataagtataaccccactgagaaggccgagagcgagagcgatctcgtggccgagatagcaaacgtagtacaaaagaaagacctgggtcgctctgatgcacgagagggcgccgagcatgagcggggcaacgccattctggtacgagatcgcatccataaatttcaccggttggtgtccacacttagacctcctgagtcacgggtattctctctgcaacagccccctcccggagagggtacctgggaaccagaacacacaggcgattttcatatggaggaggctttggactggccaggggtgtacctcctgcccggtcaggtaagcggtgtcgctctcgatcctaagaacaatctcgtcattttccatagaggtgaccatgtgtgggatggaaactcatttgattcaaaatttgtgtaccagcagatagggctgggccccattgaggaggatacaatcctggtaatcgacccaaataatgccgctgtgctgcagagctccggcaaaaacttgttctatctccctcatggcctgtccatcgacaaagacggaaactactgggtcaccgacgtggccctgcaccaagtgtttaagctggatccaaataataaagaaggcccagtgttgatcctgggacgctcaatgcagcccggcagtgatcagaaccacttctgccagcctacagatgtcgccgtagatcctggcacgggtgcaatctatgtgtcagacggctattgtaattctagaatcgtgcagttttccccaagtggaaagtttattactcagtggggcgaagaatcaagcggcagcagcccgctgcccggccagtttacggtccctcactctctggccctcgttccattacttggccagctgtgcgtggctgacagggaaaatggccggatccagtgttttaagacagacaccaaggagtttgttagggagattaagcactcctcattcgggaggaatgtctttgccatcagctacatcccgggcctattattcgcggtgaacggcaagccacacttcggagaccaggagcctgtgcaagggtttgtaatgaattttagcaatggagaaattattgacatcttcaagcccgtgaggaagcacttcgacatgcctcatgatatcgtcgcttctgaagatggcaccgtctacattggagatgctcatacaaatactgtctggaaatttacgctaactgagaagttagagcatcgatcggttaaaaaggctggtattgaggtgcaggaaattaaggccgaagctgtcgtagagactaaaatggaaaacaaaccaaccagctctgaactccagaagatgcaggaaaagcagaaactcatcaaagagcccggctcaggtgtacccgtcgtcttaataaccacactgctggttatcccggtcgtggtcctgctggctatcgctatctttatcagatggaagaaatccagagcatttggggattccgaacataagctggagactagttcggggagggtcctgggacggtttcggggaaaagggagtggaggcctcaatctgggtaacttctttgcgtcccgcaagggttactcacgcaaaggcttcgatagactgagcactgagggttctgatcaggagaaggaggacgacgggtccgagtccgaggaagaatattccgctcccctgcctgcgctggctccctcatcctcttag

SEQ ID NO: 288015 - DNA, 3446 bp, Artificial Sequence
  derived and/or modified sequence
ggtgtgtggccgccgcaggacgcccgccgtgcccgggccatgaagtagcggctgctggcggcgccgctgcccaaccgccagccccagccccgcgctgcgctgcccggtcctctcccggcggggtcgtatcggcgtggacatggctggccgcgtccctagcctgctagttctccttgtttttccaagcagctgtttggctttccgaagcccactttctgtctttaagaggtttaaagaaactaccagaccattttccaatgaatgtcttggtaccaccagacccgtagttcctattgattcatcagattttgcattggatattcgcatgcctggggttacacctaaacagttgacttcaagcctcgagccagcatggatactgtccatcacatgttactttttggatgcaatatgccttcatccactggaagttactggttttgtgatgaaggaacctgtacagataaagccaatattctgtatgcctgggcgagaaatgctccccctacccggctccccaaaggtgttggattcagagttggaggagagactggaagtaaatactttgtactacaggtacactatggggatattagtgcttttagagataataacaaggactgttctggtgtgtccttacacctcacacgtctgccacagcctttaattgctggcatgtaccttatgatgtctgttgacactgttatcccagcaggagaaaaagtggtgaattctgacatttcatgccattataaaaattatccaatgcatgtctttgcctatagagttcacactcaccatttaggtaaggtagtaagtggatacagagtaagaaatggacagtggacactgattggacggcagagccctcagctgccacaggctttctaccctgtggggcatccagttgatgtaagttttggtgacctactggctgcaagatgtgtattcactggtgaaggaaggacagaagccacacacattggtggcacgtctagtgatgaaatgtgcaacttatacattatgtattacatggaagccaagcatgcagtttctttcatgacctgtacccagaatgtagctccagatatgttcagaaccataccaccagaggccaacattccaattcccgtgaagtctgatatggttatgatgcatgaacatcataaagaaacagaatataaagataagattcctttactacagcagccaaaacgagaagaagaagaagtgttagaccagggtgatttctattcactactttccaagctgctaggagaaagggaagatgttgttcatgtgcacaaatataatcctacagaaaaggcagaatcagagtcagacctggtagctgagattgcaaatgtagtccaaaaaaaggatcttggtcgatctgatgccagagagggtgcagaacatgagaggggtaatgctattcttgtcagagacagaattcacaaattccacagactagtatctaccttgaggccaccagagagcagagttttctcattacagcagcccccacctggtgaaggcacctgggaaccagaacacacaggagatttccacatggaagaggcactggattggcctggagtatacttgttaccaggccaggtttctggggtggctctagaccctaagaataacctggtgattttccacagaggtgaccatgtctgggatggaaactcgtttgacagcaagtttgtttaccagcaaataggactcggaccaattgaagaagacactattcttgtcatagatccaaataatgctgcagtactccagtccagtggaaaaaatctgttttacttgccacatggcttgagtatagataaagatgggaattattgggtcacagacgtggctctccatcaggtgttcaaactggatccaaacaataaagaaggccctgtattaatcctgggaaggagcatgcaaccaggcagtgaccagaatcacttctgtcaacccactgatgtggctgtggatccaggcactggagccatttatgtatcagatggttactgcaacagcaggattgtgcagttttcaccaagtggaaagttcatcacacagtggggagaagagtcttcagggagcagtcctctgccaggccagttcactgttcctcacagcttggctcttgtgcctcttttgggccaattatgtgtggcagaccgggaaaatggtcggatccagtgttttaaaactgacaccaaagaatttgtgagagagattaagcattcatcatttggaagaaatgtatttgcaatttcatatataccaggcttgctctttgcagtgaatgggaagcctcattttggggaccaagaacctgtacaaggatttgtgatgaacttttccaatggggaaattatagacatcttcaagccagtgcgcaagcactttgatatgcctcatgatattgttgcatctgaagatgggactgtgtacattggagatgctcataccaacaccgtgtggaagttcaccttgactgagaaattggaacatcgatcagttaaaaaggctggcattgaggtccaggaaatcaaagccgaggcagttgttgaaaccaaaatggagaacaaacccacctcctcagaattgcagaagatgcaagagaaacagaaactgatcaaagagccaggctcgggagtgcctgttgttctcattacaacccttctggttattccggtggttgtcctgctggccattgccatatttattcggtggaaaaaatcaagggcctttggagattctgaacacaaactcgagacgagttcaggaagagtactgggaagatttagaggaaagggaagtggaggcttaaaccttggtaatttctttgcaagccgtaagggctacagtcgaaaagggtttgaccggcttagcactgagggcagtgaccaagagaaagaggatgatggaagtgaatcagaagaggagtattcagcacctctgcctgcgctcgcaccttcctcctcctgaaaaccaagctttgatttagattgagtaagatttacccagaatgtcagattcctttccctttagcacgtttaaagttctgtgtatttaattgtaaactgtactagtctgtgtgggactgtacacactttatttacttcgttttggttaagttggcttctgtttctagttgaggagtttcctaaaagttcataacagtgccattgtctttatatgaacatagactagagaaaccgtcctctttttccatcataattctaatctaacaatggaagatttgcccatttacacttttgagactttttggtggatgtaaataaccccattctttgcttgaacacagtattttcccaatagcactttcattgccagtgtctttctttggtgcctttcctgttcagcattcttagcctgtggcagtaaagagaaactttgtgctacatgacgac

SEQ ID NO: 288016 - DNA, 2628 bp, Artificial Sequence
  derived and/or modified sequence
atggacacagtccatcacatgctgttgtttggctgcaacatgccaagcagcactggatcatactggttctgtgacgagggcacttgcaccgataaggctaatatattgtacgcgtgggcgaggaacgctcctcccaccagactgcctaagggcgtgggttttagggtgggcggagagaccggctccaagtacttcgtgctacaggtgcattacggagatatatcagcctttagggacaacaacaaggactgtagcggtgtgtctcttcacctgacccggctcccccaacctcttattgccggaatgtaccttatgatgtcagtggacaccgtgattcctgcaggggagaaagtggtgaattcggacataagctgtcattacaaaaattatcctatgcatgtgttcgcttatagggtccacacacaccacctgggaaaagtcgtgtcagggtatagggttcgcaacggacagtggaccctgatcggccgacagagccctcagctaccccaggcgttctaccctgtcggacaccctgtggatgtgtcgttcggagacctgctcgctgcaaggtgtgtgtttaccggagaagggagaactgaagccacacatattggcggaacatcctccgacgaaatgtgcaatctgtatatcatgtactatatggaggccaagcatgccgtgtcgttcatgacctgcactcagaacgtagctcccgatatgttcagaacgattccaccagaggcaaacattccgattcccgtgaaatctgacatggtgatgatgcacgaacaccacaaagagactgagtacaaggacaaaatccctctgttgcagcaaccaaagcgcgaggaagaggaagtgctggaccagggcgacttctacagcctcctgtctaagctgctgggagagagagaggatgtggtgcacgtccacaaatataatcccacggaaaaagctgaaagcgaatccgatctggtggctgaaattgctaatgttgtccagaaaaaggacttaggacgatctgacgcaagagagggggctgagcatgagcggggaaatgctatcttggttcgagaccggatacacaagtttcatcgcctggtgagcaccctgagacccccagaatctagagtgtttagcctgcaacagcccccacccggagagggtacttgggaacccgagcacactggcgacttccatatggaagaagctttagattggccaggcgtctacctgttgcccggacaggtatctggcgtggccttagaccctaaaaataatctggtgattttccacaggggggaccatgtatgggacggcaacagtttcgattctaagtttgtgtatcaacagataggtctggggccaatagaagaggataccatcctggtgatagaccccaacaatgcagcggtgctccagagtagcgggaaaaacttgttttacctgccccatgggctatcaatagacaaggacggaaactactgggtgactgatgtcgcactccaccaagtgttcaagctcgaccccaataataaagagggtccagtgctcattttgggcaggtctatgcagcctgggagcgatcaaaatcacttttgtcagcccacagacgtcgccgttgatcctgggaccggcgctatttacgtttccgatggttattgtaattccaggatcgtacagtttagcccgtccgggaaattcatcacccagtggggcgaggaaagttccggatcctcccccctgccagggcaattcacggtgccccattcgcttgccctagtgcccctcctggggcagctttgtgtagctgacagggagaacggcaggattcagtgctttaagacggacacaaaagagttcgtgagagagattaaacattcttcctttgggagaaatgtctttgctatctcctacattccagggctcttgttcgccgttaacggcaagccccatttcggcgatcaggagcctgtccaaggtttcgtgatgaacttctccaacggagaaatcattgacattttcaaacccgtccgtaaacactttgatatgcctcatgacattgtagcatctgaggacggcacagtctatattggtgatgcgcacacaaacactgtttggaaattcacattgacagagaagctcgagcacagaagcgtaaaaaaggccggaattgaagtacaggaaattaaagccgaagcagtcgtggagacgaagatggagaacaagcccacttcctctgaactgcagaaaatgcaggaaaagcaaaagctgatcaaggaacctggatctggcgtgccagtggtgctgatcaccacactcttggttatcccagtggttgttctcctggccattgccatcttcattcggtggaagaagtctcgagcatttggcgactccgaacacaagctggagacctcctccggcagagtactgggtcggttccgcggaaaaggaagcggcggactgaaccttggtaatttctttgcttcccggaagggctactcccgcaagggcttcgatcgcctgtccacggagggcagcgaccaggagaaagaagatgacggaagtgaaagcgaggaggaatattctgctcccttgcctgccctcgcacctagcagctcgtag

SEQ ID NO: 288017 - DNA, 2628 bp, Artificial Sequence
  derived and/or modified sequence
atggacaccgtgcaccacatgctgctgttcggctgcaacatgcccagcagcaccggcagctactggttctgcgacgagggcacctgcaccgacaaggccaacatcctgtacgcctgggccagaaacgccccccccaccagactgcccaagggcgtgggcttcagagtgggcggcgagaccggcagcaagtacttcgtgctgcaggtgcactacggcgacatcagcgccttcagagacaacaacaaggactgcagcggcgtgagcctgcacctgaccagactgccccagcccctgatcgccggcatgtacctgatgatgagcgtggacaccgtgatccccgccggcgagaaggtggtgaacagcgacatcagctgccactacaagaactaccccatgcacgtgttcgcctacagagtgcacacccaccacctgggcaaggtggtgagcggctacagagtgagaaacggccagtggaccctgatcggcagacagagcccccagctgccccaggccttctaccccgtgggccaccccgtggacgtgagcttcggcgacctgctggccgccagatgcgtgttcaccggcgagggcagaaccgaggccacccacatcggcggcaccagcagcgacgagatgtgcaacctgtacatcatgtactacatggaggccaagcacgccgtgagcttcatgacctgcacccagaacgtggcccccgacatgttcagaaccatcccccccgaggccaacatccccatccccgtgaagagcgacatggtgatgatgcacgagcaccacaaggagaccgagtacaaggacaagatccccctgctgcagcagcccaagagagaggaggaggaggtgctggaccagggcgacttctacagcctgctgagcaagctgctgggcgagagagaggacgtggtgcacgtgcacaagtacaaccccaccgagaaggccgagagcgagagcgacctggtggccgagatcgccaacgtggtgcagaagaaggacctgggcagaagcgacgccagagagggcgccgagcacgagagaggcaacgccatcctggtgagagacagaatccacaagttccacagactggtgagcaccctgagaccccccgagagcagagtgttcagcctgcagcagcccccccccggcgagggcacctgggagcccgagcacaccggcgacttccacatggaggaggccctggactggcccggcgtgtacctgctgcccggccaggtgagcggcgtggccctggaccccaagaacaacctggtgatcttccacagaggcgaccacgtgtgggacggcaacagcttcgacagcaagttcgtgtaccagcagatcggcctgggccccatcgaggaggacaccatcctggtgatcgaccccaacaacgccgccgtgctgcagagcagcggcaagaacctgttctacctgccccacggcctgagcatcgacaaggacggcaactactgggtgaccgacgtggccctgcaccaggtgttcaagctggaccccaacaacaaggagggccccgtgctgatcctgggcagaagcatgcagcccggcagcgaccagaaccacttctgccagcccaccgacgtggccgtggaccccggcaccggcgccatctacgtgagcgacggctactgcaacagcagaatcgtgcagttcagccccagcggcaagttcatcacccagtggggcgaggagagcagcggcagcagccccctgcccggccagttcaccgtgccccacagcctggccctggtgcccctgctgggccagctgtgcgtggccgacagagagaacggcagaatccagtgcttcaagaccgacaccaaggagttcgtgagagagatcaagcacagcagcttcggcagaaacgtgttcgccatcagctacatccccggcctgctgttcgccgtgaacggcaagccccacttcggcgaccaggagcccgtgcagggcttcgtgatgaacttcagcaacggcgagatcatcgacatcttcaagcccgtgagaaagcacttcgacatgccccacgacatcgtggccagcgaggacggcaccgtgtacatcggcgacgcccacaccaacaccgtgtggaagttcaccctgaccgagaagctggagcacagaagcgtgaagaaggccggcatcgaggtgcaggagatcaaggccgaggccgtggtggagaccaagatggagaacaagcccaccagcagcgagctgcagaagatgcaggagaagcagaagctgatcaaggagcccggcagcggcgtgcccgtggtgctgatcaccaccctgctggtgatccccgtggtggtgctgctggccatcgccatcttcatcagatggaagaagagcagagccttcggcgacagcgagcacaagctggagaccagcagcggcagagtgctgggcagattcagaggcaagggcagcggcggcctgaacctgggcaacttcttcgccagcagaaagggctacagcagaaagggcttcgacagactgagcaccgagggcagcgaccaggagaaggaggacgacggcagcgagagcgaggaggagtacagcgcccccctgcccgccctggcccccagcagcagctag

SEQ ID NO: 288018 - protein, 905 aa, Artificial Sequence
  derived and/or modified sequence
MAGRVPSLLVLLVFPSSCLAFRSPLSVFKRFKETTRPFSNECLGTTRPVVPIDSSDFALDIRMPGVTPKQSDTYFCMSMRIPVDEEAFVIDFKPRASMDTVHHMLLFGCNMPSSTGSYWFCDEGTCTDKANILYAWARNAPPTRLPKGVGFRVGGETGSKYFVLQVHYGDISAFRDNNKDCSGVSLHLTRLPQPLIAGMYLMMSVDTVIPAGEKVVNSDISCHYKNYPMHVFAYRVHTHHLGKVVSGYRVRNGQWTLIGRQSPQLPQAFYPVGHPVDVSFGDLLAARCVFTGEGRTEATHIGGTSSDEMCNLYIMYYMEAKHAVSFMTCTQNVAPDMFRTIPPEANIPIPVKSDMVMMHEHHKETEYKDKIPLLQQPKREEEEVLDQGDFYSLLSKLLGEREDVVHVHKYNPTEKAESESDLVAEIANVVQKKDLGRSDAREGAEHERGNAILVRDRIHKFHRLVSTLRPPESRVFSLQQPPPGEGTWEPEHTGDFHMEEALDWPGVYLLPGQVSGVALDPKNNLVIFHRGDHVWDGNSFDSKFVYQQIGLGPIEEDTILVIDPNNAAVLQSSGKNLFYLPHGLSIDKDGNYWVTDVALHQVFKLDPNNKEGPVLILGRSMQPGSDQNHFCQPTDVAVDPGTGAIYVSDGYCNSRIVQFSPSGKFITQWGEESSGSSPLPGQFTVPHSLALVPLLGQLCVADRENGRIQCFKTDTKEFVREIKHSSFGRNVFAISYIPGLLFAVNGKPHFGDQEPVQGFVMNFSNGEIIDIFKPVRKHFDMPHDIVASEDGTVYIGDAHTNTVWKFTLTEKLEHRSVKKAGIEVQEIKDSEHKLETSSGRVLGRFRGKGSGGLNLGNFFASRKGYSRKGFDRLSTEGSDQEKEDDGSESEEEYSAPLPALAPSSS

SEQ ID NO: 288019 - protein, 42 aa, Artificial Sequence
  derived and/or modified sequence
MAGRVPSLLVLLVFPSSCLAFRSPLSVFKRFKETTRPFSNEC

SEQ ID NO: 288020 - DNA, 2718 bp, Artificial Sequence
  derived and/or modified sequence
atggccggtagagttccatctcttctagttttactggttttcccctcctcctgtctggccttccgctcacccctgagcgtttttaaacgatttaaggaaactactcgcccatttagcaatgagtgtttggggaccactagacctgtggtcccgattgattcctctgattttgccctggacattaggatgccgggagtcacacctaagcagtccgatacttacttctgcatgtcaatgcgcattcccgtggacgaggaggccttcgtgattgatttcaaaccacgcgcaagcatggacaccgttcaccacatgctcttgtttggctgcaacatgccctcttccactggcagttactggttctgtgatgagggaacatgtacagacaaagctaacattctgtacgcttgggcgcggaacgcaccccccacgcgactccccaaaggagtcggattccgtgttggcggtgagacagggtctaagtacttcgttctgcaggtccactacggagacatctcagccttccgggataacaacaaagattgttctggcgtgagtctccacctgacaaggttgccccagcctctaattgctgggatgtacctgatgatgtctgtggacacggttatcccagcaggcgaaaaggtggtgaacagtgatattagctgtcattacaagaactatcccatgcatgtgtttgcctacagggtgcacacacatcatctcggcaaggtggttagcggctatcgggtgcggaatgggcagtggactctaatcggaagacaaagtccccagcttcctcaagcattttatcctgttgggcaccccgttgacgtatctttcggcgacctgctggccgctagatgcgtcttcacaggcgaagggcggacagaagccactcacatcggggggaccagttcagatgagatgtgcaacctctacattatgtattatatggaggctaagcatgctgtgtcttttatgacgtgtacacaaaacgtggccccggacatgtttcgtactatcccaccggaggctaacattcctattcccgtgaagtcagacatggttatgatgcacgagcaccacaaagagaccgaatataaagacaagataccactgcttcagcaaccaaaacgcgaggaggaggaagtcctcgaccagggtgacttctattccctgttgtcgaaactcctgggagaacgggaggacgtcgtccatgtgcacaagtataatccgacagaaaaagctgagtccgaatccgatctagtggctgagattgccaacgtggttcaaaagaaggatctgggtcgctccgatgcccgcgagggggcagaacacgagagaggtaacgctatactggtacgagacagaatccacaaatttcaccgtctcgtgtctacactgcgcccccccgagagccgggtgtttagcctacaacagccaccgcctggcgagggcacttgggagccagagcacacgggcgatttccatatggaagaggcactggactggcccggagtgtatcttctccccggtcaggtttcaggggtggccctggatccaaaaaacaacctggtgatttttcatcgaggcgatcatgtttgggatgggaactcttttgatagcaagtttgtctaccagcagattggactgggcccaattgaggaggataccatcttggtcattgatccgaacaacgccgctgtgctccagagctctggtaaaaacctgttctaccttccacatggactttccatcgacaaggacggtaactactgggtaacggatgttgccttacatcaggtgttcaagctcgacccaaataataaagaggggcctgtgctaatactcggacggtcaatgcagccagggtccgatcagaaccatttttgccaaccaactgacgttgcggtggacccgggcaccggggctatttacgtaagcgatggatattgcaacagtcgtatagtgcagttttctccatccgggaagttcatcactcagtggggggaggaatcttcaggctctagcccactgccaggtcagttcacagtgccccattccctggcgttggtccccctgctcggacagctctgtgtggctgatcgtgaaaacggacgaattcagtgtttcaagaccgatacgaaagaatttgtaagagaaattaaacatagttcctttggcaggaacgtgttcgccatctcgtatattccaggcctgctgttcgccgtgaacggcaaaccccacttcggggaccaggaacctgtccagggctttgttatgaatttcagcaatggcgaaataattgatatttttaagcccgtgagaaaacacttcgatatgccacacgatatcgtggctagcgaagatggaaccgtatacatcggcgatgcacacaccaacacagtttggaaattcacgctgacagagaagctggagcaccgaagtgtgaagaaagccggcattgaagtccaggaaatcaaagacagcgagcacaagctcgaaacctctagcggccgagtgttggggcggttccgaggcaagggctctggggggctaaatctgggcaacttcttcgcctcacgcaaagggtacagccgaaagggattcgatcgactgtctacagaaggttcagaccaagagaaggaagatgatggttctgagagcgaagaagaatattcagcccccctgccagcactcgccccatccagctcctag

SEQ ID NO: 288021 - DNA, 2718 bp, Artificial Sequence
  derived and/or modified sequence
atggccggccgggtgcccagcctgctggtgctgctggtgttccccagcagctgcctggccttccgcagccccctgagcgtcttcaagcgcttcaaggagaccacccggcccttcagcaatgaatgtctgggcaccaccaggcctgtggtgcccatcgacagcagtgactttgccctggacatccgcatgcctggggtgacccccaagcagagcgacacctacttctgcatgtccatgagaattcctgtggatgaggaggccttcgtcatcgacttcaagccccgggcctccatggacacagtgcaccacatgctgctgtttggctgcaacatgcccagcagcacaggcagctactggttctgtgatgagggcacctgcacagacaaggccaacatcctgtatgcctgggccagaaatgccccacccacccggctgcccaagggcgtgggcttccgggtgggcggggagaccggcagcaagtactttgtgctgcaggtgcactacggggacatcagcgccttccgggacaacaacaaggactgcagcggcgtgtccctgcacctgacccggctgccccagcccctgattgctggcatgtacctgatgatgtctgtggacaccgtcatcccagctggggagaaggtggtgaacagcgacatcagctgccactacaagaactaccccatgcacgtgtttgcctacagagtgcacacccaccacctgggcaaggtggtgtctggctacagagtgagaaatggccagtggaccctcatcggccggcagagcccccagctgccccaggccttctaccctgtgggccaccctgtggatgtgtcctttggagacctgctggccgcccgctgtgtgttcaccggggagggccgcacagaggccacccacatcggcggcaccagcagtgatgagatgtgcaacctgtacatcatgtactacatggaggccaagcatgctgtgtccttcatgacctgcacccagaatgtggccccagacatgttccgcaccatccccccagaggccaacatccccatccctgtgaagagtgacatggtgatgatgcatgagcaccacaaggagacagagtacaaggacaagatccccctgctgcagcagcccaagcgggaggaggaggaggtgctggaccagggcgacttctacagcctgctgagcaagctgctgggggagcgggaggatgtggtgcacgtgcacaagtacaaccccacagagaaggccgagagcgagagtgacctggtggccgagatcgccaacgtggtgcagaagaaggacctgggccgcagtgatgcccgggagggcgctgagcacgagagaggaaatgccatcctggtgcgggaccgcatccacaagttccaccggctggtgtccaccctgcggcccccagagagcagggtcttcagcctgcagcagcccccacctggagagggcacctgggagcctgagcacactggagacttccacatggaggaggccctggactggccaggagtgtacctgctgcccggccaggtgtctggagtggccctggaccccaagaacaacctggtgatcttccacagaggagaccacgtgtgggatggcaacagctttgacagcaagtttgtgtaccagcagatcggcctgggccccatcgaggaggacaccatcctggtgattgaccccaacaatgctgctgtgctgcagagcagcggcaagaacctcttctacctgccccacggcctgagcattgacaaggatggcaactactgggtgacagatgtggccctgcaccaggtgttcaagctggaccccaacaacaaggagggccctgtgctgatcctgggccgctccatgcagcccggcagtgaccagaaccacttctgccagcccacagatgtggccgtggaccccggcaccggggccatctacgtgtctgatggctactgcaacagccgcatcgtgcagttcagccccagcggcaagttcatcacccagtggggcgaggagagcagcggcagcagccccctgcccggccagttcaccgtgccccacagcctggccctggtgcccctgctgggccagctgtgtgtggccgaccgggagaatggccgcatccagtgcttcaagacagacaccaaggagtttgtgcgggagatcaagcacagcagctttggaagaaatgtgtttgccatctcctacatccctggcctgctgtttgctgtgaatggcaagccccactttggagaccaggagcctgtgcagggctttgtgatgaacttcagcaatggagagatcatcgacatcttcaagcctgtgaggaagcactttgacatgcctcatgacatcgtggcctctgaagatggcaccgtgtacatcggagatgcccacaccaacacagtgtggaagttcaccctgacagagaagctggagcacaggtctgtgaagaaggccggcatcgaggtgcaggagatcaaggacagcgagcacaagctggagaccagcagcggccgggtgctgggccgcttccggggcaagggcagcggcggcctgaacctgggcaacttctttgccagcaggaagggctacagcaggaagggctttgaccggctgagcacagagggcagtgaccaggagaaggaggatgatggcagcgagagcgaggaggagtacagcgcccccctgcctgccctggcccccagcagcagctag

SEQ ID NO: 288022 - DNA, 2718 bp, Artificial Sequence
  derived and/or modified sequence
atggccggccgggtgcccagcctgctggtgctgctggtgttcccctctagttgcctcgcatttaggagccctctgtcagtgttcaagcggtttaaagaaacaacaagaccattctctaacgaatgcctcggaaccactcggcccgtggtgcctatagatagttcagattttgccctggacattcggatgcctggagttaccccaaaacagagtgacacttatttctgcatgtctatgcgcatcccggtagacgaagaggctttcgtgattgacttcaaaccacgggcctctatggatacagtccaccatatgctgctgtttggctgtaacatgcccagcagtacgggtagctattggttttgcgacgaaggtacatgtactgacaaggccaacatcctgtacgcctgggccagaaatgcccctccaacaaggttgcccaaaggagtgggcttccgcgtgggcggtgagaccggaagcaagtacttcgtgctccaggtgcactatggcgacattagcgccttccgcgacaataacaaagactgctctggtgtctccctccatctgacacggctgccacagccactcatcgcagggatgtacctcatgatgtcggtggacactgtgatcccagcgggagagaaggtggtaaattcagacattagctgccattataagaattatcccatgcatgtgtttgcctatagagtgcacacgcaccacctcggaaaggttgtttcagggtatagggtaagaaacggccagtggaccctcattgggaggcagtcgccccagctgccgcaagctttctacccggtgggacacccagtagacgtcagtttcggcgatcttttggctgctcgttgcgttttcaccggagaggggcgcaccgaggcaacccacatcggtggaacctcaagcgatgagatgtgtaacctttacatcatgtactatatggaagctaaacatgctgtgtcattcatgacttgcacgcagaatgttgcccccgatatgtttagaaccattccaccggaagcaaacatcccgattcccgtcaagagcgacatggtgatgatgcacgaacatcacaaagagactgagtacaaggataaaatccccctgctacagcagcccaaaagagaggaggaggaggtgctcgatcaaggcgatttctactccctgctgagcaagttacttggggaacgcgaagacgtggtgcatgtgcacaagtacaaccccaccgaaaaagcagagagtgagagcgacctcgtggctgaaatcgccaatgtggtccagaaaaaggatctggggaggtcagacgcaagagaaggcgctgaacatgaaaggggcaacgctatcctcgtgcgagacaggatccacaaatttcataggttagttagtactttgagaccccctgagagtcgggtattctcgctgcagcagccccctcctggagaaggaacatgggagcctgagcacactggagacttccacatggaggaagcgctcgactggcccggggtctatctgctgcccggccaggtatccggcgtggccctcgatcctaaaaacaatttggttatttttcacaggggggaccacgtgtgggatggcaacagctttgacagcaaatttgtgtaccaacaaatcgggctgggtccaatcgaggaggatactatcctagtgatagaccccaataacgccgctgttctgcagagcagcggcaagaatttattctacctgccgcatggcctaagcatcgacaaagatgggaactactgggtcacagatgttgcccttcatcaagtcttcaaactagatccgaacaacaaagaggggcccgttctgattctgggtcgatccatgcagcccgggagcgatcagaatcacttttgccagccgacagatgtggccgtggatcccgggacaggagctatctacgtgtcagacggatactgtaacagcaggattgtgcagttcagtccttctggaaagtttatcacacagtggggcgaagaatcatccgggtcttcccctctgcccgggcaatttaccgtgcctcactcgctcgctctcgtgcccctgctggggcagctctgcgttgctgacagggagaatggaaggatccagtgctttaagacggatactaaggaatttgttcgtgaaattaaacattcgtctttcggtaggaatgtatttgctatttcctacatacctggactgctgtttgccgtgaacgggaagcctcatttcggcgatcaggaaccggtacaggggtttgtaatgaacttttccaacggcgagatcatcgacatctttaaacccgtgcgaaagcacttcgatatgccgcacgacatcgtggccagcgaggacgggaccgtgtatattggcgatgcccataccaacactgtgtggaaatttaccctgacagagaaactggagcaccggtctgttaaaaaagcaggcatcgaagtccaagaaatcaaagactctgagcataaactcgagacaagcagcgggagggtgttaggacgctttcgcggaaagggaagcggcgggctgaacttgggcaatttttttgcttcacgcaaaggatactctcgcaagggtttcgatcgtctcagtaccgaaggaagcgaccaagaaaaagaagatgatggaagtgaaagcgaagaggagtatagcgccccactcccagctctcgccccttcctctagttag

SEQ ID NO: 288023 - DNA, 2898 bp, Artificial Sequence
  derived and/or modified sequence
ggcgccgctgcccaaccgccagccccagccccgcgctgcgctgcccggtcctctcccggcggggtcgtatcggcgtggacatggctggccgcgtccctagcctgctagttctccttgtttttccaagcagctgtttggctttccgaagcccactttctgtctttaagaggtttaaagaaactaccagaccattttccaatgaatgtcttggtaccaccagacccgtagttcctattgattcatcagattttgcattggatattcgcatgcctggggttacacctaaacagtccgatacatacttctgcatgtctatgcgaataccagtggatgaggaagccttcgtgattgacttcaagcctcgagccagcatggatactgtccatcacatgttactttttggatgcaatatgccttcatccactggaagttactggttttgtgatgaaggaacctgtacagataaagccaatattctgtatgcctgggcgagaaatgctccccctacccggctccccaaaggtgttggattcagagttggaggagagactggaagtaaatactttgtactacaggtacactatggggatattagtgcttttagagataataacaaggactgttctggtgtgtccttacacctcacacgtctgccacagcctttaattgctggcatgtaccttatgatgtctgttgacactgttatcccagcaggagaaaaagtggtgaattctgacatttcatgccattataaaaattatccaatgcatgtctttgcctatagagttcacactcaccatttaggtaaggtagtaagtggatacagagtaagaaatggacagtggacactgattggacggcagagccctcagctgccacaggctttctaccctgtggggcatccagttgatgtaagttttggtgacctactggctgcaagatgtgtattcactggtgaaggaaggacagaagccacacacattggtggcacgtctagtgatgaaatgtgcaacttatacattatgtattacatggaagccaagcatgcagtttctttcatgacctgtacccagaatgtagctccagatatgttcagaaccataccaccagaggccaacattccaattcccgtgaagtctgatatggttatgatgcatgaacatcataaagaaacagaatataaagataagattcctttactacagcagccaaaacgagaagaagaagaagtgttagaccagggtgatttctattcactactttccaagctgctaggagaaagggaagatgttgttcatgtgcacaaatataatcctacagaaaaggcagaatcagagtcagacctggtagctgagattgcaaatgtagtccaaaaaaaggatcttggtcgatctgatgccagagagggtgcagaacatgagaggggtaatgctattcttgtcagagacagaattcacaaattccacagactagtatctaccttgaggccaccagagagcagagttttctcattacagcagcccccacctggtgaaggcacctgggaaccagaacacacaggagatttccacatggaagaggcactggattggcctggagtatacttgttaccaggccaggtttctggggtggctctagaccctaagaataacctggtgattttccacagaggtgaccatgtctgggatggaaactcgtttgacagcaagtttgtttaccagcaaataggactcggaccaattgaagaagacactattcttgtcatagatccaaataatgctgcagtactccagtccagtggaaaaaatctgttttacttgccacatggcttgagtatagataaagatgggaattattgggtcacagacgtggctctccatcaggtgttcaaactggatccaaacaataaagaaggccctgtattaatcctgggaaggagcatgcaaccaggcagtgaccagaatcacttctgtcaacccactgatgtggctgtggatccaggcactggagccatttatgtatcagatggttactgcaacagcaggattgtgcagttttcaccaagtggaaagttcatcacacagtggggagaagagtcttcagggagcagtcctctgccaggccagttcactgttcctcacagcttggctcttgtgcctcttttgggccaattatgtgtggcagaccgggaaaatggtcggatccagtgttttaaaactgacaccaaagaatttgtgagagagattaagcattcatcatttggaagaaatgtatttgcaatttcatatataccaggcttgctctttgcagtgaatgggaagcctcattttggggaccaagaacctgtacaaggatttgtgatgaacttttccaatggggaaattatagacatcttcaagccagtgcgcaagcactttgatatgcctcatgatattgttgcatctgaagatgggactgtgtacattggagatgctcataccaacaccgtgtggaagttcaccttgactgagaaattggaacatcgatcagttaaaaaggctggcattgaggtccaggaaatcaaagattctgaacacaaactcgagacgagttcaggaagagtactgggaagatttagaggaaagggaagtggaggcttaaaccttggtaatttctttgcaagccgtaagggctacagtcgaaaagggtttgaccggcttagcactgagggcagtgaccaagagaaagaggatgatggaagtgaatcagaagaggagtattcagcacctctgcctgcgctcgcaccttcctcctcctgaaaaccaagctttgatttagattgagtaagatttacccagaatgtcagattcctttccctttagcacgtttaaagttctgtgtatttaattgtaaactgta

SEQ ID NO: 288024 - DNA, 2718 bp, Artificial Sequence
  derived and/or modified sequence
atggccggaagagttccatccctgttggtgttgctggttttcccatcctcttgtctggcgtttcgctcaccactgagtgtgtttaaacgttttaaggagacgactagaccattctcgaacgagtgtctgggtactacaaggcctgtggtgccaatcgattcctctgacttcgctctcgacattagaatgcccggtgtgacacctaaacagagtgacacctacttctgcatgtcaatgaggattcccgttgatgaagaggcatttgttatcgattttaagccacgcgctagtatggataccgtccatcatatgctgttgttcggctgcaacatgcccagcagtactggcagctactggttctgtgacgagggtacttgcaccgacaaagcaaatattctgtacgcctgggctaggaacgcgccaccgacacgtcttccgaagggggttgggtttcgggtaggtggcgaaactggatccaagtatttcgttctgcaggtgcattatggtgacatttcagccttcagggacaataataaggactgcagtggcgtctctcttcatctcactcggctacctcagccattgatcgccggaatgtatttgatgatgtctgtggacaccgttatccctgcaggcgaaaaagtggttaattcggacataagttgtcactataagaactatccaatgcacgtgttcgcgtatcgcgttcacacacatcacctgggcaaggtagtgtctggctaccgggttcgcaatggacagtggacgctgataggaaggcagagtccacagctgccacaggccttttatcccgtgggccatccagtggacgtctcatttggcgacctcttggccgctaggtgcgtcttcactggagagggtcgcacagaggcgacccacattggcggaacctctagtgacgaaatgtgtaatttatatatcatgtattatatggaagctaagcacgcagtgtctttcatgacctgcacccaaaacgttgctcctgatatgtttcgaacaatccctccggaggctaacattccaatccccgtcaaaagcgacatggttatgatgcacgagcatcataaagagaccgaatacaaggacaaaattcctctgctgcagcagcctaaacgtgaagaggaggaggtgctcgaccagggagacttctacagcctgcttagcaagctgcttggggagcgggaagacgtggtccacgtccacaaatacaaccccaccgaaaaggcagaaagtgagagtgacctggtcgcggagattgccaacgtggtgcagaagaaggacctgggtcgttccgacgctagggaaggcgctgaacatgaaaggggaaacgccatcctcgtcagagatagaattcataagttccataggttggtgagtacattacgtcctcctgaatcccgcgtgttctctctgcagcagccacctccaggagagggaacctgggagcctgagcacacaggcgattttcacatggaggaggcactggactggcccggtgtctatctccttcctggacaagtctcaggggttgctctggacccaaagaataacctcgttattttccaccgcggagaccatgtctgggacggaaattcctttgatagcaagtttgtatatcaacagatcggcctcggtcccatcgaagaggacacaattcttgtgatcgatcccaacaacgctgcagtgctgcagtcctctggaaaaaacttattctacctcccacatggcctaagcatcgataaagatgggaactattgggtgacagatgtggccctacatcaggtcttcaaactggatcctaataacaaagagggaccagtgctgattctaggcagatcaatgcagcctgggtccgatcagaaccacttctgtcagccaaccgatgtcgccgttgaccccggaaccggagccatatatgtgtccgacggttattgcaacagtcgaatcgtccaattttccccatccggaaagttcattacccaatggggggaggagagctcaggtagcagcccgctccctggccagtttacagtcccacactcccttgcgctagtccccctgctgggacagctgtgtgtagccgatcgggagaacggcagaatccaatgtttcaaaacagacactaaggagttcgtcagagagattaagcattcgtcattcggccgaaacgtttttgccatctcatatatccccggactgctgtttgccgtgaatggtaagccgcacttcggggatcaggaaccagtgcaaggcttcgtaatgaatttctccaatggcgagatcatcgacatcttcaaaccagtccggaagcacttcgatatgcctcatgatattgtggctagcgaagatggaactgtatatattggcgacgcgcatacaaataccgtgtggaaattcacactaacagaaaaactggaacaccgctctgtgaaaaaggcaggaattgaggtgcaagaaattaaggattccgagcataagctcgaaaccagtagcggacgcgtgctgggcagattcaggggcaagggtagtggaggattaaacctgggaaacttcttcgctagtagaaaagggtacagccgcaagggcttcgatcgtctgtcgacagagggcagcgaccaggaaaaggaggacgacggaagtgagagcgaggaggagtactctgccccactgcccgcattggccccatccagctcctag

SEQ ID NO: 288025 - DNA, 2718 bp, Artificial Sequence
  derived and/or modified sequence
atggccggcagagtgcccagcctgctggtgctgctggtgttccccagcagctgcctggccttcagaagccccctgagcgtgttcaagagattcaaggagaccaccagacccttcagcaacgagtgcctgggcaccaccagacccgtggtgcccatcgacagcagcgacttcgccctggacatcagaatgcccggcgtgacccccaagcagagcgacacctacttctgcatgagcatgagaatccccgtggacgaggaggccttcgtgatcgacttcaagcccagagccagcatggacaccgtgcaccacatgctgctgttcggctgcaacatgcccagcagcaccggcagctactggttctgcgacgagggcacctgcaccgacaaggccaacatcctgtacgcctgggccagaaacgccccccccaccagactgcccaagggcgtgggcttcagagtgggcggcgagaccggcagcaagtacttcgtgctgcaggtgcactacggcgacatcagcgccttcagagacaacaacaaggactgcagcggcgtgagcctgcacctgaccagactgccccagcccctgatcgccggcatgtacctgatgatgagcgtggacaccgtgatccccgccggcgagaaggtggtgaacagcgacatcagctgccactacaagaactaccccatgcacgtgttcgcctacagagtgcacacccaccacctgggcaaggtggtgagcggctacagagtgagaaacggccagtggaccctgatcggcagacagagcccccagctgccccaggccttctaccccgtgggccaccccgtggacgtgagcttcggcgacctgctggccgccagatgcgtgttcaccggcgagggcagaaccgaggccacccacatcggcggcaccagcagcgacgagatgtgcaacctgtacatcatgtactacatggaggccaagcacgccgtgagcttcatgacctgcacccagaacgtggcccccgacatgttcagaaccatcccccccgaggccaacatccccatccccgtgaagagcgacatggtgatgatgcacgagcaccacaaggagaccgagtacaaggacaagatccccctgctgcagcagcccaagagagaggaggaggaggtgctggaccagggcgacttctacagcctgctgagcaagctgctgggcgagagagaggacgtggtgcacgtgcacaagtacaaccccaccgagaaggccgagagcgagagcgacctggtggccgagatcgccaacgtggtgcagaagaaggacctgggcagaagcgacgccagagagggcgccgagcacgagagaggcaacgccatcctggtgagagacagaatccacaagttccacagactggtgagcaccctgagaccccccgagagcagagtgttcagcctgcagcagcccccccccggcgagggcacctgggagcccgagcacaccggcgacttccacatggaggaggccctggactggcccggcgtgtacctgctgcccggccaggtgagcggcgtggccctggaccccaagaacaacctggtgatcttccacagaggcgaccacgtgtgggacggcaacagcttcgacagcaagttcgtgtaccagcagatcggcctgggccccatcgaggaggacaccatcctggtgatcgaccccaacaacgccgccgtgctgcagagcagcggcaagaacctgttctacctgccccacggcctgagcatcgacaaggacggcaactactgggtgaccgacgtggccctgcaccaggtgttcaagctggaccccaacaacaaggagggccccgtgctgatcctgggcagaagcatgcagcccggcagcgaccagaaccacttctgccagcccaccgacgtggccgtggaccccggcaccggcgccatctacgtgagcgacggctactgcaacagcagaatcgtgcagttcagccccagcggcaagttcatcacccagtggggcgaggagagcagcggcagcagccccctgcccggccagttcaccgtgccccacagcctggccctggtgcccctgctgggccagctgtgcgtggccgacagagagaacggcagaatccagtgcttcaagaccgacaccaaggagttcgtgagagagatcaagcacagcagcttcggcagaaacgtgttcgccatcagctacatccccggcctgctgttcgccgtgaacggcaagccccacttcggcgaccaggagcccgtgcagggcttcgtgatgaacttcagcaacggcgagatcatcgacatcttcaagcccgtgagaaagcacttcgacatgccccacgacatcgtggccagcgaggacggcaccgtgtacatcggcgacgcccacaccaacaccgtgtggaagttcaccctgaccgagaagctggagcacagaagcgtgaagaaggccggcatcgaggtgcaggagatcaaggacagcgagcacaagctggagaccagcagcggcagagtgctgggcagattcagaggcaagggcagcggcggcctgaacctgggcaacttcttcgccagcagaaagggctacagcagaaagggcttcgacagactgagcaccgagggcagcgaccaggagaaggaggacgacggcagcgagagcgaggaggagtacagcgcccccctgcccgccctggcccccagcagcagctag

SEQ ID NO: 288026 - protein, 866 aa, Artificial Sequence
  derived and/or modified sequence
MAGRVPSLLVLLVFPSSCLAFRSPLSVFKRFKETTRPFSNECLGTTRPVVPIDSSDFALDIRMPGVTPKQSDTYFCMSMRIPVDEEAFVIDFKPRASMDTVHHMLLFGCNMPSSTGSYWFCDEGTCTDKANILYAWARNAPPTRLPKGVGFRVGGETGSKYFVLQVHYGDISAFRDNNKDCSGVSLHLTRLPQPLIAGMYLMMSVDTVIPAGEKVVNSDISCHYKNYPMHVFAYRVHTHHLGKVVSGYRVRNGQWTLIGRQSPQLPQAFYPVGHPVDVSFGDLLAARCVFTGEGRTEATHIGGTSSDEMCNLYIMYYMEAKHAVSFMTCTQNVAPDMFRTIPPEANIPIPVKSDMVMMHEHHKETEYKDKIPLLQQPKREEEEVLDQDFHMEEALDWPGVYLLPGQVSGVALDPKNNLVIFHRGDHVWDGNSFDSKFVYQQIGLGPIEEDTILVIDPNNAAVLQSSGKNLFYLPHGLSIDKDGNYWVTDVALHQVFKLDPNNKEGPVLILGRSMQPGSDQNHFCQPTDVAVDPGTGAIYVSDGYCNSRIVQFSPSGKFITQWGEESSGSSPLPGQFTVPHSLALVPLLGQLCVADRENGRIQCFKTDTKEFVREIKHSSFGRNVFAISYIPGLLFAVNGKPHFGDQEPVQGFVMNFSNGEIIDIFKPVRKHFDMPHDIVASEDGTVYIGDAHTNTVWKFTLTEKLEHRSVKKAGIEVQEIKEAEAVVETKMENKPTSSELQKMQEKQKLIKEPGSGVPVVLITTLLVIPVVVLLAIAIFIRWKKSRAFGDSEHKLETSSGRVLGRFRGKGSGGLNLGNFFASRKGYSRKGFDRLSTEGSDQEKEDDGSESEEEYSAPLPALAPSSS

SEQ ID NO: 288027 - DNA, 2601 bp, Artificial Sequence
  derived and/or modified sequence
atggccgggcgggtaccttccctgcttgtcctgttggtttttccctccagctgtctcgcctttagatctcccctgagcgtgtttaagcggtttaaagagacaacccggccatttagtaacgaatgcctggggacaacccgccctgttgtgccgatcgactcatctgatttcgcactcgatattcgcatgcccggggtcactcctaagcagagcgacacttacttttgcatgtccatgcggatccctgtcgatgaggaggcatttgtgatcgatttcaaacctcgagcctctatggacactgtgcatcacatgctccttttcgggtgtaacatgccatctagcactggaagctactggttctgcgatgaaggtacatgtactgataaggccaatatcctgtacgcttgggcccgtaatgcacccccaacccgattgcctaagggagtcggattcagagtcggcggagagaccggcagtaaatatttcgttcttcaggtccactacggagacattagcgccttcagagataataacaaggactgttcaggcgtttccctgcacctgaccagacttccacaacctcttattgctggaatgtacctgatgatgtccgtcgacaccgtgatcccagctggcgaaaaggtagttaactccgatatttcatgtcattataagaactaccccatgcatgttttcgcctatcgcgttcacacgcatcacctcggtaaggtggtctcgggttatagagttcggaatggtcaatggaccctcatagggagacagagtccacaactgcctcaggctttttatccagtgggacaccctgtggatgtgagctttggagacctgttagccgctaggtgcgtttttacaggggagggcagaacagaggcaactcatattggtggcacatcaagtgatgaaatgtgcaacctgtatataatgtactacatggaagcaaaacacgctgtgtccttcatgacgtgcacgcaaaacgtggccccggatatgtttaggacaattcctcctgaggctaacataccaattcctgtgaagtctgatatggttatgatgcacgagcaccacaaagagacagagtacaaagataaaatacccctcctccagcagcctaaacgcgaggaggaagaggtcttagaccaagatttccatatggaggaggctctggactggccaggcgtgtacctcctgcctggccaagtgagtggcgtagccctggacccaaagaataatcttgtgatctttcaccggggagatcacgtctgggacggaaattccttcgatagcaagttcgtgtatcagcaaatcgggctgggcccaatagaggaggataccatcctcgtcatcgatcctaacaatgcggcagtccttcagagctcagggaaaaacctgttttacctcccacacgggctgtccattgacaaagacggcaattactgggtaacagatgttgctctccaccaggtttttaaactggaccctaacaacaaggaaggacctgttcttatcctcgggcggagcatgcaacctggttctgaccagaaccatttttgccagccaactgatgttgccgtggatcctggtactggagccatttacgtttctgacggatattgcaattcacgtatagtccagttctcccccagtggtaaatttattactcagtggggcgaagagagttcaggaagtagtccccttcccggtcaattcacagtcccccattcactcgccctagttccactcctgggccaactttgcgtcgcagaccgcgaaaacggtcgcattcaatgtttcaaaaccgacacgaaggagtttgtcagggaaattaagcacagttccttcggtaggaacgtctttgctatctcctacatacccgggctgcttttcgctgttaatggcaaaccacacttcggagaccaggagcctgtgcagggttttgtcatgaatttcagcaatggcgagatcatagacatcttcaagcccgtccgtaaacactttgatatgcctcacgacatcgtggcttctgaagacgggacagtgtacatcggcgatgcacataccaacacagtgtggaagtttacactcaccgaaaaacttgaacatcgttcggtcaagaaggctggcatcgaagtccaggagataaaagaggcagaggccgttgtggagacgaaaatggaaaacaagcccacaagctccgagctccagaagatgcaggagaagcagaaactcataaaggagcccggatcgggggtgcccgtagtgttaatcaccaccctgctggtgataccagttgttgtgctgttagccatcgctattttcatccgctggaagaagagccgggcttttggtgattctgagcacaagttagaaactagtagcgggcgcgtcttggggcgcttccgtgggaaggggagcggcggcctgaacctaggtaatttcttcgcgtcgcgtaagggttacagccgaaagggcttcgaccggctttctactgaggggagtgatcaggaaaaagaagacgatggatcagaatccgaagaggagtactctgcccccctgcccgcactggcgccctcaagctcatag

SEQ ID NO: 288028 - DNA, 2601 bp, Artificial Sequence
  derived and/or modified sequence
atggccggccgggtgcccagcctgctggtgctgctggtgttccccagcagctgcctggccttccgcagccccctgagcgtcttcaagcgcttcaaggagaccacccggcccttcagcaatgaatgtctgggcaccaccaggcctgtggtgcccatcgacagcagtgactttgccctggacatccgcatgcctggggtgacccccaagcagagcgacacctacttctgcatgtccatgagaattcctgtggatgaggaggccttcgtcatcgacttcaagccccgggcctccatggacacagtgcaccacatgctgctgtttggctgcaacatgcccagcagcacaggcagctactggttctgtgatgagggcacctgcacagacaaggccaacatcctgtatgcctgggccagaaatgccccacccacccggctgcccaagggcgtgggcttccgggtgggcggggagaccggcagcaagtactttgtgctgcaggtgcactacggggacatcagcgccttccgggacaacaacaaggactgcagcggcgtgtccctgcacctgacccggctgccccagcccctgattgctggcatgtacctgatgatgtctgtggacaccgtcatcccagctggggagaaggtggtgaacagcgacatcagctgccactacaagaactaccccatgcacgtgtttgcctacagagtgcacacccaccacctgggcaaggtggtgtctggctacagagtgagaaatggccagtggaccctcatcggccggcagagcccccagctgccccaggccttctaccctgtgggccaccctgtggatgtgtcctttggagacctgctggccgcccgctgtgtgttcaccggggagggccgcacagaggccacccacatcggcggcaccagcagtgatgagatgtgcaacctgtacatcatgtactacatggaggccaagcatgctgtgtccttcatgacctgcacccagaatgtggccccagacatgttccgcaccatccccccagaggccaacatccccatccctgtgaagagtgacatggtgatgatgcatgagcaccacaaggagacagagtacaaggacaagatccccctgctgcagcagcccaagcgggaggaggaggaggtgctggaccaggacttccacatggaggaggccctggactggccaggagtgtacctgctgcccggccaggtgtctggagtggccctggaccccaagaacaacctggtgatcttccacagaggagaccacgtgtgggatggcaacagctttgacagcaagtttgtgtaccagcagatcggcctgggccccatcgaggaggacaccatcctggtgattgaccccaacaatgctgctgtgctgcagagcagcggcaagaacctcttctacctgccccacggcctgagcattgacaaggatggcaactactgggtgacagatgtggccctgcaccaggtgttcaagctggaccccaacaacaaggagggccctgtgctgatcctgggccgctccatgcagcccggcagtgaccagaaccacttctgccagcccacagatgtggccgtggaccccggcactggagccatctacgtgtctgatggctactgcaacagcagaattgtgcagttcagccccagcggcaagttcatcacccagtggggcgaggagagcagcggcagcagccccctgcccggccagttcaccgtgccccacagcctggccctggtgcccctgctgggccagctgtgtgtggccgacagagaaaatggccgcatccagtgcttcaagacagacaccaaggagtttgtgcgggagatcaagcacagcagctttggaagaaatgtgtttgccatctcctacatccctggcctgctgtttgctgtgaatggcaagccccactttggagaccaggagcctgtgcagggctttgtgatgaacttcagcaatggagagatcatcgacatcttcaagcctgtgaggaagcactttgacatgcctcatgacatcgtggcctctgaagatggcaccgtgtacatcggagatgcccacaccaacacagtgtggaagttcaccctgacagagaagctggagcacaggtctgtgaagaaggccggcatcgaggtgcaggagatcaaggaggccgaggccgtggtggagaccaagatggagaacaagcccaccagcagcgagctgcagaagatgcaggagaagcagaagctgatcaaggagcccggcagcggcgtgcctgtggtgctgatcaccaccctgctggtgattcctgtggtggtgctgctggccatcgccatcttcatccgctggaagaagagccgggccttcggggacagcgagcacaagctggagaccagcagcggccgggtgctgggccgcttccggggcaaaggaagtggcggcctgaacctgggcaacttctttgccagcaggaagggctacagcaggaaaggatttgaccggctgagcacagagggcagtgaccaggagaaggaggatgatggcagcgagagcgaggaggagtacagcgcccccctgcctgccctggcccccagcagcagctag

SEQ ID NO: 288029 - DNA, 2601 bp, Artificial Sequence
  derived and/or modified sequence
atggccggccgggtgcccagcctgctggtgctgctggtgttccccagctcatgtctggccttccgatctcccctgagcgtctttaaacggttcaaggaaaccacgcggccttttagcaatgagtgtctggggacgaccaggccggttgtccctattgatagctccgactttgctctggacatccgtatgccgggcgttactccaaagcagagcgacacatacttctgcatgagtatgcgaatccctgtggacgaagaggcttttgtgatcgactttaagcctagggccagtatggataccgtgcatcacatgctactgtttgggtgtaacatgccatcaagcaccgggtcctattggttttgcgatgaaggcacatgcacagacaaagctaacattttgtacgcatgggcccgcaatgcacctcctactcggttgcccaaaggcgttggcttccgcgttggcggagaaacaggcagcaagtacttcgtgctccaggtacattacggcgacatcagcgcattccgcgataacaacaaagactgtagcggggtgagtctgcacctgacccggctcccacagcccctgattgcaggtatgtacctgatgatgagtgttgacacagtgatcccagcgggcgaaaaggttgttaatagcgacatcagctgccactacaaaaattacccaatgcacgtgtttgcttatcgcgtgcacacccaccacctggggaaagtggtttctgggtaccgggtgagaaacggccaatggacactaatcggtcgccagtcgccacagctcccacaggcattctatccagtgggacatcccgtggatgtgagcttcggggatttactggccgctcgttgtgtgtttactggtgaggggcgtacagaagctactcacatcggagggacgagctccgacgagatgtgcaatctgtacatcatgtattatatggaggccaaacatgcagtgtcctttatgacttgcacccagaacgttgctcctgacatgtttagaactatccctccggaagccaatatccccatacccgtgaagtctgatatggtcatgatgcacgaacatcacaaagaaaccgagtataaagacaaaatccccctgctccagcagccgaagcgtgaagaggaggaggtgctcgaccaggacttccacatggaggaggcgttggattggccaggggtatatctcctgccgggacaagtgagcggcgtagcgttggaccccaagaataatctggtaatctttcatcggggtgatcacgtgtgggacggtaactctttcgattctaagttcgtatatcaacaaatcggactgggcccgatcgaggaagacactatcctggtcatcgatcccaacaatgccgcagttctgcagtctagtggcaagaaccttttctatcttccgcatggcctctctatcgataaggatggcaactactgggtgactgatgtggctctgcaccaggttttcaagctagatcctaacaacaaagaaggccccgtgctgatccttgggagaagtatgcagccggggagcgaccaaaaccacttttgccaaccgactgatgtggctgtggaccccggaactggcgcgatctacgtctccgatggatattgcaattcccgtatcgtccaattttctccatcagggaaatttatcacgcaatggggcgaggaaagtagtggctcttcccctctccccggacaattcactgtgcctcactccctggctctggtccctctgcttgggcagctttgcgtggccgatagagaaaatgggagaatccaatgcttcaagactgacaccaaggaatttgttcgggagattaagcattcatcctttggacgtaatgtgtttgctatatcatacattccaggattactgttcgcagtgaatgggaaacctcactttggagaccaggagccagttcagggttttgtaatgaatttcagcaatggggagatcatagacatattcaaaccagttcgcaaacattttgatatgcctcatgatattgtagcctccgaagacggtaccgtgtacattggcgacgcccacactaataccgtatggaagtttaccttgaccgagaagctcgaacacagaagcgtgaagaaggccggtatcgaggtccaggagatcaaagaggctgaggccgtggttgagacaaagatggagaacaagcctacctcatcggagctccagaagatgcaggagaagcagaaactaatcaaagagcccggttctggcgtgccggtggtcctcattacaacattgctggtgatcccagtcgtagttctgctggcaattgccattttcataagatggaagaagtcaagggcttttggggattctgaacacaaattggagaccagctccggaagggtattgggacgatttagaggcaaggggtcaggcggcctaaacttgggaaatttctttgcctctcggaagggctattcccggaaaggatttgacaggctatccactgaaggatccgaccaggagaaggaggatgacgggagcgagagcgaagaagaatacagcgcccccctccctgccctggccccctcgtcgtcatag

SEQ ID NO: 288030 - DNA, 3622 bp, Artificial Sequence
  derived and/or modified sequence
gttctgaatgatgactgacgcgggtttgggtgatacccctcacagcccctgtcattccggagtcataaggcacccgcgcgtctagccccagcgccagggcacgcgagcggcgctggagggaggaaagcttccgcctgcgggccggacaaaagtcccgcctgcccacggctttttgcccgccgctcgtgaccgagacgcctcgccgcggccagctcgctgctctcgctggcggatggtgtgtggccgccgcaggacgcccgccgtgcccgggccatgaagtagcggctgctggcggcgccgctgcccaaccgccagccccagccccgcgctgcgctgcccggtcctctcccggcggggtcgtatcggcgtggacatggctggccgcgtccctagcctgctagttctccttgtttttccaagcagctgtttggctttccgaagcccactttctgtctttaagaggtttaaagaaactaccagaccattttccaatgaatgtcttggtaccaccagacccgtagttcctattgattcatcagattttgcattggatattcgcatgcctggggttacacctaaacagtccgatacatacttctgcatgtctatgcgaataccagtggatgaggaagccttcgtgattgacttcaagcctcgagccagcatggatactgtccatcacatgttactttttggatgcaatatgccttcatccactggaagttactggttttgtgatgaaggaacctgtacagataaagccaatattctgtatgcctgggcgagaaatgctccccctacccggctccccaaaggtgttggattcagagttggaggagagactggaagtaaatactttgtactacaggtacactatggggatattagtgcttttagagataataacaaggactgttctggtgtgtccttacacctcacacgtctgccacagcctttaattgctggcatgtaccttatgatgtctgttgacactgttatcccagcaggagaaaaagtggtgaattctgacatttcatgccattataaaaattatccaatgcatgtctttgcctatagagttcacactcaccatttaggtaaggtagtaagtggatacagagtaagaaatggacagtggacactgattggacggcagagccctcagctgccacaggctttctaccctgtggggcatccagttgatgtaagttttggtgacctactggctgcaagatgtgtattcactggtgaaggaaggacagaagccacacacattggtggcacgtctagtgatgaaatgtgcaacttatacattatgtattacatggaagccaagcatgcagtttctttcatgacctgtacccagaatgtagctccagatatgttcagaaccataccaccagaggccaacattccaattcccgtgaagtctgatatggttatgatgcatgaacatcataaagaaacagaatataaagataagattcctttactacagcagccaaaacgagaagaagaagaagtgttagaccaggatttccacatggaagaggcactggattggcctggagtatacttgttaccaggccaggtttctggggtggctctagaccctaagaataacctggtgattttccacagaggtgaccatgtctgggatggaaactcgtttgacagcaagtttgtttaccagcaaataggactcggaccaattgaagaagacactattcttgtcatagatccaaataatgctgcagtactccagtccagtggaaaaaatctgttttacttgccacatggcttgagtatagataaagatgggaattattgggtcacagacgtggctctccatcaggtgttcaaactggatccaaacaataaagaaggccctgtattaatcctgggaaggagcatgcaaccaggcagtgaccagaatcacttctgtcaacccactgatgtggctgtggatccaggcactggagccatttatgtatcagatggttactgcaacagcaggattgtgcagttttcaccaagtggaaagttcatcacacagtggggagaagagtcttcagggagcagtcctctgccaggccagttcactgttcctcacagcttggctcttgtgcctcttttgggccaattatgtgtggcagaccgggaaaatggtcggatccagtgttttaaaactgacaccaaagaatttgtgagagagattaagcattcatcatttggaagaaatgtatttgcaatttcatatataccaggcttgctctttgcagtgaatgggaagcctcattttggggaccaagaacctgtacaaggatttgtgatgaacttttccaatggggaaattatagacatcttcaagccagtgcgcaagcactttgatatgcctcatgatattgttgcatctgaagatgggactgtgtacattggagatgctcataccaacaccgtgtggaagttcaccttgactgagaaattggaacatcgatcagttaaaaaggctggcattgaggtccaggaaatcaaagaagccgaggcagttgttgaaaccaaaatggagaacaaacccacctcctcagaattgcagaagatgcaagagaaacagaaactgatcaaagagccaggctcgggagtgcctgttgttctcattacaacccttctggttattccggtggttgtcctgctggccattgccatatttattcggtggaaaaaatcaagggcctttggagattctgaacacaaactcgagacgagttcaggaagagtactgggaagatttagaggaaagggaagtggaggcttaaaccttggtaatttctttgcaagccgtaagggctacagtcgaaaagggtttgaccggcttagcactgagggcagtgaccaagagaaagaggatgatggaagtgaatcagaagaggagtattcagcacctctgcctgcgctcgcaccttcctcctcctgaaaaccaagctttgatttagattgagtaagatttacccagaatgtcagattcctttccctttagcacgtttaaagttctgtgtatttaattgtaaactgtactagtctgtgtgggactgtacacactttatttacttcgttttggttaagttggcttctgtttctagttgaggagtttcctaaaagttcataacagtgccattgtctttatatgaacatagactagagaaaccgtcctctttttccatcataattctaatctaacaatggaagatttgcccatttacacttttgagactttttggtggatgtaaataaccccattctttgcttgaacacagtattttcccaatagcactttcattgccagtgtctttctttggtgcctttcctgttcagcattcttagcctgtggcagtaaagagaaactttgtgctacatgacgacaaagctgctaaatctcctatttttttaaaatcactaacattatattgcaatgaaggaaataaaaaagtctctatttaaattcttttttaaattttcttcagttggtgtgtttttgggatgtcttatttttagatggttacactgttagaacactattttcagaatctgaatgtaatttgtgtaataaagtgttttcagagca

SEQ ID NO: 288031 - DNA, 2601 bp, Artificial Sequence
  derived and/or modified sequence
atggccggtcgagtcccttccctgcttgtgttgctggtcttcccatcatcatgcctggcattccggtctcccttaagcgtgttcaagcggttcaaggagactaccaggccgtttagcaatgaatgtctggggacaacaaggcccgtggtccctatcgacagttcggacttcgccctggacatccggatgcctggggtcactccgaagcagagtgacacctacttctgtatgtctatgcgcatccctgtagacgaggaggctttcgtgatcgacttcaaacccagagcttcgatggacaccgtccatcacatgctgctgttcgggtgtaatatgccctcatcaacaggcagctattggttctgtgacgaaggcacgtgcactgacaaggctaatatcctttacgcttgggctcgcaacgcaccacctaccaggctccccaagggggttggcttcagagtgggaggtgagactgggagtaagtatttcgttttgcaggtgcactacggtgatattagcgccttccgagataacaataaggactgctccggggtctctctgcaccttactcggctcccacaacccttgattgcagggatgtatctcatgatgtcggtcgataccgtgatccccgcaggagagaaggtagtcaactcggacatatcgtgccattataaaaactaccctatgcacgttttcgcttaccgtgtccacacacaccatctaggcaaggtggtatccggttaccgggttcggaacggccagtggaccttgattggacggcagtctccgcagcttcctcaggctttttaccccgtcggccatcccgttgacgtttcttttggggatctgcttgctgcacgttgtgtgtttaccggggaggggaggactgaagctacacacataggaggcacatcatccgatgagatgtgtaacctgtacattatgtactacatggaggctaaacatgccgtgagttttatgacttgtacccaaaatgtcgccccagacatgttccgaacgataccaccggaagcaaatataccaatcccagtcaagtctgatatggtcatgatgcatgagcaccacaaggaaacagaatacaaagacaaaattcccctgttacagcagcctaagagggaggaggaagaagttttggatcaagattttcacatggaggaggccctggactggcctggagtctatctcctcccagggcaggtgtccggagtggcactcgaccccaaaaacaatctggtcatctttcacaggggcgatcatgtgtgggatggcaatagttttgatagtaagtttgtatatcagcagatcggtttaggacctatcgaggaagatacaatcctggtcattgaccccaataatgccgctgtattacagtcttccggcaagaacctcttttacctgccccacggactgagcatcgacaaagacggcaattattgggtgaccgacgtcgccctgcaccaagtgttcaaactggaccccaacaacaaggagggacccgtgctgatcctgggcaggagcatgcagccaggcagcgatcaaaatcatttttgtcaacctactgatgtagccgtcgaccctggcactggggcaatttacgtgtctgacggttattgtaactctagaattgtgcaattttcccctagtggtaaattcataacccagtggggtgaagagtcaagcggtagctctccattgccgggacagttcacagtgccccactcactagcactggtgcctctcctggggcagttgtgcgttgcagaccgtgaaaatggccgtattcagtgctttaaaacggataccaaggagtttgtcagggagatcaagcactcgtcttttggccgtaacgttttcgcgatttcctatatcccgggtcttttgttcgctgtcaatgggaagccacacttcggggaccaagaaccagtgcagggctttgtcatgaatttctccaatggagaaataatcgacatctttaaacccgttcggaaacactttgatatgccgcacgacatagtggctagtgaggatgggacggtttacatcggcgatgcgcacacgaataccgtgtggaagtttaccctcacagagaagctcgaacacagatctgtcaaaaaggcaggaatcgaggtccaagaaatcaaggaagcagaagctgtagtcgagaccaagatggagaacaagccgacatcctctgaactgcagaagatgcaggagaaacagaagctaattaaggagcccggtagcggagtccctgtagttctgataaccaccctattagttattcctgtcgtcgttctgctggccatcgcgatctttattcggtggaaaaagtcaagggctttcggcgactctgaacacaagctagaaaccagcagtggcagagttcttggaagattccggggaaaaggaagcggaggtctgaatctgggcaatttcttcgcttcaaggaaggggtactcgaggaagggctttgatcggcttagtacggagggaagcgaccaagagaaggaagatgatggatcagagagcgaggaggagtactcagcccctctccccgcactggctccatcatcaagctag

SEQ ID NO: 288032 - DNA, 2601 bp, Artificial Sequence
  derived and/or modified sequence
atggccggcagagtgcccagcctgctggtgctgctggtgttccccagcagctgcctggccttcagaagccccctgagcgtgttcaagagattcaaggagaccaccagacccttcagcaacgagtgcctgggcaccaccagacccgtggtgcccatcgacagcagcgacttcgccctggacatcagaatgcccggcgtgacccccaagcagagcgacacctacttctgcatgagcatgagaatccccgtggacgaggaggccttcgtgatcgacttcaagcccagagccagcatggacaccgtgcaccacatgctgctgttcggctgcaacatgcccagcagcaccggcagctactggttctgcgacgagggcacctgcaccgacaaggccaacatcctgtacgcctgggccagaaacgccccccccaccagactgcccaagggcgtgggcttcagagtgggcggcgagaccggcagcaagtacttcgtgctgcaggtgcactacggcgacatcagcgccttcagagacaacaacaaggactgcagcggcgtgagcctgcacctgaccagactgccccagcccctgatcgccggcatgtacctgatgatgagcgtggacaccgtgatccccgccggcgagaaggtggtgaacagcgacatcagctgccactacaagaactaccccatgcacgtgttcgcctacagagtgcacacccaccacctgggcaaggtggtgagcggctacagagtgagaaacggccagtggaccctgatcggcagacagagcccccagctgccccaggccttctaccccgtgggccaccccgtggacgtgagcttcggcgacctgctggccgccagatgcgtgttcaccggcgagggcagaaccgaggccacccacatcggcggcaccagcagcgacgagatgtgcaacctgtacatcatgtactacatggaggccaagcacgccgtgagcttcatgacctgcacccagaacgtggcccccgacatgttcagaaccatcccccccgaggccaacatccccatccccgtgaagagcgacatggtgatgatgcacgagcaccacaaggagaccgagtacaaggacaagatccccctgctgcagcagcccaagagagaggaggaggaggtgctggaccaggacttccacatggaggaggccctggactggcccggcgtgtacctgctgcccggccaggtgagcggcgtggccctggaccccaagaacaacctggtgatcttccacagaggcgaccacgtgtgggacggcaacagcttcgacagcaagttcgtgtaccagcagatcggcctgggccccatcgaggaggacaccatcctggtgatcgaccccaacaacgccgccgtgctgcagagcagcggcaagaacctgttctacctgccccacggcctgagcatcgacaaggacggcaactactgggtgaccgacgtggccctgcaccaggtgttcaagctggaccccaacaacaaggagggccccgtgctgatcctgggcagaagcatgcagcccggcagcgaccagaaccacttctgccagcccaccgacgtggccgtggaccccggcaccggcgccatctacgtgagcgacggctactgcaacagcagaatcgtgcagttcagccccagcggcaagttcatcacccagtggggcgaggagagcagcggcagcagccccctgcccggccagttcaccgtgccccacagcctggccctggtgcccctgctgggccagctgtgcgtggccgacagagagaacggcagaatccagtgcttcaagaccgacaccaaggagttcgtgagagagatcaagcacagcagcttcggcagaaacgtgttcgccatcagctacatccccggcctgctgttcgccgtgaacggcaagccccacttcggcgaccaggagcccgtgcagggcttcgtgatgaacttcagcaacggcgagatcatcgacatcttcaagcccgtgagaaagcacttcgacatgccccacgacatcgtggccagcgaggacggcaccgtgtacatcggcgacgcccacaccaacaccgtgtggaagttcaccctgaccgagaagctggagcacagaagcgtgaagaaggccggcatcgaggtgcaggagatcaaggaggccgaggccgtggtggagaccaagatggagaacaagcccaccagcagcgagctgcagaagatgcaggagaagcagaagctgatcaaggagcccggcagcggcgtgcccgtggtgctgatcaccaccctgctggtgatccccgtggtggtgctgctggccatcgccatcttcatcagatggaagaagagcagagccttcggcgacagcgagcacaagctggagaccagcagcggcagagtgctgggcagattcagaggcaagggcagcggcggcctgaacctgggcaacttcttcgccagcagaaagggctacagcagaaagggcttcgacagactgagcaccgagggcagcgaccaggagaaggaggacgacggcagcgagagcgaggaggagtacagcgcccccctgcccgccctggcccccagcagcagctag

SEQ ID NO: 288033 - DNA, 1773 bp, Artificial Sequence
  derived and/or modified sequence
atggaaatgtacgagactctcggcaaagtcggcgaggggagctatggaacagtgatgaaatgcaaacataaaaacaccggccagattgtcgccatcaagattttttacgaaagaccggaacagagcgtgaataagattgctatgagagaaatcaagttcctgaaacagttccatcacgaaaacttggtgaatttgatcgaggttttccggcaaaaaaagaagatccacctggttttcgagttcatagatcatacagtcctagacgaattgcagcattactgtcacggactcgaatccaaaaggctgcgcaagtacttgttccaaatcctccgtgccattgactacttacacagcaacaatattattcatagggacatcaagcctgagaacatcctagtctctcaatcgggtatcaccaagctgtgtgattttggcttcgcacgaaccttagccgcccccggcgacatctataccgactacgttgcaacccgttggtatcgtgctcctgagctcgtgttgaaggacaccagttatggcaagccggtggacatttgggctctgggttgcatgattattgagatggctaccgggaatccgtatctgccatcttcaagcgatctggacctgttgcacaagattgttttgaaggtagggaatttaagtccccacctgcagaacattttttcgaagtctccaatcttcgcaggggtcgttttaccacaggtgcagcatccgaaaaacgcaagaaagaaatacccgaagctaaatggcttgctggcggacatcgtgcatgcatgtttgcagattgatcctgctgatcgcataagctcgagcgacctactccaccatgagtatttcaccagagacgggtttatcgagaaatttatgcctgagcttaaggcaaagctcctccaagaagctaaagtgaactctctgatcaagcccaaggagagcagtaaggagaacgaattgaggaaggacgagagaaaaactgtgtatacaaacaccctcctatcctccagcgtgctgggcaaggagatcgagaaggagaaaaagccaaaggagattaaagtccgcgtgatcaaggtcaaaggcggccggggggacatttcagagccaaagaaaaaggagtacgaaggcggcctgggtcagcaagatgcaaacgagaatgtgcatccaatgagtcccgatacgaagctggttaccattgagccaccaaatcctatcaatccctcgaccaactgcaatggccttaaagaaaatccacactgcggaggatctgtaacaatgcccccaattaatctgactaactccaatttgatggctgccaacctgtcgtctaatctgttccatccctcagtgcggctgaccgagagagcaaagaagcgacgcactagttctcaaagcataggtcaggtcatgcctaattctcgccaggaagatcctggacctattcagtctcagatggagaaaggtatatttaacgagcgtaccggccattctgaccagatggctaacgagaacaagagaaagctcaactttagccggagtgataggaaggagtttcacttccctgagttgcccgtgaccatccaatccaaagataccaaaggtatggaggttaagcagattaaaatgctcaaaagggaaagcaagaagactgagtcgtccaagataccgacactactcaatgtggatcagaatcaggagaaacaggagaacaccgggaatgcgcagaccgagagaaaaaagaacctgcccgatgttgagtag

SEQ ID NO: 288034 - DNA, 1773 bp, Artificial Sequence
  derived and/or modified sequence
atggagatgtatgagaccctgggcaaggtgggggagggcagctatggaacagtgatgaagtgcaagcacaagaacacaggccagatcgtggccatcaagatcttctatgaaagacctgagcagagcgtgaacaagatcgccatgagggagatcaagttcctgaagcagttccaccacgagaacctggtgaacctgattgaggtgttccggcagaagaagaagatccacctggtgtttgagttcatcgaccacacagtgctggatgagctgcagcactactgccacggcctggagagcaagaggctgaggaagtacctgttccagatcctgcgggccatcgactacctgcacagcaacaacatcatccaccgggacatcaagccagagaacatcctggtgtcccagagcggcatcaccaagctgtgtgactttggatttgcccggaccctggccgcccctggggacatctacacagattatgtggccacccgctggtaccgggcccctgagctggtgctgaaggacaccagctatggcaagcctgtggacatctgggccctgggctgcatgatcatcgagatggccaccggcaacccctacctgcccagcagcagtgacctggacctgctgcacaagatcgtgctgaaggtgggcaacctgagcccccacctgcagaacatcttcagcaagagccccatctttgctggggtggtgctgccccaggtgcagcaccccaagaatgccaggaagaagtaccccaagctgaatggcctgctggccgacatcgtgcacgcctgcctgcagattgatcctgctgaccgcatcagcagcagtgacctgctgcaccacgagtacttcaccagagatggcttcatcgagaagttcatgcctgagctgaaggccaagctgctgcaggaggccaaggtgaacagcctcatcaagcccaaggagagcagcaaagaaaatgagctgaggaaggatgagaggaagacagtgtacaccaacaccctgctgagcagctctgtgctgggcaaggagattgagaaggagaagaagcccaaggagatcaaggtgcgggtcatcaaggtgaagggcggccgcggggacatcagcgagcccaagaagaaggagtatgagggcggcctgggccagcaggatgccaatgaaaatgtgcaccccatgagcccagacaccaagctggtgaccatcgagccccccaaccccatcaaccccagcaccaactgcaatggcctgaaggagaacccccactgcggcggctctgtgaccatgccacccatcaacctgaccaacagcaacctgatggccgccaacctgagcagcaacctcttccaccccagcgtgcggctgacagagcgggccaagaagaggaggaccagcagccagagcatcggccaggtgatgcccaacagccggcaggaggaccccggccccatccagagccagatggagaagggcatcttcaatgaaagaacaggccacagcgaccagatggccaatgaaaacaagaggaagctgaacttcagcagaagtgacaggaaggagttccacttccctgagctgcctgtgaccatccagagcaaggacaccaagggcatggaggtgaagcagatcaagatgctgaagcgggagagcaagaagacagagagcagcaagatccccaccctgctgaatgtggaccagaaccaggagaagcaggagaacacaggaaatgcccagacagagaggaagaagaacctgcctgatgtggagtag

SEQ ID NO: 288035 - DNA, 1773 bp, Artificial Sequence
  derived and/or modified sequence
atggagatgtacgagaccctgggcaaggtgggcgagggcagctacggaacagtgatgaagtgcaaacacaaaaacaccggacagatcgtggccattaaaatcttctatgagcgccccgagcagtcagttaacaagattgccatgagagagatcaagttcttaaaacagttccaccacgagaatcttgtaaatctcatagaggtgttccgccagaagaaaaaaatccatcttgtcttcgaatttatagaccataccgtccttgacgaactgcagcactactgccatggtctcgaaagtaagcgactgcgcaaatacctgtttcaaattctgagggccattgactacctccacagtaataatattattcatcgcgacatcaagccagagaatatcctggttagccagagcggaatcacaaagttgtgcgatttcggttttgctcgtaccttggccgctcctggggatatttatacagactacgttgcgactaggtggtaccgggccccagagctcgttctgaaggacacttcctacggcaagcctgtcgacatctgggctttgggttgcatgatcatcgagatggccacaggaaacccatacctgcccagctcctcggacttggacttactccataaaattgttctgaaagttggcaatctgagcccacatctgcagaacatcttttctaagtcaccgatttttgctggggtggtcttaccccaggtccagcatccaaagaacgcacgcaagaagtacccaaaattgaacggcctacttgcagatatagttcatgcctgtctacagattgaccctgccgaccgcatcagtagctcagacttactccaccacgagtacttcacacgagatggctttatagaaaagtttatgccggaactcaaggcaaaactgctgcaggaggccaaagtgaattccctcatcaagcccaaggaaagcagcaaagagaatgagttacggaaggacgaaagaaagaccgtgtacaccaatacgttgctgagctctagcgtgctcggtaaagagatagagaaggagaagaaacccaaagagattaaagtgagggtgatcaaggtaaaaggcggacgaggggacatttccgaaccgaaaaagaaggaatacgagggaggactgggacagcaggacgccaacgagaatgtgcatcccatgagcccagacaccaagttggtgacaattgagccacctaatccaattaaccccagtactaactgcaatggtctcaaggaaaatccccactgtgggggctcagtgaccatgcctcccataaatctgactaacagcaacttgatggccgcgaaccttagcagcaacctttttcatcccagtgtccgcctgacggagcgcgctaaaaaaagaaggacaagcagccagagcattggtcaagtcatgcctaatagcagacaggaagaccctggacccatacagtctcagatggagaagggcatttttaacgaaagaacaggacactcagaccagatggcaaatgagaataagcgtaaactcaatttttcgcgcagcgatcgaaaagaattccatttcccggaactccccgtgactattcagagtaaggatactaagggaatggaagtcaaacagatcaagatgctcaaaagagaaagcaaaaagacagaaagctccaaaatccccacgcttttgaacgtggatcaaaatcaagaaaaacaagaaaacactggtaacgcccagaccgaacgaaagaagaaccttccagacgtggaatag

SEQ ID NO: 288036 - DNA, 1773 bp, Artificial Sequence
  derived and/or modified sequence
atggagatgtacgaaacactggggaaggttggagagggatcctacggaaccgttatgaaatgtaaacataagaatactggccagatcgtggcaatcaagatcttctacgagcggcctgagcagtccgtcaacaagattgcgatgcgggagataaaatttctaaaacagttccaccacgaaaacctcgtgaatttgattgaagtcttcagacagaaaaaaaagattcacctggtgttcgagtttatcgaccatacggtcttggatgagctgcagcactactgccatgggctggagtccaagagactgcggaaatacctgttccagattctgagggctatcgactatctgcatagtaataatattattcatcgggatatcaagcccgaaaacatactggtcagccagagtggcatcaccaagctgtgcgatttcggtttcgcgagaaccctggccgctcccggagatatctatacggactacgtggcaacacgctggtacagggctcccgagcttgtgctgaaggacaccagttatggtaaacctgtggatatttgggcgctgggatgcatgatcatcgaaatggctacgggcaacccctatttgccttcatcatccgatctggacctgctccacaagattgtgctgaaagtggggaatctctctccacatctgcaaaacatcttcagcaagagccctattttcgccggagttgtcctaccccaggtccagcacccaaagaacgcccgtaaaaaataccctaaacttaatggtctgctggccgacattgtacatgcatgtctgcaaatcgatcctgccgaccgaatctcctcatctgatctgcttcaccacgaatactttacccgggacggatttatcgaaaaattcatgcccgaactcaaggccaagcttctccaagaggccaaggtcaactcactgatcaaacctaaggagagttctaaggagaacgagctacgcaaagacgaacgcaagacggtgtacaccaataccctcctgtcgtcatctgtcctcggaaaggaaatcgagaaggaaaaaaaaccaaaggaaattaaggtccgtgtcataaaagtaaaaggaggtcgtggagacatttccgaacccaaaaaaaaggaatacgaagggggattgggacagcaggatgctaatgagaacgttcaccccatgagtccagataccaagctggtgacgatcgagcccccaaatcctattaatccctctactaactgcaacggattgaaggaaaatccccactgcggagggtccgtgacgatgcctcctattaatctcacgaattccaaccttatggcagcaaatctgagttccaatctgttccaccctagtgtcagactcactgagcgggctaaaaagaggagaacatcctcccaaagcatcgggcaggtaatgcccaattctcggcaagaggatcctgggccaatccagagccagatggagaaggggatctttaacgagcgcacagggcattcggatcaaatggcaaatgagaataagcgcaaactgaacttcagccgatccgacaggaaagagttccatttccctgagctgccagtgacaatacagagcaaggacactaaggggatggaggtgaaacagataaagatgctgaagcgtgaatctaagaagacagaatcaagcaagattcccacattacttaacgtggaccagaatcaagaaaagcaagaaaataccggtaatgctcagacagaaagaaaaaaaaacttgccagatgtcgaatag

SEQ ID NO: 288037 - DNA, 2160 bp, Artificial Sequence
  derived and/or modified sequence
ctacgcagagccagaccagcgggaccacagaatgggctgaggcggcggcggctgtttggataaagtcaacagcgggacgtggggcgtgacgccgtagtaaaagcccagcttgaaaatggagatgtatgaaacccttggaaaagtgggagagggaagttacggaacagtcatgaaatgtaaacataagaatactgggcagatagtggccattaagatattttatgagagaccagaacaatctgtcaacaaaattgcgatgagagaaataaagtttctaaagcaatttcatcacgaaaacctggtcaatctgattgaagtttttagacagaaaaagaaaattcatttggtatttgaatttattgaccacacagtattagatgagttacaacattattgtcatggactagagagtaagcgacttagaaaatacctcttccagatccttcgagcaattgactatcttcacagtaataatatcattcatcgagatataaaacctgagaatattttagtatcccagtcaggaattactaagctctgtgattttggttttgcacgaacactagcagctcctggggacatttatacggactatgtggccacacgctggtatagagctcccgaattagtattaaaagatacttcttatggaaaacctgtggatatctgggctttgggctgtatgatcattgagatggccactggaaatccctatcttcctagtagttctgatttggatttactccataaaattgttttgaaagtgggcaatttgtcacctcacttgcagaatatcttttccaagagccccatttttgctggggtagttcttcctcaagttcaacaccccaaaaatgcaagaaaaaaatatccaaagcttaatggattgttggcagatatagttcatgcttgtttacaaattgatcctgctgacaggatatcatctagtgatcttttgcatcatgagtattttactagagatggatttattgaaaaattcatgccagaactgaaagctaaattactgcaggaagcaaaagtcaattcattaataaagccaaaagagagttctaaagaaaatgaactcaggaaagatgaaagaaaaacagtttataccaatacactgctaagtagttcagttttgggaaaggaaatagaaaaagagaaaaagcccaaggagatcaaagtcagagttattaaagtcaaaggaggaagaggagatatctcagaaccaaaaaagaaagagtatgaaggtggacttggtcaacaggatgcaaatgaaaatgttcatcctatgtctccagatacaaaacttgtaaccattgaaccaccaaaccctatcaatcccagcactaactgtaatggcttgaaagaaaatccacattgcggaggttctgtgacaatgccacccatcaatctaactaacagtaatttgatggctgcaaatctcagttcaaatctctttcaccccagtgtgaggttaactgaaagagcaaaaaagagacgcacttcttcacaatctattggacaagttatgcctaatagcaggcaagaggatccaggtcctattcaaagccaaatggagaagggtatatttaatgagcgaacaggtcacagtgaccaaatggcaaatgagaacaaaaggaagctgaatttttccagatctgacaggaaagaattccattttccagaattgcctgtcacaatacagtcaaaagatacaaaaggaatggaagttaaacagataaaaatgctgaagagggagtcaaagaaaacagagtcatctaagataccaactttacttaacgtggatcaaaatcaagaaaaacaagagaatacaggaaatgcacaaactgaaaggaagaagaacttgccagatgtagagtagaaaatgcagcagctgaaaattcagggaatcccagaatcactgtatggttttttaaaaatcctttttattaatgttacatacacaaaaatgctaactagataattttacaggtatatcgtaaatcctgttagttatatgtacattcacctaaatttgtttttaaatttattaatctttaaattattcatgttttcttaatttgaacatgaatttataaaaactacctgactggtacatcctaataaaattgcagcttacatttagtcatataa

SEQ ID NO: 288038 - DNA, 1773 bp, Artificial Sequence
  derived and/or modified sequence
atggagatgtacgagaccctgggcaaggtgggcgagggcagctacggcaccgtgatgaagtgcaagcacaagaacaccggccagatcgtggccatcaagatcttctacgagagacccgagcagagcgtgaacaagatcgccatgagagagatcaagttcctgaagcagttccaccacgagaacctggtgaacctgatcgaggtgttcagacagaagaagaagatccacctggtgttcgagttcatcgaccacaccgtgctggacgagctgcagcactactgccacggcctggagagcaagagactgagaaagtacctgttccagatcctgagagccatcgactacctgcacagcaacaacatcatccacagagacatcaagcccgagaacatcctggtgagccagagcggcatcaccaagctgtgcgacttcggcttcgccagaaccctggccgcccccggcgacatctacaccgactacgtggccaccagatggtacagagcccccgagctggtgctgaaggacaccagctacggcaagcccgtggacatctgggccctgggctgcatgatcatcgagatggccaccggcaacccctacctgcccagcagcagcgacctggacctgctgcacaagatcgtgctgaaggtgggcaacctgagcccccacctgcagaacatcttcagcaagagccccatcttcgccggcgtggtgctgccccaggtgcagcaccccaagaacgccagaaagaagtaccccaagctgaacggcctgctggccgacatcgtgcacgcctgcctgcagatcgaccccgccgacagaatcagcagcagcgacctgctgcaccacgagtacttcaccagagacggcttcatcgagaagttcatgcccgagctgaaggccaagctgctgcaggaggccaaggtgaacagcctgatcaagcccaaggagagcagcaaggagaacgagctgagaaaggacgagagaaagaccgtgtacaccaacaccctgctgagcagcagcgtgctgggcaaggagatcgagaaggagaagaagcccaaggagatcaaggtgagagtgatcaaggtgaagggcggcagaggcgacatcagcgagcccaagaagaaggagtacgagggcggcctgggccagcaggacgccaacgagaacgtgcaccccatgagccccgacaccaagctggtgaccatcgagccccccaaccccatcaaccccagcaccaactgcaacggcctgaaggagaacccccactgcggcggcagcgtgaccatgccccccatcaacctgaccaacagcaacctgatggccgccaacctgagcagcaacctgttccaccccagcgtgagactgaccgagagagccaagaagagaagaaccagcagccagagcatcggccaggtgatgcccaacagcagacaggaggaccccggccccatccagagccagatggagaagggcatcttcaacgagagaaccggccacagcgaccagatggccaacgagaacaagagaaagctgaacttcagcagaagcgacagaaaggagttccacttccccgagctgcccgtgaccatccagagcaaggacaccaagggcatggaggtgaagcagatcaagatgctgaagagagagagcaagaagaccgagagcagcaagatccccaccctgctgaacgtggaccagaaccaggagaagcaggagaacaccggcaacgcccagaccgagagaaagaagaacctgcccgacgtggagtag

SEQ ID NO: 288039 - DNA, 2019 bp, Artificial Sequence
  derived and/or modified sequence
atggatagtacgaaagagaagtgcgattcgtacaaggatgacttactgctgaggatgggtctaaacgataataaggcaggcatggagggactggataaagagaagattaataagattattatggaggcaacgaaggggagtaggttttatggaaatgagctgaagaaagaaaagcaagttaaccagcggattgaaaacatgatgcagcaaaaggcgcagatcacaagtcagcagcttagaaaggctcagctccaagtggaccggttcgccatggagctggagcagagtcgcaatcttagcaatacgattgttcacatcgatatggacgccttctacgcagccgtggaaatgcgggataaccctgaacttaaggataagccaatagcagtgggcagcatgagtatgctctccacctctaactaccatgctagacggttcggcgtccgggcagccatgcccggtttcatcgcaaagcgtctgtgtccacagcttatcattgtcccccctaattttgacaaatatcgagcagtctcaaaggaagtgaaggagattttggctgattatgacccaaacttcatggcaatgtctcttgatgaggcttatttaaatataacaaaacatctcgaggaacgccagaactggccagaggataaaaggcgctatttcatcaagatgggtagctccgtcgagaacgataatcctgggaaagaagtgaataagctgtcagagcacgagcggtccattagccccctgctttttgaggagtctccttcggatgttcaaccgccaggtgaccccttccaggtcaactttgaggagcagaacaatcctcagattcttcaaaacagcgtggtgtttggcacgagtgcacaagaggtcgtgaaggagatacgcttccggattgagcagaagacaaccttgaccgcgtcggcaggtgtaagaatttccagctttccaaatgaggaggataggaaacatcagcagagatctatcattggattcttacaggcggggaatcaggccctgtctgcgaccgagtgcaccctggaaaaaactgataaggacaaattcgtcaagccactggaaatgtctcacaagaagagtttcttcgacaaaaagcgttctgaaaggaaatggagtcatcaggacacatttaagtgtgaggccgtgaacaaacagagctttcagacaagccagccatttcaagttctgaagaagaaaatgaatgaaaatctcgaaattagcgaaaacagtgacgattgccagatccttacctgtcctgtgtgcttcagagcccagggctgcatttctctcgaagccctcaacaaacacgtcgacgaatgtttggacggcccaagcatcagtgagaatttcaagatgttcagctgctcacatgtctcagcaactaaagtgaataaaaaagaaaacgttcctgcgagcagcctctgcgaaaagcaggattatgaggcacacccaaaaatcaaagaaatttcgtctgtagattgtattgcccttgtcgacacaatcgataacagtagtaaggcagagagcatcgacgccttgtcaaacaagcacagtaaagaggagtgttcaagccttccctctaagagcttcaatatcgagcattgccaccagaacagctcatcaacagtttccctggaaaatgaggacgtcggaagctttcggcaggagtaccgacaaccctacctttgtgaggtcaaaactggccaggctttagtgtgtcccgtgtgcaacgttgagcagaaaacttccgacctgaccttgtttaatgtgcacgtggatgtctgcctgaataaatcctttattcaggaactgagaaaggacaaattcaaccctgtgaatcagcctaaggagagctcaagaagcactggcagcagcagtggcgtccaaaaggctgtgactagaactaaacggcccgggctgatgactaagtatagcaccagcaaaaagattaagcccaacaaccccaaacacaccctggacattttcttcaagtag

SEQ ID NO: 288040 - DNA, 2019 bp, Artificial Sequence
  derived and/or modified sequence
atggattcgactaaagaaaaatgcgattcctataaagacgacttgttactgcgcatggggttgaatgacaacaaagcagggatggaggggctcgacaaggagaaaatcaacaagatcattatggaagcaacaaagggatctaggttttacggcaacgagctgaagaaggagaaacaggtgaaccagaggattgagaatatgatgcagcaaaaagcacagatcaccagtcagcagctgcgtaaggcccaattgcaggtggacagatttgctatggaactggagcagtcgcggaatctgtcaaacaccatcgtgcatatagacatggacgcattttatgctgcggttgagatgagggataatccagagttgaaggacaagcccatcgccgtgggtagtatgtccatgttgagcacgtctaattatcatgcccgtagatttggagtgagagccgctatgccagggtttattgctaagcgcctgtgtccgcagctgataatcgttcccccaaattttgacaagtaccgagcagtctccaaggaagtcaaggagatcctggccgactacgaccctaacttcatggcaatgagccttgacgaggcttatttgaatattaccaagcatctggaagagaggcagaactggcctgaagacaagaggcgttacttcatcaaaatgggatcaagcgtggagaatgataaccccggcaaagaagtcaacaagctttctgagcacgagaggtctatctcacctctgctctttgaggagtcaccctcagatgtgcaaccacctggagacccttttcaggtgaacttcgaggaacagaataatcctcagatcctgcagaattccgtggtgttcggtacatcagctcaggaagtggtcaaggagatcaggtttaggatcgaacaaaagactacactcacggcttctgccggggtacgtatttcgtcgtttccgaatgaagaagacagaaagcatcagcagcgatctataattggattcctgcaagctggtaatcaggccctatccgcaaccgagtgcacccttgagaagaccgacaaggacaaatttgtgaaacccctagaaatgtctcacaaaaagagttttttcgataagaaacgctccgaacgtaagtggagtcaccaggacacctttaaatgcgaggctgtgaataaacagtcattccagacctcacaaccatttcaggtgttgaagaaaaaaatgaacgaaaatctggagatctccgagaattctgacgattgtcagattctaacctgcccagtttgcttccgagcccagggctgcatctcacttgaggcacttaacaaacatgtcgatgaatgtctcgacggcccatctatctcagagaattttaaaatgtttagctgttcccatgtaagcgctactaaagttaataaaaaggagaacgtgccagcatcatctctgtgtgaaaagcaggattatgaagcccaccccaagatcaaggagatatcctctgttgattgtatcgctcttgtcgacactattgacaattctagcaaagccgaatccatcgacgcattatccaacaagcattcaaaagaagagtgttcatctctacctagcaaatccttcaacatagagcactgtcaccagaactctagcagtacagtaagtctcgagaatgaggacgtcggaagctttcggcaagagtatcggcaaccctacctctgcgaagtgaaaacaggccaggctctggtgtgtcctgtatgcaatgtcgagcagaaaacatccgatctcacgttatttaacgtacatgtggatgtatgcctaaataaatcttttatccaggagcttcgcaaagacaaatttaatcctgtaaatcaacctaaggagagctcaagatcaactgggtcttccagcggggtccagaaggccgtgacgcgcacaaaaaggcctggattaatgactaaatattccacatctaaaaaaattaaacctaacaacccaaagcacaccctggatatcttcttcaagtag

SEQ ID NO: 288041 - DNA, 2019 bp, Artificial Sequence
  derived and/or modified sequence
atggacagcaccaaggagaagtgtgacagctacaaggatgacctgctgctgaggatgggcctgaatgacaacaaggccggcatggagggcctggacaaggagaagatcaacaagatcatcatggaggccaccaagggcagccgcttctatggaaatgagctgaagaaggagaagcaggtgaaccagagaattgagaacatgatgcagcagaaggcccagatcaccagccagcagctgaggaaggcccagctgcaggtggacagatttgccatggagctggagcagagcaggaacctgagcaacaccatcgtgcacatcgacatggatgccttctatgctgctgtggagatgagggacaaccctgagctgaaggacaagcccatcgctgtgggctccatgtccatgctgagcaccagcaactaccacgcccggcgcttcggcgtgcgggccgccatgcctggcttcatcgccaagaggctgtgcccccagctgatcatcgtgccccccaactttgacaagtacagagctgtgtccaaggaggtgaaggagatcctggccgactatgaccccaacttcatggccatgagcctggatgaggcctacctgaacatcaccaagcacctggaggagcggcagaactggccagaggacaagaggcgctacttcatcaagatgggcagctctgtggagaatgacaaccctgggaaggaggtgaacaagctgtctgagcacgagaggagcatcagccccctgctgtttgaggagagccccagtgatgtgcagcccccaggggaccccttccaggtgaactttgaggagcagaacaacccccagatcctgcagaacagcgtggtgtttggcaccagcgcccaggaggtggtgaaggagatccgcttcagaattgagcagaagaccaccctgacagccagcgctggggtgcgcatcagcagcttccccaatgaggaggacaggaagcaccagcagaggagcatcatcggcttcctgcaggccggcaaccaggccctgagcgccacagagtgcaccctggagaagacagacaaggacaagtttgtgaagcccctggagatgagccacaagaagagcttctttgacaagaagaggtctgagaggaagtggagccaccaggacaccttcaagtgtgaggccgtgaacaagcagagcttccagaccagccagcccttccaggtgctgaagaagaagatgaatgaaaacctggagatcagcgagaacagtgatgactgccagatcctgacctgccctgtgtgcttccgggcccagggctgcatcagcctggaggccctgaacaagcacgtggatgaatgtctggatggccccagcatcagcgagaacttcaagatgttcagctgcagccacgtgtctgccaccaaggtgaacaagaaggaaaatgtgcctgccagcagcctgtgtgagaagcaggactatgaggcccaccccaagatcaaggagatcagctctgtggactgcatcgccctggtggacaccatcgacaacagcagcaaggccgagagcattgatgccctgagcaacaagcacagcaaggaggagtgcagcagcctgcccagcaagagcttcaacatcgagcactgccaccagaacagcagcagcacagtgtccctggagaatgaagatgtgggcagcttccggcaggagtaccggcagccctacctgtgtgaggtgaagacaggccaggccctggtgtgccctgtgtgcaatgtggagcagaagaccagtgacctgaccctcttcaacgtgcacgtggatgtgtgcctgaacaagagcttcatccaggagctgaggaaggacaagttcaaccctgtgaaccagcccaaggagagcagccgcagcacaggcagcagcagcggcgtgcagaaggctgtgaccaggaccaagaggcctggcctgatgaccaagtacagcaccagcaagaagatcaagcccaacaaccccaagcacaccctggacatcttcttcaagtag

SEQ ID NO: 288042 - DNA, 2019 bp, Artificial Sequence
  derived and/or modified sequence
atggacagcaccaaggagaagtgcgacagctacaaggacgacctgctgcttcggatggggctcaatgacaacaaggccgggatggagggcctggataaggagaagatcaacaaaataatcatggaggccactaagggatccaggttctatggtaatgagttgaagaaggaaaagcaggtcaaccagcgaatcgaaaatatgatgcagcagaaggctcagatcaccagccaacagcttcggaaagcccagttacaggtggatcggttcgcgatggagctggagcagtcccggaatctgtccaataccatcgtgcacattgatatggacgctttttacgccgcagtggagatgagagacaacccggagctgaaggacaaacctattgccgtggggagtatgagtatgctgagcaccagcaactaccatgccaggaggtttggggtccgtgccgccatgcctggcttcatcgccaagcgcctatgtccacagctgataatcgttccgcctaattttgataagtatcgcgctgtcagtaaagaggtgaaggaaatcctagctgactacgaccctaattttatggcaatgtcactggacgaagcatacctcaacatcaccaaacacttggaggagagacagaattggcctgaagataaacgcagatacttcatcaagatgggctcgagcgtggagaacgataatcccggaaaggaagtgaataaactgtcagaacacgaaagatcaattagccctctactctttgaagagtccccctctgacgtacagccaccaggtgaccctttccaggtcaactttgaggagcagaacaatccccagattcttcagaacagcgtcgtgttcggaacttccgcacaagaggtggtgaaggagatccggtttaggatcgagcaaaagactacccttacagcaagcgccggtgtacgaatttcatccttcccaaatgaggaggatagaaagcaccagcagcggagtattatcgggttcctccaggcagggaaccaggcactgagcgccaccgagtgcacgctggagaagaccgataaagacaaatttgtcaaaccccttgagatgtcccacaagaagagcttctttgataaaaaacggagtgaacgtaagtggagccaccaggatacattcaagtgtgaggccgtcaataagcagtccttccaaacaagccagccatttcaagttctgaaaaaaaaaatgaatgaaaatctcgagatctctgagaactcagacgattgtcagatcctaacgtgcccagtctgctttcgagctcaggggtgtatatctttggaggcattaaataaacatgtggacgagtgcctcgacgggccaagtatatcggaaaacttcaaaatgttcagttgcagtcacgtgtcagctactaaagtgaacaagaaggaaaatgttcctgcgagctcactgtgtgagaagcaggattacgaagcacaccccaagatcaaggaaattagttctgtcgactgcatcgcgctggtagatactatagataacagtagtaaggctgagagtatagatgccctgagcaataagcattcgaaagaggagtgttcctctcttccctccaagtcgttcaatatcgagcactgccatcagaattcctcttcaactgtttccctggaaaacgaggatgtcggctcttttaggcaggaataccggcagccctacctgtgtgaagttaagaccggacaagctttagtttgtcccgtgtgcaatgtggagcagaaaaccagcgacttgaccctgtttaatgttcatgtcgatgtctgtctaaataaaagcttcatccaggaactacggaaagacaagtttaatccagtgaatcaaccaaaagagtcctcaaggtccacagggtcgtcaagcggggtgcagaaggccgtgacaagaacgaagcggccgggtctgatgacgaaatacagcaccagtaagaaaataaaaccaaacaatccaaagcacaccctcgatatattttttaagtag

SEQ ID NO: 288043 - DNA, 2019 bp, Artificial Sequence
  derived and/or modified sequence
atggacagcaccaaggagaagtgcgacagctacaaggacgacctgcttctgcggatggggctcaacgataacaaggccggaatggaaggattggataaagagaaaattaataagatcatcatggaagctacaaagggaagcagattttacggcaacgaactgaaaaaggaaaagcaagtgaatcaacggatcgagaatatgatgcagcagaaagcgcagatcactagccaacaattaagaaaggcacaactgcaggttgatcggttcgccatggaacttgagcagtcacggaatctttctaatacaattgtccatattgatatggacgcgttttacgcggcggtcgagatgcgggacaatcccgaattgaaggataaacccatcgccgtgggatccatgtctatgctatccactagcaactaccacgctaggcgtttcggagtgcgcgcggctatgccaggatttatcgccaagcgactgtgtccccagctcattattgtgccacccaattttgataagtacagggcagtatcaaaggaggttaaagaaattttggcagactacgaccccaattttatggcaatgagccttgacgaagcctatctgaatatcaccaaacatctggaagaaaggcagaactggcctgaagataagcggcggtacttcatcaaaatggggtcatccgtcgaaaatgacaacccgggaaaagaggtgaacaaactgtctgaacatgagcggagcattagtccgctactattcgaggagtcgcctagtgacgtccagcccccaggggatccctttcaggtgaacttcgaggaacaaaataatccacagattctgcagaacagcgtcgtattcgggacctctgcgcaggaagtagtgaaagaaatccggttcaggatcgagcagaaaaccacactgaccgcctcggctggcgtccgtatctctagttttcctaatgaggaagaccggaaacatcagcagaggtccatcatcggctttctccaagccggcaatcaggctttgtctgctacggagtgcaccttagaaaaaaccgataaagacaagttcgtcaaaccactggaaatgtcgcacaagaaatctttttttgacaaaaaaaggagcgagcgcaagtggtctcatcaggatacattcaaatgcgaggctgtaaataagcaatcatttcaaacttcccaaccattccaggtgttgaagaaaaaaatgaacgaaaatctagaaatctccgaaaattcagatgattgtcagatcttaacctgcccagtttgtttcagagctcaaggttgcataagtctcgaggctctcaacaaacacgtcgacgagtgtctcgatgggcccagcatctccgaaaattttaagatgttctcgtgtagtcatgtgagcgctacaaaggtgaacaagaaggagaacgttcccgcaagctccctctgtgagaaacaagattacgaggctcacccaaagataaaggagatcagttctgttgattgtatcgccctggtagacaccattgataattcctcgaaagccgagagcatagatgccttaagtaacaaacatagtaaggaggaatgctctagccttccaagtaaatcttttaacatagagcactgccaccaaaattcctcatccaccgtgtcacttgaaaacgaggatgtgggaagctttcgccaggagtaccggcagccctatttgtgcgaggtcaagactgggcaggcacttgtctgcccagtgtgcaatgtcgagcaaaagacctctgatctgacactcttcaacgtgcacgtcgacgtctgcctgaataagagctttattcaggagctgcgcaaagacaaattcaatccagttaatcagccgaaggagtcatcgcgctccaccggatccagcagcggggttcaaaaggcagtgacccggactaagaggcctggtctcatgactaagtactccacttcaaaaaagattaagccaaataaccctaagcatacgctcgatatcttcttcaagtag

SEQ ID NO: 288044 - DNA, 3918 bp, Artificial Sequence
  derived and/or modified sequence
agctgtgctgcattctgggaagggcgttggtccgtcgctcgcgcagcctcctgggagttgtagtcgcgatcctgaggtaacggataagtttataccatggatagcacaaaggagaagtgtgacagttacaaagatgatcttctgcttaggatgggacttaatgataataaagcaggaatggaaggattagataaagagaaaattaacaaaattataatggaagccacgaaggggtccagattttatggaaatgagctcaagaaagaaaagcaagtcaaccaacgaattgaaaatatgatgcaacaaaaagctcaaatcaccagccaacagctaagaaaagcacaattacaggttgacagatttgcaatggaattagaacaaagccgaaatttgagcaataccatagtgcacattgacatggatgctttctatgcagctgtagaaatgagggacaatccagaattgaaggataaacccattgctgtaggatcaatgagtatgctgtctacttcaaattaccatgcaaggagatttggtgttcgtgcagccatgccaggatttattgctaagaggctgtgcccacaacttataatagtgccccccaactttgacaaataccgagctgtgagtaaagaggttaaggaaatacttgctgattatgatcccaattttatggccatgagtcttgatgaagcctacttgaatataacaaagcacttagaagaaagacaaaattggcctgaggataaaagaaggtatttcatcaaaatgggaagctctgtagaaaatgataatccaggaaaggaagttaataaactgagtgagcatgaacgatccatctctccactactttttgaagagagtccttctgatgtgcagcccccaggagatcctttccaagtgaactttgaagaacaaaacaatcctcaaatactccaaaactcagttgtttttggaacatcagcccaggaagtggtaaaggaaattcgtttcagaattgagcagaaaacaacactgacagccagtgcaggtgttcggatatctagttttcccaatgaagaggacaggaaacaccaacaaaggagcattattggctttttacaggctggaaaccaagccctgtcagccactgagtgtacattagagaaaactgacaaagataagtttgtaaaacctctagaaatgtctcataagaagagtttctttgataaaaaacgatcagaaaggaaatggagtcaccaagatacatttaaatgtgaagccgtgaataaacaaagtttccagacatcacaaccattccaagttttaaagaagaagatgaatgagaatttggaaatatcagagaattcagatgactgtcagatacttacctgtcctgtttgctttagggctcaagggtgcatcagtctggaagccttgaataaacatgtagatgaatgtcttgatggaccttcaatcagtgaaaactttaaaatgttctcgtgttcacatgtttctgctaccaaagttaacaagaaagaaaatgttcctgcttcttcactttgtgagaagcaagattatgaagcccatccaaaaattaaagaaatatcttcagtagattgtatagctttagtagatactatagataactcatctaaagcagaaagcatagatgctttaagtaataagcatagcaaggaagaatgttctagtctcccaagcaagtcttttaatattgaacactgtcatcagaattcttcttctactgtttcattggaaaacgaagatgttggatcatttagacaagaataccgccagccttacttatgtgaagtgaaaacaggccaagctctagtttgtcctgtttgtaacgtagaacaaaagacttcagatctaaccctgttcaatgtgcatgtggatgtttgcttaaataaaagttttatccaagaattaagaaaggataaatttaacccagttaatcaacccaaagaaagctccagaagtactggtagctcaagtggagtacagaaggctgtaacaagaacaaaaaggccaggattgatgacaaagtactcaacatcaaagaaaataaaaccaaacaatcccaaacatacccttgatatattttttaagtaaacattgaacattttatcattaatttttaattgaaactagttattttataatcaatgaatttgttctttctgattttaagtttgcagatttatttagtgaaggcaagtgcaataatccttcctcagatgatgtttgcttttctaagatacatatactgattctgtgtatcttttttataaccatgagaattttacttccattatacatcaattggaaatcaatcctgttaagagataattcttaaaagggaaattaggaatgggataagaaggtgatttttttattatttttatactgaatataaaaacatttgtaagggctctcaaagattcacacatgcctatattatcataagaatttttcagcacttaactactttgttggcattgatcctagtgtctttaaatacttcatgagcattcataattaaaatttatcttaagttctatgaagagtattaatgtaactagcataagtggttttcttcaggaaaataaatatcacagtattatctgtgttaaaatggtttttgcctaaaatataatttttaatttggcttttcttatttaaaattccattatcttatgaataagcacttgaatcagtttttaaaatatttagtctaagatgattcaaagtagttttattttaatacaggacttttaaatggcagtatttcatttcttgtcaattatgttggtactttccacaaatctataaagaaggataaattgtaccatcattttattataatcctcaagagaaaatgtgtaattcaaaagattaatgtgtattaaaacacattatgtatcttagttacatttctatcagtacttttattaatatttgtgaaagaagacagcttaatagtagttagcttaagtagtttctccaagtacttttgtgctatcaatgagttcttctcaaaaaataattagttaggccaggcacaatggctcacacctgtaatgccagccctttgggaggccgaatgggcagatcacttgaggtcaggagtttgagaccagcctcgccaacatggtgagaccctgtctctactaaaacgataaaaaaaaaaaaaaaattagccaggcttggtggcacacgcctgtaatcccagctactcagatggctgaggcaggagaactacttgaacctgggaggtcaaagctgcagtcagccaagatcttgccactgtactccagcctgaagagcgagactctgtctcaataatataataatagttattatttaattgcaacatgaagttggaagccattttctgttacttctttaaggagctaaatcttttatatttttgttttctctccccttgcgtttcatattttagcttatgatctaaatatatattttgtatattataatattttaggaatagcttaattaagaactcacagactttgacaaagtggtaactagacttttaattactagattcttcaaattaggcttaatgcctgctagcatgccaatccaatcccatgactgatgttattatacactatggcaaatacaaagttgtagtattatggttcttgatggtgtgatttacttatgtaaattatgtacaaatttaagttcaatgaaacactgatttaatgtactgaaaggtaaatagtaccatagtgaattattttctgtcttgccttaggtttatttttattatcttcaatattagaataaatgctaaattattttcatttaaggatttatgtagttgaatattatcatttagtaatatttaatcatttgaaataaaatttaaagctttaattgatctaa

SEQ ID NO: 288045 - DNA, 2019 bp, Artificial Sequence
  derived and/or modified sequence
atggatagcacaaaggagaagtgtgacagttacaaagatgatcttctgcttaggatgggacttaatgataataaagcaggaatggaaggattagataaagagaaaattaacaaaattataatggaagccacgaaggggtccagattttatggaaatgagctcaagaaagaaaagcaagtcaaccaacgaattgaaaatatgatgcaacaaaaagctcaaatcaccagccaacagctaagaaaagcacaattacaggttgacagatttgcaatggaattagaacaaagccgaaatttgagcaataccatagtgcacattgacatggatgctttctatgcagctgtagaaatgagggacaatccagaattgaaggataaacccattgctgtaggatcaatgagtatgctgtctacttcaaattaccatgcaaggagatttggtgttcgtgcagccatgccaggatttattgctaagaggctgtgcccacaacttataatagtgccccccaactttgacaaataccgagctgtgagtaaagaggttaaggaaatacttgctgattatgatcccaattttatggccatgagtcttgatgaagcctacttgaatataacaaagcacttagaagaaagacaaaattggcctgaggataaaagaaggtatttcatcaaaatgggaagctctgtagaaaatgataatccaggaaaggaagttaataaactgagtgagcatgaacgatccatctctccactactttttgaagagagtccttctgatgtgcagcccccaggagatcctttccaagtgaactttgaagaacaaaacaatcctcaaatactccaaaactcagttgtttttggaacatcagcccaggaagtggtaaaggaaattcgtttcagaattgagcagaaaacaacactgacagccagtgcaggtgttcggatatctagttttcccaatgaagaggacaggaaacaccaacaaaggagcattattggctttttacaggctggaaaccaagccctgtcagccactgagtgtacattagagaaaactgacaaagataagtttgtaaaacctctagaaatgtctcataagaagagtttctttgataaaaaacgatcagaaaggaaatggagtcaccaagatacatttaaatgtgaagccgtgaataaacaaagtttccagacatcacaaccattccaagttttaaagaagaagatgaatgagaatttggaaatatcagagaattcagatgactgtcagatacttacctgtcctgtttgctttagggctcaagggtgcatcagtctggaagccttgaataaacatgtagatgaatgtcttgatggaccttcaatcagtgaaaactttaaaatgttctcgtgttcacatgtttctgctaccaaagttaacaagaaagaaaatgttcctgcttcttcactttgtgagaagcaagattatgaagcccatccaaaaattaaagaaatatcttcagtagattgtatagctttagtagatactatagataactcatctaaagcagaaagcatagatgctttaagtaataagcatagcaaggaagaatgttctagtctcccaagcaagtcttttaatattgaacactgtcatcagaattcttcttctactgtttcattggaaaacgaagatgttggatcatttagacaagaataccgccagccttacttatgtgaagtgaaaacaggccaagctctagtttgtcctgtttgtaacgtagaacaaaagacttcagatctaaccctgttcaatgtgcatgtggatgtttgcttaaataaaagttttatccaagaattaagaaaggataaatttaacccagttaatcaacccaaagaaagctccagaagtactggtagctcaagtggagtacagaaggctgtaacaagaacaaaaaggccaggattgatgacaaagtactcaacatcaaagaaaataaaaccaaacaatcccaaacatacccttgatatattttttaagtaa

SEQ ID NO: 288046 - DNA, 2019 bp, Artificial Sequence
  derived and/or modified sequence
atggactcgaccaaagagaagtgcgattcgtataaagatgatctcctactccggatgggcctgaacgataacaaagcaggcatggaaggcctggataaggaaaagataaacaaaatcattatggaagcgactaagggcagccgcttctatgggaatgaattgaaaaaggaaaagcaagtgaatcaacgcattgagaacatgatgcagcaaaaagcccagatcaccagtcagcagctgcggaaggcacagcttcaagtggataggttcgccatggagctggaacagtctcgcaatctgagtaacacaatagtccatatcgacatggatgcattttatgcagctgtggagatgagggataaccccgagcttaaagacaagccaatcgccgtcgggtcaatgagcatgctgagtacctcaaactaccatgcaagaagatttggagttcgggctgctatgccagggtttattgccaaacgattgtgtccgcagttgatcattgtgcccccaaatttcgacaagtaccgggcagtgtcaaaggaggtgaaagagatccttgcagactacgaccccaatttcatggcaatgagcttggacgaagcttatttaaacatcacgaagcatttagaagaaagacaaaactggcccgaggataaacggaggtattttattaaaatgggatcaagcgtggaaaacgacaacccaggaaaggaagtcaataagctgtctgaacatgaaagaagtatctccccgctgctgtttgaggaaagtcccagcgatgtacagccgccaggggaccctttccaggtaaacttcgaagagcaaaataacccccagattctgcagaactcggtagtgtttggcacatcagcgcaggaggttgtgaaggaaatcagattccgcattgagcaaaaaaccactctcacagcaagtgccggagtgcgtatttcctcttttcctaacgaagaggatcggaaacatcagcagcggtcgatcattgggtttttgcaggctgggaaccaggcactatccgccacagagtgcaccttggagaaaacagacaaagacaagtttgttaagcctctggagatgagccataagaagtcatttttcgacaagaaacgatcggaaagaaaatggagccatcaggataccttcaagtgtgaggccgtgaataagcagagcttccaaacctcacagccgtttcaggtgctgaagaagaagatgaatgagaacttggaaatctccgagaactcagacgactgccaaatcttaacctgcccagtgtgttttcgagcccagggatgtatttccctggaggccctgaataaacacgtcgatgagtgcttagatggcccttctatctccgagaattttaaaatgttctcttgttcccatgtgtctgcgacaaaggtaaataaaaaggaaaatgtccccgcttcgtctctttgtgagaaacaggactatgaagctcacccaaaaatcaaagagataagtagtgtagactgcatcgccttggttgacaccatcgacaattccagtaaggcagaatccatcgatgccctgagcaacaagcactcgaaagaagagtgcagctccctcccctctaagagctttaatatcgagcattgccaccagaactcatcctccactgtgtctttagagaatgaggacgtgggctcctttagacaggagtataggcagccttatctctgtgaggtgaaaaccggccaagcattggtctgcccagtctgcaatgttgaacagaagacatccgacctaaccctcttcaacgtacacgtggatgtctgtctgaataagtcatttatccaggagttgagaaaggacaagttcaaccctgttaatcagccgaaagagtccagccggtccactggctcaagctccggagtgcaaaaagcggtgaccagaaccaaacgcccaggactgatgactaagtactcaacatcaaagaagattaagccaaataaccctaaacacactctggacatcttctttaaatag

SEQ ID NO: 288047 - DNA, 2019 bp, Artificial Sequence
  derived and/or modified sequence
atggactctaccaaagagaaatgcgatagttacaaagatgatctcctgctcaggatgggtctcaatgacaacaaggccggtatggagggactcgataaggagaagattaacaagataatcatggaagcgaccaagggcagtagattctatgggaatgaactcaagaaagaaaagcaggtgaatcaacgaattgagaacatgatgcagcagaaagcacagattacctcgcagcaattgagaaaggcccagctgcaagttgatcggttcgccatggagctagagcagtcacgaaatctctccaatacaattgttcatattgacatggatgcgttttacgctgctgtggagatgagagataatccggagttgaaagacaaacctatcgcagtgggttcaatgagcatgttgtccacgagcaattaccatgcaagaaggttcggcgtgagggcagccatgcccggattcatcgctaagcgactgtgcccccagctcattatcgtgccacccaatttcgataagtaccgagccgtctcaaaagaggtgaaggagattctcgccgattatgatccgaactttatggccatgagtctcgacgaggcatacctgaacattactaaacacctggaggaacgccagaattggccggaagataaaagacggtattttatcaaaatgggctcctcagtggaaaatgacaaccccggtaaggaagttaacaagttgagtgaacacgaaaggtcaatatcaccgcttctatttgaggaaagcccatcggacgtgcagcccccaggagatccgtttcaagtgaacttcgaagaacagaataacccccagattctgcagaactccgtagtgttcggcacgtctgcccaggaagtggtgaaagaaatccgatttagaatcgaacagaaaaccacacttactgcctcagccggagtacggatcagcagtttccctaatgaggaggatcggaagcatcagcagaggtcaattatcggcttcctccaagccggaaatcaggctctttcagcaacagagtgtaccctggagaagactgacaaagacaagtttgtgaagccactggagatgagtcataaaaagagctttttcgacaagaaacggagcgagaggaagtggtcacaccaggacacgttcaagtgtgaggccgtcaataagcaatcatttcagaccagccagccatttcaggtcctcaagaaaaagatgaatgagaatcttgagattagcgagaactccgacgactgccagatattgacctgccctgtgtgctttagggcacaaggctgcattagcttagaagcattgaacaagcatgtagacgagtgtcttgacggcccatctatttccgagaatttcaaaatgttctcgtgtagccacgtgagcgcaaccaaggtaaataaaaaagaaaatgtccctgcctcttccctttgcgagaagcaggactacgaggcacatccgaaaataaaggagatcagctcagtggactgtatcgcactagtcgacaccatcgacaactcctcaaaagccgagtctattgacgctctgagcaataagcatagcaaggaggaatgttcttccctgccttccaaatcttttaacatagagcactgtcatcagaattccagtagcactgtatcccttgagaacgaggacgtgggcagctttcgacaggaatatcggcaaccttatctgtgtgaggtcaagaccggtcaggcgcttgtctgtccggtttgtaatgtggaacagaagacttccgacctgacactgttcaacgtgcatgttgatgtttgtctcaacaagtcttttatccaagaactccggaaagacaagttcaatcctgtgaatcaaccaaaggagagttccaggtctacgggttcgagcagcggtgtgcagaaggccgtcacgagaactaaacggcctggactcatgactaagtactccacttctaagaagattaagcctaataacccgaaacataccctggatatcttcttcaagtag

SEQ ID NO: 288048 - DNA, 2019 bp, Artificial Sequence
  derived and/or modified sequence
atggacagcaccaaggagaagtgcgacagctacaaggacgacctgctgctgagaatgggcctgaacgacaacaaggccggcatggagggcctggacaaggagaagatcaacaagatcatcatggaggccaccaagggcagcagattctacggcaacgagctgaagaaggagaagcaggtgaaccagagaatcgagaacatgatgcagcagaaggcccagatcaccagccagcagctgagaaaggcccagctgcaggtggacagattcgccatggagctggagcagagcagaaacctgagcaacaccatcgtgcacatcgacatggacgccttctacgccgccgtggagatgagagacaaccccgagctgaaggacaagcccatcgccgtgggcagcatgagcatgctgagcaccagcaactaccacgccagaagattcggcgtgagagccgccatgcccggcttcatcgccaagagactgtgcccccagctgatcatcgtgccccccaacttcgacaagtacagagccgtgagcaaggaggtgaaggagatcctggccgactacgaccccaacttcatggccatgagcctggacgaggcctacctgaacatcaccaagcacctggaggagagacagaactggcccgaggacaagagaagatacttcatcaagatgggcagcagcgtggagaacgacaaccccggcaaggaggtgaacaagctgagcgagcacgagagaagcatcagccccctgctgttcgaggagagccccagcgacgtgcagccccccggcgaccccttccaggtgaacttcgaggagcagaacaacccccagatcctgcagaacagcgtggtgttcggcaccagcgcccaggaggtggtgaaggagatcagattcagaatcgagcagaagaccaccctgaccgccagcgccggcgtgagaatcagcagcttccccaacgaggaggacagaaagcaccagcagagaagcatcatcggcttcctgcaggccggcaaccaggccctgagcgccaccgagtgcaccctggagaagaccgacaaggacaagttcgtgaagcccctggagatgagccacaagaagagcttcttcgacaagaagagaagcgagagaaagtggagccaccaggacaccttcaagtgcgaggccgtgaacaagcagagcttccagaccagccagcccttccaggtgctgaagaagaagatgaacgagaacctggagatcagcgagaacagcgacgactgccagatcctgacctgccccgtgtgcttcagagcccagggctgcatcagcctggaggccctgaacaagcacgtggacgagtgcctggacggccccagcatcagcgagaacttcaagatgttcagctgcagccacgtgagcgccaccaaggtgaacaagaaggagaacgtgcccgccagcagcctgtgcgagaagcaggactacgaggcccaccccaagatcaaggagatcagcagcgtggactgcatcgccctggtggacaccatcgacaacagcagcaaggccgagagcatcgacgccctgagcaacaagcacagcaaggaggagtgcagcagcctgcccagcaagagcttcaacatcgagcactgccaccagaacagcagcagcaccgtgagcctggagaacgaggacgtgggcagcttcagacaggagtacagacagccctacctgtgcgaggtgaagaccggccaggccctggtgtgccccgtgtgcaacgtggagcagaagaccagcgacctgaccctgttcaacgtgcacgtggacgtgtgcctgaacaagagcttcatccaggagctgagaaaggacaagttcaaccccgtgaaccagcccaaggagagcagcagaagcaccggcagcagcagcggcgtgcagaaggccgtgaccagaaccaagagacccggcctgatgaccaagtacagcaccagcaagaagatcaagcccaacaaccccaagcacaccctggacatcttcttcaagtag

SEQ ID NO: 288049 - DNA, 6399 bp, Artificial Sequence
  derived and/or modified sequence
atgtcgagtagaatcagcgacaccgagagatctcaaaaagatgcccagacagttgaggaggaatcacttactctgtccagagaggatgccgagcaagtcgcactggaagtagacctgaatcagaagaaaagacggcgaaaaaagcaggatggggcaaacgagttgggcgttaacaacctccttgagaatgccacagtccaagcagggccttcgaagggagagaagcacaaaaacaagtgccaggcaatacgccctgaattaaaagagggtgaatgtagcaaagaacagatgctgtcttgcacacaaaacatcgatggtatcgtgggattcgcttctacggagaaagtcgagaagcgaacagaccctatcctgagcctgtctaatcagcaggatgcaacaagcgtggcaactgagagctccgagagttccacctccgacctcccatcatttgaggttgggattagggcattgtgtgaagtgaataacgctgagggctcttgcatcgaggaacggaacgtggatttaaaaaacaattccttagaaattgaccagaccgaaaatgtgaaacctatgctgcgcggacggtttcaacggcccaagcccaacctgtcccgggcgggtaagaagtccgtgctctcccagggtaagacagaatcagagtctaagaactcacattcaaaaaccagcgtggaaaagaaccatgtggagaaggataaaatgaataccctggatattctcagaatggagactactgaacgggaaaacccagaggccgagaccgtctcggtactgggagagaagaattgcctccaggagggaagccaactcaaggctcttcgcccagtgcaggttcgcggacggctccagaaacccaagcccaatgccggcaaagcagcagaaagaaaggagatcctaatctcacaggaagaaattggggctaacgtggaaaagaatgagaatgagagctgcgccgatcgggacaccccacagcatatggaagatcagtctcgaaaagacttcgaagaggaggatgtgattttacaaccagagaagaacgacagcttccagaatgtgcagcctgacgagccaaaagttctgaacgagtgcctgtctgtccaagaaaataacaaggcaaacaagcttaaccaagttcccattttaagaacgagattccagaagcccaaaccaaacatcggtagaggtacgggccggcgtgagatttccagtaaagaggaggtgctggaaaagattctagtgtctggtgaaatggctgcggccctgagagaaacagtgagacttgatacatctccgaaggaaatggtgcccgctgaaattaataccaaggagatgcagtccgatctcaaggagaccggcaggagagcgatttctccaagagagaagatcttggatgttattgacgacactatcgagatggagacagggctaaaggctatggggagggaaatatgccttagggagaagactccagaggtaatcgacgcaacagaggaaattgacaaggatttggaggaggcaggccgccgggaaataagcccacagaagaatggtcctgaagaggtcaagcctcttggagaggtggagacggatctgaaggccacagggaacgaaagctcgccccgagagaaaactccagaagtgacggatgcaactgaagagatagacaaaaacctagaagagacaggccgccgaaagatctctcctcgcgaaaacggccccgaggaggtgaaacctgtggatgagatggagactgatcttaatgcaacgggtcgcgagagtagtccacgagagaagactccggaagtcatagatgccactgaggagattgatctcgaggagacggagagggaggtgagcccacaggagaatgggttagaagaggtgaaaccactgggcgaaatggaaacggacctgaaggccactgggcgagattccttcccccggggcaagacacctgaggtgatagacgccatcgaggagatagagattgatttagaggagacggagagagagatctctcctcaggaaaatggcttagaagaagttaagccactgggcgagatgcagacagacctgaaggccaccgggcgcgagatttctcctcgcgagaaaacgcccgaggtgattgatgcaacagaagagattgataaagacctggaagagaccggtcggagggaaatcagccccgaggaaaatgggccggaggaggtcaagccagtggacgagatggagaccgacctcaagacaacaggaagggaagggagctcgcgagagaagaccagggaggtgatcgatgcggctgaggtgattgagacggatctcgaagaaaccgagcgcgagataagtcctcaagagaatggacctgaggaggttaaacctgtgggcaaaatggagactgatcttaaggagatacgagaggaaattagccaaagggagaaggtgctcgctgaattcagtgcaattagagagaaggaaatcgatctaaaggagactgggaagcgcgacattccaatcatggagaaagtgagtgggaagatggccgtcgtagaagagatggaagctgacctgaaggaaacgggcaaggaaaattttagagaacgcggtagtgaggaaatctgcgtcactgaggagaaggtggctgaactgaaacagactggtaagacggatatttctccacgcgagaacgagcttgaggagacttctacttctagacagacggatactcatctgatgcagagcggcagcaacgatttcagcgccgtgccgtcattggatatacagaatattagtagtgaagtgctgagcatgatgcatacacccgtggaagaaaagagaaactccgaaaaagaagtcagcagccatttctctcactttaagatctcttctcagacccacgaatccgataaaaccgaggttcagggaatacagtcacctgatgttcctgagcagttctcggacattaacctgtctaaaagtctcccacaggagcaaaaaccgctcgagatcaaaccagcgccttttgtgcggagccgctttaagcgccctaagcccaatttggcccgagctgccctgaagcgggagaccacggagagtgaaaagtacatttacgaaaagaaaagtgagacaaagaagatggagaccatcgtcatgcaggagaacaacgagcaaaccgacacattgccttcccaacatgacgaggccagcttaatgatatctagggaaaaagacaccttaggccataggaatgaggaagctgtgattctaccatgcacccagacagagcgcaatctatctccttctaactcctgtgagcctaaagaagagagtcaatcagcgcccgtgcagaaaaatgatagcgtggtgtctgttggcacaaacaacgtaaataccttccagcaagagatgaaggaaagtgtcatccagaccgctcgccaggtacgtggtagactgcaaaggccgcggcccaatataaggaagactggccaacgccagattgtggataaaggcgaggccaagggcattatcaaagaggggcgtaccatcctgccaaaagatgagacagaaaagaaggtcctcacagtatccaacagtcagattgagactgaaattgaagtgccctctagtgcagtaccagagcatcggatgtatgaaaatcaatcacaggtggtgctggtggagaatctccatgtcaataaaactaatgagacaattcggcacgaaaacaaaccatatgtgccatcttctgcgcagatgacccgaagaaagtttcaaaaggccaaaccaaatttagggcgtgctcactcaaaaaaggaagaaccggtgctcgagaaagttaccactgatcagtccaaggaggggaaacccgaagatcatctcctccagaaaggcgcctccaatacacaactgctgctcaaggaaaaagccgagctcctcaccagcctcgaagtgagtgcaagaaaagactgtgtggggagcaaggaaagcgcactggccaaaattgacgctgaactagaggaagtgggcccctcacgccgggtgggcgaagagacagtcggcgataacagcccaagcagcgtggtcgaagagcagtacttgaacaaacttacttcttgccctcagcccctgaatgagacgtcctattccaaaatcgccctcgatggtaagactactatctcttctacctcagagtacgaaaggaatagaggcgaaagaagatctcacaagaagttcaagcccaacgtgactcggggacggggctcgaaacgcgtcaggggaaaaacttctaagaaggaacctagggctagtaaggccatgcttgtcactctccgggcatctcaagaggaagacgatgatgctgacgattttgagtctgattatgaggaagagagctaccacctcgccccagaagaggttaataaagcgccagtgtttgtccccgtaggcttacggagccccgaaccagtgtctgctcagattgaggaaaccatggaagagctagaaattaccgtcaacgtccccgatgttggttgtattgctgtcgtggaacacgagctgcctaatacagatgttacaactgaagagatgaaacaagaggagaacctgtcagtgccttttgaaatgaccacatctgagcatatccaggatgaacccggcgtgtgcattattccacatgtacactcaaaagacaaatcacacataccatcctccctcgataacgtgaatcacaaaattgtccacgaatgccaggagctgagttcgcccgttatcactaccagcccagcatccttcgaggaaaataaaatcgtactcgaggaacagagctcccgtgaggaaatctccctgatggagaaagtgaaagaaaatgccaccccaacccgtaacaccatcagcaaagtcacctccaacttaaggattaggtcccggctcgccaagcctaaacctaacctggaaaagacattgggcaccaaccgactggatgactatcaggaggtctcatcgctttgtgttactaagggcgctgagatggaaactcagagagaaactgaaaagaacgcatccaaggcaaccgagttggaaaacaagaatcttggacccgtcacaacagcagagaacaaggaccagagtaagttggcctgcgtccatggtattaagggaacgagtatcagcagtgaggtgaatctgacagaaagaaatgaaaatcaggaggagtcctctcaggaggtgcacatgctctcggtggcaccagtcgctagtagtgagaccggaccttgcaccctcggtttggaccgcgggctgggggaaaactcagtggaggagcctcagatcaaggactctaagggcgacagcgtgctgactctgcctgtacccgaatatacgcccacttcaattcccgaagtgcaacaagagaatataattaatccgcaagacttgacagtgaatcttgtggctaacgtaccgcaagacggtgaggatgagcaggccttcattcttacactcgtagagatccccgctaacgccgtggaagaattcacagacgctacagcccagttcatgcccaatcctctcctgccggccccgattctggtgaaatcggtgaatacagaggaacgcggcgacatgagtatctgcctaccagccacctcagtaggccaagacgccatgggactctctattagcggtcgggataatagtaagaaaccccccgataacctcgatctagtaagcagaaagcgctttcagtgcagactcgataagaacgaccatataccacccgcgaagaagcggtccctcactctgcgagacgattgccaggaatataccacagaggtccactccaaagagctgactaatgttttcgaggaaacaggcgagtcgcataaaggtcaagatatttttctgaccagcggatccacactgacaacgcctgagcctcagcgtcagcaggttgaagcggccttccagtcccgaggttctaggtcccccgacgcatgcatggataaaaacgtaccacaactgccgcaggatgaaatgatagtgtcagataaagaagagagaacggatgccgccccaaaatcccagcaaatggacagtagaacaagctcaagcaaggccagtctctcccgcccaggcagaagacctctgggattcctgtcactgatctgtagtaaaaatagcctggagtccgacgaacctatgcaagtccactctaagaagagactcaaaccgctcatccccggcttgcgtaagaaactcaagcgctctaacccctttaacgaatcccaggaaaagaatagagagtcctccgacttactccccagccccagtgtgattaccacccagtctgagaacatctcttcctccgccactcagtcgcccttttag

SEQ ID NO: 288050 - DNA, 6399 bp, Artificial Sequence
  derived and/or modified sequence
atgagcagccgcatcagtgacacagagaggagccagaaggatgcccagacagtggaggaggagagcctgaccctgagccgggaggatgctgagcaggtggccctggaggtggacctgaaccagaagaagagaagaaggaagaagcaggatggagccaatgagctgggcgtgaacaacctgctggagaatgccaccgtgcaggccggccccagcaagggggagaagcacaagaacaagtgccaggccatccggcctgagctgaaggagggagaatgttccaaggagcagatgctgagctgcacccagaacattgatggcatcgtgggctttgccagcacagagaaggtggagaagaggacagaccccatcctgagcctgagcaaccagcaggatgccacctctgtggccacagagagcagcgagagcagcaccagtgacctgcccagctttgaggtgggcatccgggccctgtgtgaggtgaacaatgctgagggcagctgcatcgaggagagaaatgtggacctgaagaacaacagcctggagattgaccagacagaaaatgtgaagcccatgctgcggggccgcttccagaggcccaagcccaacctgagccgggccggcaagaagtctgtgctgagccagggcaagacagaaagtgagagcaagaacagccacagcaagacctctgtggagaagaaccacgtggagaaggacaagatgaacaccctggacatcctgaggatggagaccacagagcgggagaaccctgaggccgagaccgtgtctgtgctgggggagaagaactgcctgcaggagggcagccagctgaaggccctgcggcctgtgcaggtgcggggccgcctgcagaagcccaagcccaatgccggcaaggctgctgagaggaaggagatcctgatcagccaggaggagattggagccaacgtggagaagaatgaaaatgaaagctgtgccgaccgggacaccccccagcacatggaggaccagagcaggaaggactttgaggaggaggatgtgatcctgcagcctgagaagaatgacagcttccagaatgtgcagccagatgagcccaaggtgctgaatgaatgtctgtctgtgcaggagaacaacaaggccaacaagctgaaccaggtgcccatcctgcggacccgcttccagaagcccaagcccaacatcggccggggcaccggccggcgggagatcagcagcaaggaggaggtgctggagaagatcctggtgtctggagagatggctgctgccctgcgggagaccgtgcggctggacaccagccccaaggagatggtgcctgctgagatcaacaccaaggagatgcagagcgacctgaaggagactggaagaagagccatcagcccccgggagaagatcctggatgtgattgatgacaccatcgagatggagaccggcctgaaggccatgggccgggagatctgcctgcgggagaagaccccagaggtgattgatgccacagaggagattgacaaggacctggaggaggccggccggcgggagatcagcccccagaagaatggacctgaggaggtgaagcccctgggggaggtggagacagacctgaaggccactggaaatgaaagcagcccccgggagaagaccccagaggtgacagatgccacagaggagattgacaagaacctggaggagactggaagaaggaagatcagcccccgggagaatggacctgaggaggtgaagcctgtggatgagatggagacagacctgaatgccaccggccgggagagcagcccccgggagaagaccccagaggtgattgatgccacagaggagattgacctggaggagacagagcgggaggtgagcccccaggagaatggcctggaggaggtgaagcccctgggggagatggagacagacctgaaggccaccggccgggacagcttcccccggggcaagaccccagaggtgattgatgccatcgaggagattgaaattgacctggaggagacagagcgggagatcagcccccaggagaatggcctggaggaggtgaagcccctgggggagatgcagacagacctgaaggccaccggccgggagatcagcccccgggagaagaccccagaggtgattgatgccacagaggagattgacaaggacctggaggagaccggccggcgggagatcagcccagaagaaaatggacctgaggaggtgaagcctgtggatgagatggagacagacctgaagaccaccggccgggagggcagcagccgggagaagacccgggaggtgattgatgctgctgaggtgattgaaacagacctggaggagacagagcgggagatcagcccccaggagaatggacctgaggaggtgaagcctgtgggcaagatggagacagacctgaaggagatccgggaggagatcagccagcgggagaaggtgctggccgagttcagcgccatccgggagaaggagattgacctgaaggagaccgggaagagggacatccccatcatggagaaggtgtctgggaagatggctgtggtggaggagatggaggccgacctgaaggagaccgggaaggagaacttccgggagcggggcagcgaggagatctgtgtgacagaggagaaggtggccgagctgaagcagacaggcaagacagacatcagcccccgggagaatgagctggaggagaccagcaccagccggcagacagacacccacctgatgcagagcggcagcaatgacttctctgctgtgcccagcctggacatccagaacatcagcagcgaggtgctgtccatgatgcacacccctgtggaggagaagagaaattctgagaaggaggtgagcagccacttcagccacttcaagatcagcagccagacccatgaaagtgacaagacagaggtgcagggcatccagagcccagatgtgcctgagcagttcagtgacatcaacctgagcaagagcctgccccaggagcagaagcccctggagatcaagccagccccctttgtgcgcagccgcttcaagaggcccaagcccaacctggcccgggccgccctgaagcgggagaccacagaaagtgagaagtacatctatgagaagaagtctgagaccaagaagatggagaccatcgtgatgcaggagaacaatgagcagacagacaccctgcccagccagcatgatgaggccagcctgatgatcagccgggagaaggacaccctgggccacagaaatgaggaggccgtcatcctgccctgcacccagacagaaagaaacctgagccccagcaacagctgtgagcccaaggaggagagccagagcgcccctgtgcagaagaatgattctgtggtgtctgtgggcaccaacaacgtgaacaccttccagcaggagatgaaggagagcgtcatccagacagcccggcaggtgcggggccgcctgcagaggccccggcccaacatcaggaagacaggccagaggcagatcgtggacaagggggaggccaagggcatcatcaaggagggccgcaccatcctgcccaaggatgaaacagagaagaaggtgctgactgtgagcaacagccagattgaaacagaaattgaggtgcccagcagcgctgtgcctgagcacaggatgtatgagaaccagagccaggtggtgctggtggagaacctgcacgtgaacaagaccaatgagaccatcagacatgagaacaagccctacgtgcccagcagcgcccagatgaccaggaggaagttccagaaggccaagcccaacctgggccgggcccacagcaagaaggaggagcctgtgctggagaaggtgaccacagaccagagcaaggagggcaagccagaggaccacctgctgcagaagggggccagcaacacccagctgctgctgaaggagaaggccgagctgctgaccagcctggaggtgtctgccaggaaggactgtgtgggcagcaaggagagcgccctggccaagattgatgctgagctggaggaggtgggccccagccggcgggtgggggaggagaccgtgggggacaacagccccagctctgtggtggaggagcagtacctgaacaagctgaccagctgcccccagcccctgaatgagaccagctacagcaagatcgccctggatggcaagaccaccatcagcagcaccagtgaatatgaaagaaacagaggagagcggcgcagccacaagaagttcaagcccaacgtgacccggggccggggcagcaagagggtgcggggcaagaccagcaagaaggagccccgggccagcaaggccatgctggtgaccctgcgggccagccaggaggaggatgatgatgctgatgactttgaaagtgactatgaggaggagagctaccacctggcccctgaggaggtgaacaaggcccctgtgtttgtgcctgtgggcctgcggagccctgagcctgtgtctgcccagatcgaggagaccatggaggagctggagatcaccgtgaatgtgcctgatgtgggctgcatcgctgtggtggagcacgagctgcccaacacagatgtgaccacagaggagatgaagcaggaggagaacctgtctgtgccctttgagatgaccaccagcgagcacatccaggatgagcccggggtgtgcatcatcccccacgtgcacagcaaggacaagagccacatccccagcagcctggacaacgtgaaccacaagatcgtgcatgagtgccaggagctgagcagccctgtgatcaccaccagccctgccagctttgaggagaacaagatcgtgctggaggagcagagcagccgggaggagatcagcctgatggagaaggtgaaggaaaatgccacccccaccaggaacaccatcagcaaggtgaccagcaacctgcgcatccgcagccggctggccaagcccaagcccaacctggagaagaccctgggcaccaaccggctggatgactaccaggaggtgagcagcctgtgtgtgaccaagggagctgagatggagacccagcgggagacagagaagaatgccagcaaggccacagagctggagaacaagaacctgggccctgtgaccacagctgagaacaaggaccagagcaagctggcctgtgtgcacggcatcaagggcaccagcatcagcagcgaggtgaacctgacagaaagaaatgaaaaccaggaggagagcagccaggaggtgcacatgctgtctgtggcccctgtggccagcagcgagaccggcccctgcaccctgggcctggaccggggcctgggagaaaattctgtggaggagccccagatcaaggacagcaaaggagacagcgtgctgaccctgcctgtgcctgagtacacccccaccagcatccctgaggtgcagcaggagaacatcatcaacccccaggacctgactgtgaacctggtggccaacgtgccccaggatggagaagatgagcaggccttcatcctgaccctggtggagatcccagccaatgctgtggaggagttcacagatgccacagcccagttcatgcccaaccccctgctgcctgcccccatcctggtgaagtctgtgaacacagaggagcggggggacatgagcatctgcctgcctgccacctctgtgggccaggatgccatgggcctgagcatcagcggccgggacaacagcaagaagcccccagacaacctggacctggtgtccaggaagcgcttccagtgccgcctggacaagaatgaccacatccccccagccaagaagaggagcctgaccctgagagatgactgccaggagtacaccacagaggtgcacagcaaggagctgaccaacgtgtttgaggagactggagagagccacaagggccaggacatcttcctgaccagcggcagcaccctgaccaccccagagccccagaggcagcaggtggaggccgccttccagagccggggcagccgcagcccagatgcctgcatggacaagaatgtgccccagctgccccaggatgagatgattgtgtctgacaaggaggagaggacagatgctgcccccaagagccagcagatggacagcaggaccagcagcagcaaggccagcctgagccggcccggccggcggcccctgggcttcctgagcctcatctgcagcaagaacagcctggagagtgatgagcccatgcaggtgcacagcaagaagaggctgaagcccctcatccctggcctgaggaagaagctgaagaggagcaaccccttcaatgaaagccaggagaagaaccgggagagcagtgacctgctgcccagccccagcgtcatcaccacccagagcgagaacatcagcagcagcgccacccagagccccttctag

SEQ ID NO: 288051 - DNA, 6399 bp, Artificial Sequence
  derived and/or modified sequence
atgagcagccggatcagcgacaccgagcggagccagaaggacgcccagacagtcgaagaagagtctcttacgctaagccgtgaggacgccgaacaggtggcgctagaagtcgacctgaatcagaaaaagcggagaaggaaaaagcaggatggcgctaacgagttgggcgtcaacaacctgttggagaatgccaccgtgcaggctggaccgtcgaaaggggaaaaacataaaaataagtgtcaggcgattagaccggaactcaaggagggtgagtgctccaaggaacagatgctctcctgtacccagaatattgacggcattgtgggcttcgccagtactgagaaagtagagaagagaacggatcccattttaagcctgagcaaccagcaggacgctacctctgtggccactgaatcgtcagaatccagcacctcggacctgccctcttttgaagttggtatcagggctctatgtgaggtgaataacgcggaagggtcatgtatcgaggaacggaatgtggacctcaaaaacaactcccttgaaatcgatcagaccgagaacgtcaagccaatgcttcgcgggcggttccaacgccccaagccaaacctaagtcgagctggcaagaaatctgtgctgtcccagggaaagactgagtccgagtctaaaaattcacactccaaaaccagcgtggagaaaaatcacgtcgagaaagataaaatgaacacccttgacattctgcggatggaaacgaccgaacgcgagaaccctgaggcggaaacagtatctgttctcggtgagaagaattgtttgcaagagggctcacaattgaaggcgctcagacccgtgcaggtgcgcggcaggctccagaagcccaagcccaacgccggaaaggcagctgaacggaaagaaatcctcatctctcaggaagagattggggctaacgtcgagaagaacgagaacgaaagctgcgccgaccgcgacacacctcagcatatggaggatcagtctcgcaaagattttgaggaagaggacgttatattacaaccagaaaaaaacgattctttccaaaacgttcagccagatgaacccaaggtgttgaacgagtgtctgagcgtgcaggaaaacaataaagcaaacaagctgaatcaagtgcctatcttgagaacccggtttcagaagccaaaacccaatattggacgcggaacgggacgcagggagatctcatctaaggaagaggtcctcgaaaaaatcctcgtgagcggagaaatggcggctgcgcttcgagagactgttaggcttgacacgtcccccaaagagatggttcccgcggagatcaacaccaaggagatgcaaagcgatctcaaagagacaggcaggagggctatttcccctcgggagaagattttggacgtgatcgacgatacaatcgagatggagacaggcctgaaagctatgggtagagaaatttgcctgcgcgagaagacaccagaggtgatagatgcgactgaggaaatcgataaagacttggaggaggcaggtcgccgcgagatatcgccccaaaagaatggaccagaggaggtcaagcctttaggggaagtggaaactgacttgaaggcaacaggcaatgaaagctccccgcgagagaaaacgccagaggtgactgatgctacagaggaaattgacaagaatttggaggagaccggcagacgcaaaatctccccgagagaaaatgggcccgaggaggtgaagcctgtggatgagatggaaactgatctcaacgctacgggacgggaatcaagtcctcgcgaaaaaactcccgaggtgatagatgcaacagaagagatcgatcttgaagagaccgagagagaagtctcgccacaggagaatggcctcgaagaagtgaagcccctcggcgagatggaaacagacttaaaggccactgggcgagacagctttccgagggggaagaccccagaagtcatagacgccatcgaggagatcgagatagatctcgaagaaaccgagcgcgaaatttcaccgcaagagaacggactagaagaggtgaagcctctcggagaaatgcagaccgacctgaaggcgactggacgggaaatttctccccgagagaaaactcccgaggtgatcgatgccaccgaggagatcgataaggacctcgaagaaacgggccgaagagaaatttctcccgaagagaacggccccgaggaagtgaaacctgtggatgagatggaaactgacttgaagaccacaggacgggagggaagcagccgcgagaagacacgggaagtcatcgacgccgcggaagtgatagagacagatttggaggaaactgaaagagaaatcagtccacaggaaaacggccctgaggaggtgaagccagtggggaagatggagaccgacctgaaggagatcagagaggagatttcccaacgggaaaaggttctggcggaattctcagccatccgggagaaggagatagatcttaaagagacaggaaagcgggacattccaatcatggaaaaggtgtcgggaaaaatggccgttgttgaggaaatggaagcagacctcaaggagacgggaaaggaaaatttccgtgagcgcggctcggaagaaatctgcgtgacggaggagaaggtcgccgaactgaagcagaccggtaaaactgatatttccccacgcgagaacgagctcgaggagacctctacctcacgacagactgatacccacctaatgcagagcgggtcaaacgacttttcagccgtgccttccctggacatccaaaatatcagctccgaggtgttgtctatgatgcatacgccggtcgaagagaagcgcaactctgagaaagaggtctcgtctcacttcagtcattttaaaatctccagccagacccacgagagcgacaagaccgaagtccaaggaatccaaagtccggacgtgcccgagcagttttctgatatcaacctgagcaagtctctgccgcaggaacaaaagcccctggaaatcaagccagccccttttgtacgaagtcgatttaagcggcccaagcccaacctggctcgggcggcactgaaacgcgagaccactgagtcagagaagtacatttacgaaaagaagtccgaaaccaaaaagatggagacaatcgtgatgcaggagaataatgagcagactgacactctaccaagccagcacgacgaagcatccctgatgataagccgggagaaagatacgctgggccacaggaacgaggaggctgttatactgccgtgtacccagacggaaagaaacctctcgcccagtaactcctgcgaacctaaagaggaatctcagagtgcccctgtccagaagaatgacagcgtagtgtccgtgggaactaacaacgttaacacctttcagcaagaaatgaaggaatccgtcatccaaactgctaggcaggttcggggacggttacagcgaccccgccccaacatccgcaaaacaggccagagacaaattgtcgataaaggagaggccaaaggcatcatcaaggaaggtcgcaccatactcccaaaggacgagactgagaaaaaagtactcaccgtcagtaacagccagattgagaccgaaattgaagtaccatcctctgcagtcccagagcatcgcatgtacgaaaaccagagccaggtcgttctggtcgaaaatctacatgttaataaaaccaacgagaccataagacacgagaataaaccctacgtccccagcagcgcacaaatgactcgtagaaagtttcagaaagctaaacccaacctcggcagagctcactctaagaaggaggaacctgtcctggagaaagttaccactgatcagtccaaggagggtaagccggaagaccacttacttcagaagggggcctcaaatactcagctgctcctgaaggagaaggccgaactcctgacctcgttagaagtaagtgcgaggaaagactgtgtgggttctaaggagagcgcccttgccaagatcgacgctgagctggaggaagtcggaccttctaggcgcgtaggcgaagaaaccgtgggcgacaactctccgtcgtcggtcgtagaggaacagtacctgaataagctgacctcttgccctcaaccactgaacgagacgtcctatagcaaaattgctctggacgggaaaaccaccattagctcaacctctgagtatgagcggaatcggggcgaaaggagaagccacaagaagttcaagcccaatgtcacgagaggacggggcagcaaacgggtgagggggaaaacctccaaaaaagagcctagagcttcaaaagctatgcttgttacactgcgggctagtcaggaggaggatgatgacgcggatgatttcgagagtgattacgaagaggagtcttaccacctagcccccgaggaggtcaacaaggccccagtgttcgttccagtcggcctacgtagcccagagcctgtctcggctcagatcgaagaaacaatggaagagcttgaaataaccgtgaacgtacctgacgtcggttgcatagctgtggtcgagcatgagctgccaaacacagatgtgaccaccgaagagatgaaacaggaggaaaaccttagcgtcccatttgaaatgaccacttctgagcatattcaagacgaaccaggggtttgtatcatcccccacgtgcattcaaaagataaatctcacattcccagcagtctagataatgtgaaccacaaaattgtacatgagtgccaggaactgagctcgcctgtaattacaacgagcccggcatccttcgaggaaaacaagattgttcttgaggaacagtcatcgagagaagagatctccctgatggagaaagtgaaagaaaacgctacgccaacaagaaacactatctccaaggtgacttccaatcttcgaatccggagtcgcctcgcaaagcctaagccaaatctggagaaaacccttggaacgaacaggttagatgattatcaagaggtcagttctctatgtgtgaccaagggtgctgagatggagacccaacgggagacagagaaaaacgccagtaaggcaaccgaacttgagaataagaatttggggccggtgacaactgccgagaataaagatcaaagcaagttggcctgcgtgcatggtatcaaagggacaagcatatcatcagaggttaatttgacggagcgcaacgagaaccaggaagagagctcccaggaagtccatatgctcagcgttgccccagttgcttccagtgaaactggaccgtgtactctgggcctggatcgcggcctgggagaaaattcagttgaggagccccaaatcaaagactccaagggagatagcgttctgactctcccagttccagaatatactcctacgagcattccagaagttcagcaggaaaacatcattaacccccaggatctgactgtaaacctggtggctaatgtgccccaggatggggaggacgagcaggcttttatcttaaccctggtggagatccccgcaaacgctgtcgaggaatttacagatgccactgcgcaattcatgccgaatcctttgttgcctgccccgattctggtgaagagcgtcaacaccgaagaacggggtgacatgtcaatatgtctccccgcaacatctgtgggtcaggatgccatgggcctatcgatcagcgggagggacaattccaagaaaccacctgacaatctggatttagtgtctagaaagcggttccaatgcagattggataaaaacgatcacatccccccggctaagaagcgtagcctgacgctgagagacgactgtcaggagtacacaaccgaggtccattctaaggaacttaccaacgttttcgaagaaactggagagtcacataagggccaagatatctttttaacctccggaagcacattgacaacaccagagccacagaggcagcaggtggaggcggctttccagtctaggggtagtcgctcccccgatgcatgcatggacaagaacgtgccacagctgccgcaggacgagatgatagtgtctgataaggaagagcgaactgacgccgctcccaaaagccagcagatggactctaggactagctcctccaaggcatccctctcccgtcccgggcggcgccccctgggctttctgtcactcatttgctctaagaattccttagagtccgatgagcccatgcaggtccatagtaaaaagaggcttaagcccctgatacccggacttcggaagaagctgaaacggagtaaccctttcaatgaaagccaagaaaaaaaccgtgaatcttctgacctgctcccctcccccagcgtcatcacaactcaatccgaaaacatcagctccagtgccactcagagtccgttttag

SEQ ID NO: 288052 - DNA, 6398 bp, Artificial Sequence
  derived and/or modified sequence
atgagcagccgtatcagtgacaccgaaagatcacagaaggacgcccagacagtggaggaagagagtctcacactctctcgtgaagacgcggaacaggtggctttggaagtcgacttgaatcagaaaaaaagacggaggaaaaaacaggatggagctaacgagctcggtgtaaataatctactggagaacgcaaccgtccaggctggtcctagtaagggcgaaaaacacaagaacaagtgtcaggcgatcaggcctgagctgaaagaaggagaatgctcgaaagaacagatgctaagctgtacacagaatattgacggcattgtgggattcgcatccacagagaaggtagaaaagaggactgacccaattctgtctctgtcaaatcaacaagacgctacttccgtggcaaccgagtcctccgagtcttccacttctgatttaccctcttttgaggtgggcatcagagccctctgcgaagtgaataacgcagagggatcctgtatagaggagagaaatgttgacctaaagaacaacagtctggagatcgaccaaacggaaaacgttaagccgatgctgcggggtcgattccaacggccaaaaccgaacctgagtcgtgcagggaagaaatctgtgctgtcccagggaaaaaccgagagtgagtctaagaatagccacagcaaaacaagcgtcgaaaaaaatcacgttgaaaaggataagatgaacaccctggacattctccggatggagacgacagaaagggaaaatcccgaagccgagactgtgagcgtgcttggcgagaaaaactgcctgcaggagggcagccaacttaaggctctgcggccagtgcaggtaagaggcagactccagaagccaaagcccaacgccggaaaggcagcagaacgtaaggaaattcttatatcccaggaagagattggtgccaacgtggagaagaacgagaacgaatcctgtgcggaccgggatactccccagcatatggaagatcagtcacgtaaagattttgaagaagaggacgtgattctgcagcccgagaagaatgacagctttcagaatgtacaacctgacgaaccgaaggtcctgaacgaatgcttgagcgtgcaagagaacaataaagcgaataaattaaatcaggtgccgatcctgagaaccaggttccagaaaccaaagcccaatatcgggaggggaacaggacgtcgggaaatctccagtaaagaagaggtcctcgagaagattttagtctctggcgaaatggctgcagctctgagggagacagtgaggctggacacatcccccaaagaaatggtgcccgcagagatcaacaccaaagaaatgcagtctgaccttaaggagacgggcaggagggccatttcccctcgagaaaagattcttgatgtcatagatgacaccatcgagatggagaccggtctgaaggccatgggaagggaaatttgcctgagggaaaaaacacccgaggtgatcgacgcaaccgaggagatcgacaaagatcttgaggaagccggacgaagagagatctcgccccagaagaacggccctgaggaagtcaagccattgggcgaggttgaaacagatctgaaggcgactgggaatgagtcatcgcctcgtgagaaaactccggaggtcacagacgcaaccgaggagattgacaaaaatctggaagagaccggacggagaaagatctctccccgagagaacggccctgaggaagtcaagccagttgatgaaatggagacagatctcaacgccacgggcagagagtcttctccgagggagaaaactccagaagtgattgatgcgacagaagaaatcgacctcgaggaaaccgaacgggaggtgtcccctcaggagaacggtttagaagaagttaagcccctgggggaaatggagaccgacttgaaagccactggtcgggactccttccctcgcggaaagactccagaagttatcgatgccatcgaagagatcgaaattgacctcgaggagacagagcgcgaaattagtccgcaggaaaacggtctcgaagaagttaaacccctgggggagatgcaaactgacctgaaggctaccggcagggaaatcagcccaagagagaagaccccagaagtcatcgacgccactgaagagattgacaaggacctagaagagacgggtaggagagagatcagccctgaggaaaacggcccagaggaagtaaagccagtggacgaaatggagacagacttgaagacgaccgggagggaggggtcaagccgcgagaaaactcgtgaggttatagacgctgctgaagtgatcgagaccgatctggaagaaacagagcgggagatcagtccacaggagaatggaccagaggaggtaaaacccgttgggaagatggaaaccgacttgaaggagattcgggaggagatttcacagcgcgagaaagttctggctgaattttccgccataagagagaaagagatcgacctgaaggagaccggaaaacgtgatattccgatcatggagaaggtgagtggcaagatggccgttgtcgaggagatggaggctgatctgaaagaaactggcaaggaaaactttagagagcgaggcagcgaagagatctgtgttaccgaagaaaaagtggccgaactcaaacagaccggtaagactgatattagtccaagggaaaatgaactggaagaaacttctaccagtaggcagaccgatacccatcttatgcagtcgggttctaatgatttttccgcagtgccctccctcgatatccagaatatcagttctgaagtcctgagcatgatgcacaccccggtggaggagaagcggaattccgaaaaagaggtatcctcacatttcagtcactttaagatctcctcccaaacccatgagagcgataaaacggaggtccaggggatccagtcccctgacgtacctgagcagttttcagacatcaatctgtctaagtcactcccacaggagcaaaagcccctggaaataaagcccgcaccattcgtcagatctagatttaagcgacctaaaccaaatttggctagggcagcactaaagcgtgagactaccgaatcagagaagtacatctatgagaagaagtctgaaactaagaagatggagactattgtaatgcaggagaacaacgaacagactgacacactgccgagtcagcatgatgaggcttcactaatgatcagccgcgaaaaagatactctgggccacaggaatgaggaggcggtgatcctcccttgcacacagaccgaacggaatctgtccccatccaatagctgcgaacccaaggaggagtcccagagtgcgccagtccagaagaacgactctgtggtttctgtgggaacaaacaatgtaaatactttccagcaggaaatgaaagagtcggttattcaaaccgctagacaggtgagaggccgtctccagcgccctaggcctaacataagaaagacgggacaacgccagatcgtagataaaggagaagcgaaaggaatcatcaaagaaggtagaactatcctgcctaaggacgagacagaaaagaaggtgcttactgtgtccaattctcagatcgagaccgaaatcgaggtccctagtagcgccgtgccggaacaccgcatgtatgaaaaccagagtcaggtcgtgctcgtagagaacctgcatgtgaacaagacaaacgagacaatcaggcacgagaacaaaccttacgtgccatcctctgcccagatgacccgaagaaagtttcagaaggcaaagccaaacctggggagagctcatagcaagaaggaggaaccggtcttggaaaaagtcaccacagatcaaagtaaggagggtaagcctgaagaccatctgttgcagaagggcgcatctaatacacagcttctcctgaaggagaaggccgagctgctgaccagcctggaagtgtctgcgagaaaggactgtgtcggctccaaggagtctgcattggccaagattgacgccgagctggaggaggtcggcccttctaggagggtcggtgaagagaccgtgggcgacaacagccctagctccgtggtggaagagcagtacttaaataagctgaccagctgtccccagccccttaacgagacaagttacagtaaaattgcactggacggcaaaacaacgataagctctaccagcgagtatgagcggaaccgtggagaacgtagaagtcataaaaaatttaagcccaacgttaccagaggcagaggctctaagcgggttagaggcaaaacgtccaagaaggagccaagggcatccaaggccatgttagtgaccctgagggccagccaggaagaagacgatgatgctgatgatttcgagtcagattatgaagaagagtcgtatcatctggcacccgaggaagtcaataaagctcctgtcttcgtcccggttggcttgagatccccagagccagtgtctgcacaaatcgaggagacaatggaggagctcgagatcaccgttaatgtacctgacgttggctgtattgcagttgtggagcatgagcttccaaacactgatgtgactaccgaggagatgaagcaggaggagaacttgagcgttccttttgagatgacaacttctgagcatatccaggacgagccgggagtgtgcatcataccccacgttcactccaaggacaagagtcacatcccatccagcctggacaacgtaaaccataaaatcgttcatgagtgccaggagctttccagtcccgtgatcacaacatctcccgctagcttcgaagaaaacaagattgtcttagaggagcagtcttcgcgggaagagatatctctaatggagaaggtcaaggaaaacgcaacccccacccgcaacactatttctaaagtgacgtcaaatctccgcatcagaagtcggttggccaaacctaaacctaacctcgagaagacactcggaactaatcgcttagatgattatcaggaggtaagcagcctttgcgtcacaaaaggcgctgagatggagacccaaagggagactgaaaagaatgcctcaaaggcaacagagctagaaaacaagaacctgggcccagttacaaccgctgagaacaaagaccagtcaaagctggcctgtgtacacgggattaagggcaccagcattagctcagaagtcaacctgaccgaacgcaatgaaaatcaggaagagtcaagtcaggaggtgcacatgcttagtgtggctccagtggctagctctgagaccggcccatgcacacttggcttggatcgcggactgggcgaaaactccgtggaggagccccagatcaaagatagcaagggcgatagcgttcttaccctgcccgtccccgagtatacaccaacctctatacccgaagtccagcaggaaaacattattaaccctcaggacttaactgtgaacctggtggcaaatgtgccccaagacggagaggacgaacaggctttcatcctcactcttgtggagattccagccaatgccgtggaggaattcacagacgccaccgcccagttcatgcctaaccctttgctgcccgctcccattctggtgaagagcgtgaatacagaagaaaggggggacatgtcgatctgccttcctgccacttccgttggtcaggatgctatgggcctgagtatctccggcagggataacagcaagaagccccctgacaacctggacctggttagtcgaaagaggtttcaatgcaggctggataaaaatgaccacattcctcctgccaaaaaaaggtcactcactctgagggacgactgtcaggagtacaccacagaggtacatagtaaagagctgacaaatgttttcgaggaaacaggcgaatcccacaaaggtcaggacattttcctcaccagcggctcgactctgacaaccccagagccccagcgccagcaggttgaggccgctttccagagccgcggttctcgttctccagacgcttgcatggataaaaatgttcctcagctgccacaggacgaaatgatagtatctgataaggaggagcgaaccgatgccgcacctaagagtcagcagatggattctcgtacaagttccagtaaagccagtctgtctagacctggtcgtagacccctggggttcttgtcactgatctgttccaaaaactctctggaaagcgacgaacctatgcaggttcatagtaagaaacgccttaagccacttattccgggtctgagaaagaagctgaagaggtccaacccatttaacgaaagtcaggagaaaaaccgcgagtccagtgacctgctcccatccccttccgtgatcactacccagtccgagaatatcagtagcagtgcaacacaatctccttttta

SEQ ID NO: 288053 - DNA, 7919 bp, Artificial Sequence
  derived and/or modified sequence
agttgcggcgtcctgtgagcgcggggatgctgggaggagggtgaaatttagccatcggtgtgtggcagggtcatgaaaaagcggcggcggcgggagagaggaggaggcggcggcggggcagtgaaactacggtagctgccccctgagctggtggtgtggctttgtggggagggcgtagttcctaatcccctttccgggcagccgccggggctcggggctgtgagcggccgtgaggctgcctccccgggccccctgcctccgccatgttccgcagggcacgccttagcgtgaagccgaatgtcaggcctggtgtaggcgccaggggctccacagcttccaatccccagcgtggacgggagtctcccaggccgccggatcctgccacggactctgcttccaagcccgcggagcccacagatgtgcccacagtcgatttcggtggagcggagccccaagaaaaggctcctaggagcagtactgaaaagactggtggtgacaatgatgttgaagaatccagtagatcttcctctactgtttcacagagaagaaagcgaatatcaagtacttctagcctggttaagtctagtgtcagtgttccttcagaatctcatcccttatctacaattaatcaagaggctccacagccaactgccacttcaacaaaagagaaacagccatgctcagacagataccgaatatacaaagcccagaaactgagggaaatgttaaaagaagaattgagaaaagagaagaaacaatggaaaaacaaatatgctataaatgaaagtcagaggccaccagatcgttcaaaaatgactatgagagacttcatatattatctaccagataataatccaatgacttcttcactggaacaagaaaagaaaactgaaaagccatcgactccagtccagacaagagagcaagaaggtaagagtactcctaatgctgaagataatgaaatggaagaagagacagatgatgggccattactggttcctcgagtaaaagtggcagaagatggttccattattttggatgaagaaagtttaactgtagaagttttaagaacaaaaggcccttgtgttgttgaagaaaatgaccccatatttgagcgcggttctacaactacatactccagctttaggaaaaactattactctaaaccatggtcaaataaagaaacagatatgttttttttagccatcagcatggtaggaactgacttttctatgatcggacaactttttcctcacagagcaaggatagaaattaagaataaatttaaacgggaagagaaaacaaatggatggagaatagacaaagcattccaggaaaagcgcccttttgacttcgatttttttgctcatttgcttcagaaagttcttgctgaagaagagaaaagaaaacaaaaatctgttaaaaatcacagtttaaaggagaagaaatccaccaaaccacggaaaaatgtaaaagtgaaaaaagttgcctgtgaaggagtgaataatgatccagatgagtctatgagttctagaatttcagacacggaaagatctcagaaggatgctcagacagttgaagaagagtctctgaccttatcaagggaggatgcagagcaggttgcattagaagtagacctaaatcaaaagaaaagaaggaggaagaagcaagatggagctaatgaactgggagtaaacaatcttttagaaaatgccactgttcaggcgggtccttctaaaggagaaaaacacaagaataaatgtcaggctataaggcctgagctaaaggaaggtgaatgcagtaaggagcagatgctttcctgcacacaaaacatagatggcattgtgggttttgcctccactgaaaaagttgagaaaagaactgaccccatcctttcattaagtaatcaacaagatgccacatcagtagcaactgagtcttcagaatcaagcacttcagatttgccttcattcgaagttggaattagagcattgtgtgaggtgaataatgctgagggtagttgtatagaagaaagaaatgttgacctaaaaaataattcactggaaattgatcaaacagaaaatgttaaaccaatgttgagaggtcgcttccaaagacctaaacccaatttgtcaagggctgggaagaaatcagttctttcacaaggcaaaacagagtcagagagcaagaattcacattcaaaaacttcagttgaaaagaaccacgtggaaaaagataaaatgaatacattggacattttgagaatggagactacagagagagagaatccagaagctgaaactgtatctgttttgggtgaaaaaaattgtctgcaggaagggagtcaactaaaggctttaagacctgtacaagtgaggggccgattgcaaaagccaaagccaaatgcaggtaaagctgctgaaagaaaagaaattctcatatcacaggaagaaattggggccaatgtagagaagaatgaaaatgaatcctgtgctgatagagatactcctcaacacatggaagatcaatcgcgtaaagattttgaagaggaagatgtcatattacagcctgagaaaaatgattcttttcaaaatgtgcagccagatgagcccaaggttcttaatgaatgtctaagcgttcaagagaataataaggcaaataaacttaaccaagtcccaattctaaggactcgatttcagaaaccaaagccaaatataggaagaggaactggaaggagagaaatttcctcaaaggaagaggtactagagaagattcttgtctctggggaaatggcggcagcattgagagaaactgtaagactagacacctcaccaaaggagatggtaccagcagagattaatactaaagaaatgcagtcagatttaaaagaaactggaagaagagccatttctcccagggagaagattctagatgtgattgatgacaccatagaaatggagacaggtctgaaagcaatgggaagagagatttgtctaagggagaagacgccagaggtgattgatgccactgaggaaatagacaaagatttggaagaagctggaagaagagaaatatccccacagaaaaatggcccagaggaggttaagcctctaggtgaagtggagacagatttgaaagcaactggaaatgagagttccccaagggagaagacaccagaggtgactgatgccactgaggaaatagacaaaaatttggaagaaactggaagaagaaaaatatccccaagggaaaatggcccagaggaggtcaagcctgtagatgaaatggagacagatttgaacgcaactggaagagagagttctccaagggagaagacaccagaggtgattgatgctactgaggaaatagatttggaagaaactgaaagagaagtatccccacaggaaaatggactagaggaggtcaagcctctaggtgaaatggagacggatttgaaagcaactggaagagacagtttcccaagggggaagacaccagaggtgattgatgccattgaggaaatagagatagatttggaagaaactgaaagagaaatatccccacaggaaaatggcctagaggaggttaagcctctaggtgaaatgcaaacagatttgaaagcaaccggaagggagatttccccaagggagaagacaccagaggtgattgatgccactgaggaaatagacaaagatctggaagaaactggaagaagagaaatatccccagaggaaaatggcccagaggaggtcaagcctgtagatgaaatggagacagacttgaaaacaactggaagagagggttcctcaagggagaagacacgagaggtgattgatgctgctgaggtaatagagacagatttggaagaaactgaaagagaaatatcgccacaggaaaatggcccagaggaggtcaagcctgtaggtaaaatggagacagatttgaaagaaattagagaagaaatttcccaaagggaaaaggtgctagcagagttcagtgctataagggaaaaggagattgatttgaaagaaactggaaaaagagacattcccatcatggagaaagtatcaggaaagatggctgttgttgaagaaatggaggcagatttgaaagaaactggaaaagaaaattttagagagagaggatctgaagagatctgtgttactgaggaaaaggtggcagaattgaaacaaactggaaaaacagacatttctccaagggaaaacgagctagaggagaccagtacctcaagacaaactgacacacatttaatgcagagcggtagcaatgacttcagtgctgtgccttcactagatattcagaacattagcagtgaagtactgtcgatgatgcatacacctgtagaagaaaaaagaaattctgaaaaagaagtatcaagtcacttcagtcatttcaagatttcttcacagactcatgaatctgataaaacagaagtccaggggattcaatctccagatgttccagagcagttttcagatattaatttaagcaaatctcttcctcaagaacagaagccacttgaaattaaaccagcaccttttgtgaggagccgattcaaaagaccaaaaccaaacttagcaagagcagctttgaagagagagactacagaatcagaaaaatatatatatgagaagaaatcagaaaccaagaaaatggagactattgtgatgcaagaaaataatgaacaaactgatactctcccttctcaacatgatgaagcttccctaatgatatcaagagaaaaagacacattaggtcacaggaatgaggaggctgtgatattgccatgtacacagactgaaaggaacctttcaccttcaaattcttgtgaacctaaagaggagtctcagtcagcaccagtccagaaaaatgactcagttgtttctgtggggactaataatgtaaacactttccagcaagaaatgaaggaaagtgttatccaaactgctcgacaagtaaggggccgacttcagagaccgagaccaaatataagaaagacaggacagaggcaaatagtagacaaaggtgaagccaaaggcataattaaggaaggaagaacgatattaccaaaagatgaaactgaaaagaaagtcttaactgtgtcaaattctcaaattgaaactgaaattgaagttccatcgtccgcagttccagaacacagaatgtatgaaaatcaaagtcaggtggttcttgtagaaaaccttcatgttaacaaaacaaatgaaacaatcagacatgaaaataaaccgtatgttcctagttcagcacaaatgacaagaaggaaattccaaaaggctaagccaaatttgggaagagcacacagtaagaaagaggaaccagttttagaaaaagtcacaacagatcagagcaaggaaggcaagccagaagatcatttgctgcagaaaggagcttccaacacccagctccttctaaaagaaaaagctgagcttctgacatctctggaggtttcagcaagaaaagattgtgtaggttccaaagagtctgctttggcaaaaatagatgcggaattagaagaagttggaccatcaagaagggttggagaggaaactgtaggagataattcaccatcttcagttgttgaagagcaatatctcaataaactaacaagctgtccacaaccgttaaacgaaacaagttactctaaaattgccctggatgggaaaacaactatctcttctacatctgagtatgagagaaatcgtggtgaaaggagaagtcataaaaagttcaaaccaaatgtcaccagaggtcgtggatcaaaacgagttcggggtaagacctctaagaaggaacctagagcttccaaggccatgctggtgactcttcgggcttcccaggaagaagatgatgatgctgacgattttgagtctgactatgaggaagaaagctatcatcttgctcccgaagaagtaaacaaagctccagtatttgtacctgttggtctcagatctcctgaacctgtttctgctcagattgaggaaacaatggaagagcttgaaataactgtgaatgtcccagatgtaggatgcatagctgttgttgaacatgagctaccaaacacagatgtgactactgaagaaatgaaacaagaagaaaatttgagtgtaccgtttgaaatgaccacaagtgaacatatccaagatgaaccaggagtatgtataattcctcatgttcattcaaaggataaaagccatattccttctagcctagataatgtaaatcacaaaattgttcatgaatgtcaggaactttcttcacctgtcattactacatctcctgcatcatttgaagaaaacaagattgtattggaggaacaaagttccagagaagaaataagtttaatggagaaagtaaaggagaatgctacaccaaccaggaatacaatttctaaagtgaccagtaatttgagaataagaagtaggcttgctaagcctaaaccaaatcttgagaagactttagggaccaacaggcttgatgattatcaggaagtttccagtttgtgtgtaaccaaaggggcagaaatggaaactcaaagagaaacagagaaaaatgcttccaaagcaacagaattggaaaataaaaacctcggaccagttacaacagcagagaataaggatcagagcaaattggcatgtgtacatggtatcaaagggaccagtatttcttcagaagtaaacctaactgaaagaaacgaaaatcaagaagagagctctcaggaggttcacatgttgtcagttgctccagttgcttcctctgagacagggccctgcacacttggtttggataggggtcttggtgaaaattctgttgaagagccccagataaaggactctaaaggagacagtgtgcttacacttcctgtgccagagtatacaccaacaagtattccagaagtccaacaagagaatataatcaatcctcaagacctaacagtgaatctagttgctaatgtacctcaagatggagaagatgaacaagcctttattttaactctggtggaaatcccagccaatgcagtagaagaatttactgatgccactgcacagttcatgccaaaccctttactgccagctcccatattggtcaaatcagtgaataccgaagaaaggggtgacatgagtatttgtttaccagcaacttcagttggtcaagatgccatgggtttatctatttctggaagagataattctaaaaagccgcctgataatttggatcttgtatctaggaagagatttcaatgcaggcttgataaaaatgaccacattcctcctgccaaaaaacgttcactcactttaagagatgactgtcaagaatataccactgaggtgcactcaaaggaattaacaaatgtttttgaggaaacaggggagtctcacaagggacaagatatttttcttacctcaggaagcacactgacaactccagaacctcaaagacagcaagttgaagcagcttttcagagtagaggatctagatctcctgatgcatgcatggacaagaatgtgcctcagttacctcaggatgaaatgattgtgtctgataaggaagaaagaactgatgctgctcctaagtctcagcaaatggatagcagaacatcgtcttctaaagcctcactatccagacctggcagaagacccctgggatttttatctttaatatgctcaaagaatagtttggagtctgatgaacctatgcaagtccatagtaagaaacgcctaaaacctcttatacctggattaagaaagaaattgaaaagatctaatccattcaatgaaagccaggaaaaaaatcgagagtcctctgatctgcttccatctccaagtgttattactactcaatctgagaatattagcagctcagcaactcagtctcctttt

SEQ ID NO: 288054 - DNA, 6399 bp, Artificial Sequence
  derived and/or modified sequence
atgagcagcagaatcagcgacaccgagagaagccagaaggacgcccagaccgtggaggaggagagcctgaccctgagcagagaggacgccgagcaggtggccctggaggtggacctgaaccagaagaagagaagaagaaagaagcaggacggcgccaacgagctgggcgtgaacaacctgctggagaacgccaccgtgcaggccggccccagcaagggcgagaagcacaagaacaagtgccaggccatcagacccgagctgaaggagggcgagtgcagcaaggagcagatgctgagctgcacccagaacatcgacggcatcgtgggcttcgccagcaccgagaaggtggagaagagaaccgaccccatcctgagcctgagcaaccagcaggacgccaccagcgtggccaccgagagcagcgagagcagcaccagcgacctgcccagcttcgaggtgggcatcagagccctgtgcgaggtgaacaacgccgagggcagctgcatcgaggagagaaacgtggacctgaagaacaacagcctggagatcgaccagaccgagaacgtgaagcccatgctgagaggcagattccagagacccaagcccaacctgagcagagccggcaagaagagcgtgctgagccagggcaagaccgagagcgagagcaagaacagccacagcaagaccagcgtggagaagaaccacgtggagaaggacaagatgaacaccctggacatcctgagaatggagaccaccgagagagagaaccccgaggccgagaccgtgagcgtgctgggcgagaagaactgcctgcaggagggcagccagctgaaggccctgagacccgtgcaggtgagaggcagactgcagaagcccaagcccaacgccggcaaggccgccgagagaaaggagatcctgatcagccaggaggagatcggcgccaacgtggagaagaacgagaacgagagctgcgccgacagagacaccccccagcacatggaggaccagagcagaaaggacttcgaggaggaggacgtgatcctgcagcccgagaagaacgacagcttccagaacgtgcagcccgacgagcccaaggtgctgaacgagtgcctgagcgtgcaggagaacaacaaggccaacaagctgaaccaggtgcccatcctgagaaccagattccagaagcccaagcccaacatcggcagaggcaccggcagaagagagatcagcagcaaggaggaggtgctggagaagatcctggtgagcggcgagatggccgccgccctgagagagaccgtgagactggacaccagccccaaggagatggtgcccgccgagatcaacaccaaggagatgcagagcgacctgaaggagaccggcagaagagccatcagccccagagagaagatcctggacgtgatcgacgacaccatcgagatggagaccggcctgaaggccatgggcagagagatctgcctgagagagaagacccccgaggtgatcgacgccaccgaggagatcgacaaggacctggaggaggccggcagaagagagatcagcccccagaagaacggccccgaggaggtgaagcccctgggcgaggtggagaccgacctgaaggccaccggcaacgagagcagccccagagagaagacccccgaggtgaccgacgccaccgaggagatcgacaagaacctggaggagaccggcagaagaaagatcagccccagagagaacggccccgaggaggtgaagcccgtggacgagatggagaccgacctgaacgccaccggcagagagagcagccccagagagaagacccccgaggtgatcgacgccaccgaggagatcgacctggaggagaccgagagagaggtgagcccccaggagaacggcctggaggaggtgaagcccctgggcgagatggagaccgacctgaaggccaccggcagagacagcttccccagaggcaagacccccgaggtgatcgacgccatcgaggagatcgagatcgacctggaggagaccgagagagagatcagcccccaggagaacggcctggaggaggtgaagcccctgggcgagatgcagaccgacctgaaggccaccggcagagagatcagccccagagagaagacccccgaggtgatcgacgccaccgaggagatcgacaaggacctggaggagaccggcagaagagagatcagccccgaggagaacggccccgaggaggtgaagcccgtggacgagatggagaccgacctgaagaccaccggcagagagggcagcagcagagagaagaccagagaggtgatcgacgccgccgaggtgatcgagaccgacctggaggagaccgagagagagatcagcccccaggagaacggccccgaggaggtgaagcccgtgggcaagatggagaccgacctgaaggagatcagagaggagatcagccagagagagaaggtgctggccgagttcagcgccatcagagagaaggagatcgacctgaaggagaccggcaagagagacatccccatcatggagaaggtgagcggcaagatggccgtggtggaggagatggaggccgacctgaaggagaccggcaaggagaacttcagagagagaggcagcgaggagatctgcgtgaccgaggagaaggtggccgagctgaagcagaccggcaagaccgacatcagccccagagagaacgagctggaggagaccagcaccagcagacagaccgacacccacctgatgcagagcggcagcaacgacttcagcgccgtgcccagcctggacatccagaacatcagcagcgaggtgctgagcatgatgcacacccccgtggaggagaagagaaacagcgagaaggaggtgagcagccacttcagccacttcaagatcagcagccagacccacgagagcgacaagaccgaggtgcagggcatccagagccccgacgtgcccgagcagttcagcgacatcaacctgagcaagagcctgccccaggagcagaagcccctggagatcaagcccgcccccttcgtgagaagcagattcaagagacccaagcccaacctggccagagccgccctgaagagagagaccaccgagagcgagaagtacatctacgagaagaagagcgagaccaagaagatggagaccatcgtgatgcaggagaacaacgagcagaccgacaccctgcccagccagcacgacgaggccagcctgatgatcagcagagagaaggacaccctgggccacagaaacgaggaggccgtgatcctgccctgcacccagaccgagagaaacctgagccccagcaacagctgcgagcccaaggaggagagccagagcgcccccgtgcagaagaacgacagcgtggtgagcgtgggcaccaacaacgtgaacaccttccagcaggagatgaaggagagcgtgatccagaccgccagacaggtgagaggcagactgcagagacccagacccaacatcagaaagaccggccagagacagatcgtggacaagggcgaggccaagggcatcatcaaggagggcagaaccatcctgcccaaggacgagaccgagaagaaggtgctgaccgtgagcaacagccagatcgagaccgagatcgaggtgcccagcagcgccgtgcccgagcacagaatgtacgagaaccagagccaggtggtgctggtggagaacctgcacgtgaacaagaccaacgagaccatcagacacgagaacaagccctacgtgcccagcagcgcccagatgaccagaagaaagttccagaaggccaagcccaacctgggcagagcccacagcaagaaggaggagcccgtgctggagaaggtgaccaccgaccagagcaaggagggcaagcccgaggaccacctgctgcagaagggcgccagcaacacccagctgctgctgaaggagaaggccgagctgctgaccagcctggaggtgagcgccagaaaggactgcgtgggcagcaaggagagcgccctggccaagatcgacgccgagctggaggaggtgggccccagcagaagagtgggcgaggagaccgtgggcgacaacagccccagcagcgtggtggaggagcagtacctgaacaagctgaccagctgcccccagcccctgaacgagaccagctacagcaagatcgccctggacggcaagaccaccatcagcagcaccagcgagtacgagagaaacagaggcgagagaagaagccacaagaagttcaagcccaacgtgaccagaggcagaggcagcaagagagtgagaggcaagaccagcaagaaggagcccagagccagcaaggccatgctggtgaccctgagagccagccaggaggaggacgacgacgccgacgacttcgagagcgactacgaggaggagagctaccacctggcccccgaggaggtgaacaaggcccccgtgttcgtgcccgtgggcctgagaagccccgagcccgtgagcgcccagatcgaggagaccatggaggagctggagatcaccgtgaacgtgcccgacgtgggctgcatcgccgtggtggagcacgagctgcccaacaccgacgtgaccaccgaggagatgaagcaggaggagaacctgagcgtgcccttcgagatgaccaccagcgagcacatccaggacgagcccggcgtgtgcatcatcccccacgtgcacagcaaggacaagagccacatccccagcagcctggacaacgtgaaccacaagatcgtgcacgagtgccaggagctgagcagccccgtgatcaccaccagccccgccagcttcgaggagaacaagatcgtgctggaggagcagagcagcagagaggagatcagcctgatggagaaggtgaaggagaacgccacccccaccagaaacaccatcagcaaggtgaccagcaacctgagaatcagaagcagactggccaagcccaagcccaacctggagaagaccctgggcaccaacagactggacgactaccaggaggtgagcagcctgtgcgtgaccaagggcgccgagatggagacccagagagagaccgagaagaacgccagcaaggccaccgagctggagaacaagaacctgggccccgtgaccaccgccgagaacaaggaccagagcaagctggcctgcgtgcacggcatcaagggcaccagcatcagcagcgaggtgaacctgaccgagagaaacgagaaccaggaggagagcagccaggaggtgcacatgctgagcgtggcccccgtggccagcagcgagaccggcccctgcaccctgggcctggacagaggcctgggcgagaacagcgtggaggagccccagatcaaggacagcaagggcgacagcgtgctgaccctgcccgtgcccgagtacacccccaccagcatccccgaggtgcagcaggagaacatcatcaacccccaggacctgaccgtgaacctggtggccaacgtgccccaggacggcgaggacgagcaggccttcatcctgaccctggtggagatccccgccaacgccgtggaggagttcaccgacgccaccgcccagttcatgcccaaccccctgctgcccgcccccatcctggtgaagagcgtgaacaccgaggagagaggcgacatgagcatctgcctgcccgccaccagcgtgggccaggacgccatgggcctgagcatcagcggcagagacaacagcaagaagccccccgacaacctggacctggtgagcagaaagagattccagtgcagactggacaagaacgaccacatcccccccgccaagaagagaagcctgaccctgagagacgactgccaggagtacaccaccgaggtgcacagcaaggagctgaccaacgtgttcgaggagaccggcgagagccacaagggccaggacatcttcctgaccagcggcagcaccctgaccacccccgagccccagagacagcaggtggaggccgccttccagagcagaggcagcagaagccccgacgcctgcatggacaagaacgtgccccagctgccccaggacgagatgatcgtgagcgacaaggaggagagaaccgacgccgcccccaagagccagcagatggacagcagaaccagcagcagcaaggccagcctgagcagacccggcagaagacccctgggcttcctgagcctgatctgcagcaagaacagcctggagagcgacgagcccatgcaggtgcacagcaagaagagactgaagcccctgatccccggcctgagaaagaagctgaagagaagcaaccccttcaacgagagccaggagaagaacagagagagcagcgacctgctgcccagccccagcgtgatcaccacccagagcgagaacatcagcagcagcgccacccagagccccttctag

SEQ ID NO: 288055 - protein, 409 aa, Artificial Sequence
  derived and/or modified sequence
MKNASPETREGVIRESYLKGHDQLVPVTLLAIAVILAFVMGAVFSGITVYCVCDHRRKDVAVVQRKEKELTHSRRGSMSSVTKLSGLFGDTQSKDPKPEAILTPLMHNGKLATPGNTAKMLIKADQHHLDLTALPTPESTPTLQQKRKPSRGSREWERNQNLINACTKDMPPMGSPVIPTDLPLRASPSHIPSVVVLPITQQGYQHEYVDQPKMSEVAQMALEDQAATLEYKTIKEHLSSKSPNHGVNLVENLDSLPPKVPQREASLGPPGASLSQTGLSKRLEMHHSSSYGVDYKRSYPTNSLTRSHQATTLKRNNTNSSNSSHLSRNQSFGRGDNPPPAPQRVDSIQVHSSQPSGQAVTVSRQPSLNAYNSLTRSGLKRTPSLKPDVPPKPSFAPLSTSMKPNDACT

SEQ ID NO: 288056 - protein, 494 aa, Artificial Sequence
  derived and/or modified sequence
MPQLDSGGGGAGGGDDLGAPDELLAFQDEGEEQDDKSRDSAAGPERDLAELKSSLVNESEGAAGGAGIPGVPGAGAGARGEAEALGREHAAQRLFPDKLPEPLEDGLKAPECTSGMYKETVYSAFNLLMHYPPPSGAGQHPQPQPPLHKANQPPHGVPQLSLYEHFNSPHPTPAPADISQKQVHRPLQTPDLSGFYSLTSGSMGQLPHTVSWFTHPSLMLGSGVPGHPAAIPHPAIVPPSGKQELQPFDRNLKTQAESKAEKEAKKPTIKKPLNAFMLYMKEMRAKVIAECTLKESAAINQILGRRWHALSREEQAKYYELARKERQLHMQLYPGWSARDNYGKKKRRSREKHQESTTDPGSPKKCRARFGLNQQTDWCGPCRRKKKCIRYLPGEGRCPSPVPSDDSALGCPGSPAPQDSPSYHLLPRFPTELLTSPARHLHPQVSPLLSASQPQGPHRPPAAPCRAHRYSNRNLRDRWPSRHRTPGRLQEPTP

SEQ ID NO: 288057 - protein, 268 aa, Artificial Sequence
  derived and/or modified sequence
MYKETVYSAFNLLMHYPPPSGAGQHPQPQPPLHKANQPPHGVPQLSLYEHFNSPHPTPAPADISQKQVHRPLQTPDLSGFYSLTSGSMGQLPHTVSWFTHPSLMLGSGVPGHPAAIPHPAIVPPSGKQELQPFDRNLKTQAESKAEKEAKKPTIKKPLNAFMLYMKEMRAKVIAECTLKESAAINQILGRRWHALSREEQAKYYELARKERQLHMQLYPGWSARDNYGKKKRRSREKHQESTTDPGSPKKCRARFGLNQQTDWCGPCR

SEQ ID NO: 288058 - protein, 481 aa, Artificial Sequence
  derived and/or modified sequence
MPQLDSGGGGAGGGDDLGAPDELLAFQDEGEEQDDKSRDSAAGPERDLAELKSSLVNESEGAAGGAGIPGVPGAGAGARGEAEALGREHAAQRLFPDKLPEPLEDGLKAPECTSGMYKETVYSAFNLLMHYPPPSGAGQHPQPQPPLHKANQPPHGVPQLSLYEHFNSPHPTPAPADISQKQVHRPLQTPDLSGFYSLTSGSMGQLPHTVSWFTHPSLMLGSGVPGHPAAIPHPAIVPPSGKQELQPFDRNLKTQAESKAEKEAKKPTIKKPLNAFMLYMKEMRAKVIAECTLKESAAINQILGRRWHALSREEQAKYYELARKERQLHMQLYPGWSARDNYGKKKRRSREKHQESTTDPGSPKKCRARFGLNQQTDWCGPCRRKKKCIRYLPGEGRCPSPVPSDDSALGCPGSPAPQDSPSYHLLPRFPTELLTSPAEPAPTSPGLSTALSLPTPGPPQAPRSTLQSTQVQQQESQRQVA

SEQ ID NO: 288059 - protein, 366 aa, Artificial Sequence
  derived and/or modified sequence
MYKETVYSAFNLLMHYPPPSGAGQHPQPQPPLHKANQPPHGVPQLSLYEHFNSPHPTPAPADISQKQVHRPLQTPDLSGFYSLTSGSMGQLPHTVSWFTHPSLMLGSGVPGHPAAIPHPAIVPPSGKQELQPFDRNLKTQAESKAEKEAKKPTIKKPLNAFMLYMKEMRAKVIAECTLKESAAINQILGRRWHALSREEQAKYYELARKERQLHMQLYPGWSARDNYGKKKRRSREKHQESTTDPGSPKKCRARFGLNQQTDWCGPCRRKKKCIRYLPGEGRCPSPVPSDDSALGCPGSPAPQDSPSYHLLPRFPTELLTSPAEPAPTSPGLSTALSLPTPGPPQAPRSTLQSTQVQQQESQRQVA

SEQ ID NO: 288060 - DNA, 1485 bp, Artificial Sequence
  derived and/or modified sequence
atgccacagctcgattccggtggtggcggcgccggaggcggtgatgatctgggtgccccggatgagctccttgccttccaggacgagggggaagaacaggacgataagtctcgggactctgccgccgggccggaacgcgatctcgcagaactgaaatcaagtctggtgaacgagtcagagggggccgcagggggcgccggcattcctggcgtgcccggggccggagcaggcgcacggggggaagccgaggccctgggcagggagcatgcggcccagcgtctattcccagataagttgcctgagccactggaggatgggttgaaagctcctgagtgcacctcaggaatgtacaaggagactgtgtactctgctttcaatctcctgatgcactatccaccaccttccggcgccggccagcatcctcagccccagcctcccttgcataaagcaaaccaacctcctcacggagttccacaactgtcattgtatgagcattttaacagtccgcatcctacgcccgcgccagccgatatctcacaaaagcaggtccataggcccttacagaccccggacttgtcgggattttatagcctgaccagtggtagtatgggtcagctgccgcacaccgtctcctggttcacacatccatccctgatgctgggcagcggtgttcccggtcaccctgctgctattccccaccccgcaattgtaccgccttctgggaaacaagaactgcagccttttgacagaaacctgaagacccaagctgagtctaaggccgaaaaggaggccaagaagcccaccattaaaaaacctttaaacgcctttatgttgtacatgaaggagatgcgcgccaaggttattgccgagtgcaccctcaaggaaagcgcagccataaaccagatattagggagacggtggcacgctctttctagagaggagcaggcgaagtattacgaactggcccgcaaggagcggcagttacacatgcaattatatccaggctggtccgctcgtgacaactacggcaaaaaaaagaggaggtcaagggaaaaacaccaagaatctacaactgatccggggtctcccaaaaagtgtagggctaggtttgggcttaaccaacaaacagattggtgcggtccgtgtcgacggaaaaagaaatgcatccgatatctccccggcgaggggcggtgtcccagtcctgtgcccagcgatgactccgcacttgggtgtcctggcagcccagccccacaggactccccttcctaccacttgctccctagattcccgacagaactactgacctcgcctgcgaggcatttgcatccacaagtttcccctctattgtccgccagccaaccacagggcccgcatcggccccctgccgcaccatgtagggctcaccggtactcgaatagaaatctgagagatagatggcctagtcggcaccggacaccagggagactccaggagcctactccctag

SEQ ID NO: 288061 - DNA, 1446 bp, Artificial Sequence
  derived and/or modified sequence
atgccccagttggactctggcggcggcggcgcgggtggaggcgacgatttaggcgctcctgatgagctactggcttttcaagacgagggtgaagaacaggacgacaagtccagagacagcgcggcagggcctgagcgggacttggctgaactgaagtcctcactcgtaaatgagtcggaaggggccgcaggaggggccgggatcccaggagtgcccggggcaggcgcgggggcccggggtgaggccgaggctctcgggagggaacatgccgcacagcgcctgttcccagacaaacttccagaaccgctcgaagacggcctgaaagcgcctgaatgtacatctgggatgtacaaggagacagtgtattcagcttttaatctgcttatgcactatccgccgccttcaggtgcgggccaacacccacaaccacagcctcccctgcacaaagcgaatcagccgcctcacggagtgccccaactttccctctatgagcatttcaattcccctcaccctactcctgctcctgccgatatttcccaaaagcaggtgcaccgacctctgcagacccctgacctttctgggttttacagtttaacttctggctccatgggccagctgccacacacggtgtcttggttcactcatcccagtttgatgttgggttccggcgtgccaggtcatcctgccgccataccgcatcctgctatagtgcctccttcaggcaagcaggagctacagcccttcgaccgcaacctcaaaacccaagcagaatcaaaggcagaaaaggaggccaagaaacccactatcaagaagcccctgaacgcattcatgctatacatgaaagagatgagggcgaaagtcatagcagagtgcaccctgaaagaaagcgctgccatcaaccaaatccttggacgaagatggcatgccctgtctcgcgaggagcaagccaagtattacgagctggcccgaaaggaacgacagctgcatatgcagctgtatcccggatggagcgccagagacaattacggaaagaagaagcggcgcagccgcgaaaaacatcaggaatcaacaacagatccaggatctcctaaaaagtgccgtgcaaggttcgggctaaaccagcagacagattggtgcggcccttgtcgccgcaaaaagaagtgtatccggtacctgccaggcgaaggtcggtgtccctcccctgttccatcagatgatagtgccctagggtgtcccgggtcacctgccccccaggacagcccgagctaccatctgctgcccaggttcccaacagaactgctgaccagccccgctgagcccgctccaacatctcccggcctgagtacagccctgtctctgcccacgcctgggccgcctcaggctccgaggagcacactccaaagtacacaggttcagcagcaggaatcccagaggcaggtggcatag

SEQ ID NO: 288062 - DNA, 1485 bp, Artificial Sequence
  derived and/or modified sequence
atgccccagctggacagcggcggcggcggggccggcggcggagatgacctgggcgccccagatgagctgctggccttccaggatgaaggagaggagcaggatgacaagagccgggacagcgctgctggccctgagcgggacctggccgagctgaagagcagcctggtgaatgaaagtgaaggagctgctggaggagctggcatccctggggtgcctggggccggggccggggcccggggggaggccgaggccctgggccgggagcacgccgcccagaggctcttcccagacaagctgcctgagcccctggaggatggcctgaaggccccagaatgtaccagcggcatgtacaaggagaccgtgtacagcgccttcaacctgctgatgcactacccacctccttctggagctggccagcacccccagccccagccccccctgcacaaggccaaccagccccctcatggagtgccccagctgagcctgtatgagcacttcaacagcccccaccccaccccagccccagctgacatcagccagaagcaggtgcaccggcccctgcagaccccagacctgagcggcttctacagcctgaccagcggctccatgggccagctgccccacacagtgtcctggttcacccaccccagcctgatgctgggcagcggcgtgcccggccaccctgctgccatcccccacccagccatcgtgccccccagcggcaagcaggagctgcagccctttgacaggaacctgaagacccaggccgagagcaaggccgagaaggaggccaagaagcccaccatcaagaagcccctgaatgccttcatgctgtacatgaaggagatgagggccaaggtgattgctgagtgcaccctgaaggagagcgctgccatcaaccagatcctgggccgccgctggcacgccctgagccgggaggagcaggccaagtactatgagctggccaggaaggagcggcagctgcacatgcagctgtacccaggctggagcgcccgggacaactacggcaagaagaagagaagaagccgggagaagcaccaggagagcaccacagaccccggcagccccaagaagtgccgggcccgcttcggcctgaaccagcagacagactggtgtggcccctgcaggaggaagaagaagtgcatccgctacctgcctggagagggccgctgccccagccctgtgcccagtgatgattctgccctgggctgccccggcagccctgccccccaggacagccccagctaccacctgctgccccgcttccccacagagctgctgaccagccctgcccggcacctgcacccccaggtgagccccctgctgagcgccagccagccccagggcccccaccggcccccagctgccccctgccgggcccaccgctacagcaacagaaacctgcgggaccgctggcccagccgccacaggaccccaggccgcctgcaggagcccaccccctag

SEQ ID NO: 288063 - DNA, 1446 bp, Artificial Sequence
  derived and/or modified sequence
atgccccagctggacagcggcggcggcggggccggcggcggagatgacctgggcgccccagatgagctgctggccttccaggatgaaggagaggagcaggatgacaagagccgggacagcgctgctggccctgagcgggacctggccgagctgaagagcagcctggtgaatgaaagtgaaggagctgctggaggagctggcatccctggggtgcctggggccggggccggggcccggggggaggccgaggccctgggccgggagcacgccgcccagaggctcttcccagacaagctgcctgagcccctggaggatggcctgaaggccccagaatgtaccagcggcatgtacaaggagaccgtgtacagcgccttcaacctgctgatgcactacccacctccttctggagctggccagcacccccagccccagccccccctgcacaaggccaaccagccccctcatggagtgccccagctgagcctgtatgagcacttcaacagcccccaccccaccccagccccagctgacatcagccagaagcaggtgcaccggcccctgcagaccccagacctgagcggcttctacagcctgaccagcggctccatgggccagctgccccacacagtgtcctggttcacccaccccagcctgatgctgggcagcggcgtgcccggccaccctgctgccatcccccacccagccatcgtgccccccagcggcaagcaggagctgcagccctttgacaggaacctgaagacccaggccgagagcaaggccgagaaggaggccaagaagcccaccatcaagaagcccctgaatgccttcatgctgtacatgaaggagatgagggccaaggtgattgctgagtgcaccctgaaggagagcgctgccatcaaccagatcctgggccgccgctggcacgccctgagccgggaggagcaggccaagtactatgagctggccaggaaggagcggcagctgcacatgcagctgtacccaggctggagcgcccgggacaactacggcaagaagaagagaagaagccgggagaagcaccaggagagcaccacagaccccggcagccccaagaagtgccgggcccgcttcggcctgaaccagcagacagactggtgtggcccctgcaggaggaagaagaagtgcatccgctacctgcctggagagggccgctgccccagccctgtgcccagtgatgattctgccctgggctgccccggcagccctgccccccaggacagccccagctaccacctgctgccccgcttccccacagagctgctgaccagccctgctgagcccgcccccaccagccctggcctgagcacagccctgagcctgcccaccccaggccccccccaggcccccaggagcaccctgcagagcacccaggtgcagcagcaggagagccagaggcaggtggcctag

SEQ ID NO: 288064 - DNA, 1485 bp, Artificial Sequence
  derived and/or modified sequence
atgccccagctggacagcggcggcggcggcgccggcggcggcgacgacctgggcgcccccgacgagctcctggcgttccaggatgagggcgaggagcaggacgacaagtctcgtgattcagccgccgggcccgaacgggatcttgccgaactgaaatcaagcctggtaaatgagtctgagggggccgcagggggtgctggaattcctggggtgccaggcgcgggggcaggggcccgcggagaggctgaggcactaggtcgtgaacatgccgcacagcgcctcttccctgataagctgcccgagccattggaagatggtcttaaggcccctgagtgcacatccggtatgtataaggagactgtgtactcagcatttaacctcctaatgcattacccaccacctagcggtgcaggtcagcacccacagcctcaacctccgctgcacaaggccaaccagccaccacacggggtcccccaactatctctctacgagcatttcaactccccgcaccctacgcccgctcccgccgatatctctcagaaacaagttcacaggccactccagacaccagaccttagcggcttttactccttaacttcgggctctatggggcaactcccgcataccgtctcttggttcacgcacccttcactgatgctgggctctggagtacctggccaccctgccgcaatcccccaccctgccattgtgcccccctcagggaagcaggaattacagcccttcgacagaaatctgaagactcaggccgaaagcaaggccgagaaggaggctaagaagcccacaatcaaaaagcccctgaatgcttttatgctttacatgaaagagatgcgcgcgaaagttatcgccgagtgcaccctgaaagagtccgctgccatcaaccagatattgggtcgtcgctggcacgcattatccagagaggaacaggctaagtactacgaactggccaggaaggaaaggcagcttcatatgcagttatatccagggtggtcggctagggataactatggcaaaaaaaaacggaggtccagagagaaacatcaggaaagcacgacggatccaggcagccccaaaaagtgcagagcgcgcttcgggctgaaccagcagacagactggtgcggaccttgccggaggaaaaaaaaatgtatacgttatctaccaggcgaaggcaggtgcccctcccccgtgcctagcgacgattccgccctgggctgtcctgggtccccagcgccccaggactccccctcctaccacctcttgccacggtttcccacagaactactcacaagtcctgcccgccacctgcacccacaggtcagtccactgctgagtgcctcccagccacagggtccacacagaccgcctgccgcgccctgccgggcccacagatattcgaacaggaacttgagagacagatggccttcgagacaccgcactccaggccgtcttcaggagccaactccgtag

SEQ ID NO: 288065 - DNA, 1446 bp, Artificial Sequence
  derived and/or modified sequence
atgccccagctggacagcggcggcggcggcgccggcggcggcgacgacctgggagcccccgatgaactgttggctttccaggatgaaggagaagagcaggatgacaagagcagggactccgctgcaggaccagaacgagacctggcagagctaaagagcagtctggtgaacgagagtgaaggtgcggccgggggcgccggcatcccaggggtgcccggggcaggggctggcgcacgcggcgaggccgaagccctcggccgcgaacatgccgcacaacggctcttcccagataaactgccagagcccctggaggatgggctgaaagcccccgagtgtacaagcggtatgtataaggaaactgtttattctgctttcaacctgctgatgcactacccgccaccctctggagctggccaacatcctcaaccgcagcctccccttcataaggcaaaccagcctccgcacggcgtccctcaactttcactctatgaacactttaattcccctcatccaacacctgcccccgccgatatctcacagaagcaggtccacaggccgttgcagacaccagacttgtctggcttctattctctgacgagcgggagtatggggcaacttcctcacacggtgtcctggttcacacaccctagccttatgctgggctccggcgttcccggacatcccgcagcaatcccgcacccggccatcgtgcctccaagcgggaaacaagagctgcagccatttgatcgtaacctgaagacccaggccgaatccaaggcagagaaagaggccaagaagcctaccatcaagaaacctttgaacgccttcatgctttacatgaaggaaatgcgggcaaaggttatcgctgagtgcaccctcaaagaaagtgccgctattaatcagatcctgggtagaaggtggcacgccctaagtagagaggagcaggcaaaatactatgaactggctcggaaggagcggcagttacatatgcagctttaccccggctggtctgcaagggacaactacggaaaaaagaagcgtaggtcaagagagaaacaccaagagtcaaccacagaccccggctcaccaaagaagtgtagggcccgctttgggcttaaccagcagactgattggtgcgggccctgtcgcagaaagaagaaatgtattcgctaccttccaggggaaggccgatgtccctcccctgttccttcagatgactctgccctcggttgtcccggaagccccgccccccaggattcccctagttaccatctgctgccaagattcccgaccgagctgttgacctcaccggccgaacctgcaccgacctcacctggtctgagcaccgccctttctctaccaacccccggccctccacaagccccgcggtctaccctacagagtactcaggtgcaacaacaagaatcccagcgccaggtggcctag

SEQ ID NO: 288066 - DNA, 1485 bp, Artificial Sequence
  derived and/or modified sequence
atgccccagctggattcagggggagggggagcaggtggaggggacgatctgggtgcgccagacgaactgcttgctttccaggatgaaggggaggaacaggatgacaagtctcgagacagcgccgctggaccagagagggacctggctgagttaaagtcgtctttggtcaacgaaagcgagggggcagctgggggagcgggtatcccaggcgtcccaggcgcaggagctggggctcgaggcgaagccgaagccctggggagggagcatgccgctcagcggcttttcccagataagttgcccgaaccccttgaggacgggctgaaggcacctgaatgcacttcaggaatgtataaggaaacagtgtactccgcttttaaccttctgatgcattaccctcctccctcaggtgctgggcagcatcctcaacctcagcctccgcttcacaaggctaatcagcctccccatggagtgccccagctctcactgtatgagcacttcaactcgccccatcctaccccagcacctgcagatatcagccagaagcaggtccataggcctctgcagacccctgacctgtctgggttctattcgctcacgtctggcagcatgggacagctgccccatactgtgtcttggtttacccacccctctttgatgctaggctcgggagtgcctggacaccccgctgccattccacaccctgcaatcgtgcctccctctggtaagcaggaactccagccttttgataggaatctgaagactcaagcagagtctaaggctgaaaaagaagccaaaaaaccaaccatcaagaaacccttaaatgcgttcatgttatacatgaaggaaatgagagcaaaagtgattgctgagtgcaccctgaaggaaagtgctgccatcaatcaaatcctcggtagaagatggcatgccttgagcagggaggaacaggctaaatattatgaactcgcgagaaaagaacgtcagctccacatgcaactgtaccccggatggtctgcccgtgacaattatggcaaaaagaagaggcgtagcagggagaagcaccaggagagcacgaccgatccgggaagcccaaagaagtgtagggcaaggttcggcctgaatcaacagaccgattggtgtggaccctgtaggcggaagaagaaatgcattagatatctccccggagaaggcagatgtccatctccagtcccatcagacgactccgctctgggatgtccaggttcacctgctccccaggacagtccctcctaccatcttttgcctaggtttccaaccgaacttctgacctcacctgcgagacacctgcatccacaagtcagtcccctgctgtccgcctcacagcctcaggggccacaccgccctccagctgccccttgtcgggcacacaggtactccaaccgaaatctaagagacaggtggccaagccgtcaccggacaccaggcagactacaagagccaaccccttag

SEQ ID NO: 288067 - DNA, 3346 bp, Artificial Sequence
  derived and/or modified sequence
cccgccagctcgcggagccgctctgccccgcgccctagcccgcgcctgcagcccgcccaggcggagtcagcccgcgctccgcccgccgcgatccgagctcggaggttcggactccgggctcgccgccccccgggccggctccgcgccccgcactcccggcgcccagcgccccgcgccccggcgggcggagcgcaccatgccgcagctggactccggcgggggcggcgcgggcggcggcgacgacctcggcgcgccggacgagctgctggccttccaggatgaaggcgaggagcaggacgacaagagccgcgacagcgccgccggtcccgagcgcgacctggccgagctcaagtcgtcgctcgtgaacgagtccgagggcgcggccggcggcgcagggatcccgggggtcccgggggccggcgccggggcccgcggcgaggccgaggctctcgggcgggaacacgctgcgcagagactcttcccggacaaacttccagagcccctggaggacggcctgaaggccccggagtgcaccagcggcatgtacaaagagaccgtctactccgccttcaatctgctcatgcattacccacccccctcgggagcagggcagcacccccagccgcagcccccgctgcacaaggccaatcagcccccccacggtgtcccccaactctctctctacgaacatttcaacagcccacatcccacccctgcacctgcggacatcagccagaagcaagttcacaggcctctgcagacccctgacctctctggcttctactccctgacctcaggcagcatggggcagctcccccacactgtgagctggttcacccacccatccttgatgctaggttctggtgtacctggtcacccagcagccatcccccacccggccattgtgcccccctcagggaagcaggagctgcagcccttcgaccgcaacctgaagacacaagcagagtccaaggcagagaaggaggccaagaagccaaccatcaagaagcccctcaatgccttcatgctgtacatgaaggagatgagagccaaggtcattgcagagtgcacacttaaggagagcgctgccatcaaccagatcctgggccgcaggtggcacgcgctgtcgcgagaagagcaggccaagtactatgagctggcccgcaaggagaggcagctgcacatgcagctatacccaggctggtcagcgcgggacaactacgggaagaagaagaggcggtcgagggaaaagcaccaagaatccaccacagaccctggctcgcctaagaaatgccgtgctcgctttggcctcaaccagcagacggattggtgtggtccgtgcaggaggaaaaagaaatgcattcggtacttacccggagaaggccgctgccccagccccgttccttccgatgacagtgctctaggctgccccgggtccccagctccccaggactcaccctcataccatctgctgccccgcttccccacagaactgcttactagccctgcgcggcacctacatccccaggtctctccactgctctcagcctcccaaccccagggcccccacaggccccccgcagcaccctgcagagcacacaggtacagcaacaggaatctcagagacaggtggcctagcaggcacaggacacctggccgcctccaggagcctaccccctgaaagtgacagagacccagatctcatggaaactggccaggggtcctgttaacgtcatctcagggtccagaccctgaagatttcagaggctgcaggacttctgcctgaacctggggtcatcgattcaaactgctccaagtggtgggaatcagatctgtcttgatgtgtcatctaattaagggaatcccttgtacctatggctgcctgcatctattctttgtaccatctgtcttgccagccagaagcctctgcctccctagcttttctgctataggtcagagatgggctgaactgagcctagctaccttctctacccatctcccccatcccccactgccacaccctccccattcagacacttcatggaccaagaatgagctggtttgtcaaacaacatgtgagcatggtcacaagcacaaagctcaagatgacagctcttctaaggaaatggagaagctctgtttataaaaacaaaaacaaaaccagctgctactcataagttggaccagaggaagccccttactatgatctcaggagcttgcaagaagcaggaaggggaatggaataggttaagtttaggcctatcaacctaagcaacagaaataatctgacactaccttatcaggcaaattggggaggggagggtgtatctagctctagttcaaattatttggaagtgttccctgagaaacccaccagcctaagaagctctggccccaggcttgtcactagcagctgcagtcaacagttcaaagaagtcatggcccaaatccagtgtgcacccctccccattcacagagcctttttcacaattccatttccagttcatctatggcagtccagccagctcctgggcagcttgagagggcaaacccaaaacctcatgacagccagagcctgtctttcagcattcagtccgcctggccggctccagtttccccatggggctgcgggacagaggaccattacaactagatcaaggagcccagaaaacctccagtagtggacaacaggttttcaccatagcctacgttaacccatttttgagccaagcttcaaccctcagccttgaaaaacaagtctttaatttaatttttgttttttgcctaaatccaaagaaaaagggctgccgggccaggcgcggtggctcacgcctgtaatcccagcactttggcaggccgaggcaggtggatcacctgacgtcagtagtttgagaccagcctggccaacatggtgaaaccctgtatctactaaaaatacaaaaattagccggacgtggtggtgcgcgcatgtaatcccagctactcgggaggctgaggcggaagaatcacttgaacccgggaggcggaggttccagtgagccgagatggcgctattgcactccagtctgggtaacagggagactgcatctcaaaaaaaaaaaaaaaaaaaaaaaagggctgtccatgtattcacacacccctcaaaaaaagcctttagttcctactttagccactggtttctcagaatccaaagatcacatattctagtgtaacactgcaagaagtcttgagaaaaagattattgtagtgttcaaaatatttttgtattgttaatgcatcatcatagaaaaacttttaaacatgagaataaagatactttttactgggtttgtttttcaaagcctga

SEQ ID NO: 288068 - DNA, 1446 bp, Artificial Sequence
  derived and/or modified sequence
atgcctcagctcgatagtggcggagggggagcaggaggcggtgacgatctgggtgctcctgatgagctgctcgcatttcaggatgagggcgaagagcaggatgataaatctagagactccgctgcagggcctgagcgagacctggccgagctgaaatcctcactggtgaacgagtcggaaggtgccgcaggaggcgctgggatccccggagtgccgggagctggcgcaggcgcacgcggagaggccgaggcactcggacgagagcatgccgcacagcgcctgtttcctgacaagctccccgagcccctcgaggacggcctgaaagcacctgagtgcactagtgggatgtacaaagagaccgtctattccgccttcaacctcctaatgcattaccccccaccgtcaggagctggacagcaccctcagccccagccaccattgcacaaggcaaatcagcctccccacggggtgccccagctctcgctgtatgagcattttaactcaccacaccctacccccgctcctgcagacatctcccaaaagcaggtccaccggcctcttcaaactcctgacctaagcggcttctacagccttacctccgggagcatgggtcagcttccacataccgtgtcttggttcacgcacccatccctgatgctaggctctggtgtgccaggccacccagctgctataccccaccctgcaatcgtgcctccctcaggcaaacaagaactccaacccttcgataggaacctcaaaacccaggccgaatcaaaagccgaaaaggaggccaagaaaccaacaattaaaaaaccgctcaacgcatttatgctttacatgaaggagatgcgcgctaaggtgattgcagagtgcacactgaaagagtcagccgctataaaccagatccttgggaggagatggcacgctttgtctcgggaggagcaagcgaaatactacgagctggcccgtaaggagagacagttacatatgcagttgtaccccggatggtctgccagagacaactatggaaaaaagaaaagaaggtcccgcgaaaaacaccaggagagcaccaccgacccgggttctcccaaaaaatgccgcgctcgctttggccttaatcaacagacggactggtgcggcccttgtcgcaggaagaagaaatgcattaggtacctacctggggagggacgctgtcctagtcctgtgcctagcgatgatagtgcgctaggatgccccggaagtcctgcgcctcaggacagcccctcttatcacctactccccagattccctacagagctcctgacctcccccgcagaacctgccccaacctcccccggtctcagcacagcgctaagcctgcctactcctgggcctccacaggctccaaggagtactctgcagagcacacaggtgcagcagcaggagtcacagaggcaggtcgcgtag

SEQ ID NO: 288069 - DNA, 2929 bp, Artificial Sequence
  derived and/or modified sequence
atccccgcctcccctcctgcccaggtgactgactaatccgccgccttcaggagacagaattggccaaggcctgaaggccccggagtgcaccagcggcatgtacaaagagaccgtctactccgccttcaatctgctcatgcattacccacccccctcgggagcagggcagcacccccagccgcagcccccgctgcacaaggccaatcagcccccccacggtgtcccccaactctctctctacgaacatttcaacagcccacatcccacccctgcacctgcggacatcagccagaagcaagttcacaggcctctgcagacccctgacctctctggcttctactccctgacctcaggcagcatggggcagctcccccacactgtgagctggttcacccacccatccttgatgctaggttctggtgtacctggtcacccagcagccatcccccacccggccattgtgcccccctcagggaagcaggagctgcagcccttcgaccgcaacctgaagacacaagcagagtccaaggcagagaaggaggccaagaagccaaccatcaagaagcccctcaatgccttcatgctgtacatgaaggagatgagagccaaggtcattgcagagtgcacacttaaggagagcgctgccatcaaccagatcctgggccgcaggtggcacgcgctgtcgcgagaagagcaggccaagtactatgagctggcccgcaaggagaggcagctgcacatgcagctatacccaggctggtcagcgcgggacaactacgggaagaagaagaggcggtcgagggaaaagcaccaagaatccaccacagaccctggctcgcctaagaaatgccgtgctcgctttggcctcaaccagcagacggattggtgtggtccgtgcagataactctcttcactattcctaggaggaaaaagaaatgcattcggtacttacccggagaaggccgctgccccagccccgttccttccgatgacagtgctctaggctgccccgggtccccagctccccaggactcaccctcataccatctgctgccccgcttccccacagaactgcttactagccctgcggagccggcacctacatccccaggtctctccactgctctcagcctcccaaccccagggcccccacaggccccccgcagcaccctgcagagcacacaggtacagcaacaggaatctcagagacaggtggcctagcaggcacaggacacctggccgcctccaggagcctaccccctgaaagtgacagagacccagatctcatggaaactggccaggggtcctgttaacgtcatctcagggtccagaccctgaagatttcagaggctgcaggacttctgcctgaacctggggtcatcgattcaaactgctccaagtggtgggaatcagatctgtcttgatgtgtcatctaattaagggaatcccttgtacctatggctgcctgcatctattctttgtaccatctgtcttgccagccagaagcctctgcctccctagcttttctgctataggtcagagatgggctgaactgagcctagctaccttctctacccatctcccccatcccccactgccacaccctccccattcagacacttcatggaccaagaatgagctggtttgtcaaacaacatgtgagcatggtcacaagcacaaagctcaagatgacagctcttctaaggaaatggagaagctctgtttataaaaacaaaaacaaaaccagctgctactcataagttggaccagaggaagccccttactatgatctcaggagcttgcaagaagcaggaaggggaatggaataggttaagtttaggcctatcaacctaagcaacagaaataatctgacactaccttatcaggcaaattggggaggggagggtgtatctagctctagttcaaattatttggaagtgttccctgagaaacccaccagcctaagaagctctggccccaggcttgtcactagcagctgcagtcaacagttcaaagaagtcatggcccaaatccagtgtgcacccctccccattcacagagcctttttcacaattccatttccagttcatctatggcagtccagccagctcctgggcagcttgagagggcaaacccaaaacctcatgacagccagagcctgtctttcagcattcagtccgcctggccggctccagtttccccatggggctgcgggacagaggaccattacaactagatcaaggagcccagaaaacctccagtagtggacaacaggttttcaccatagcctacgttaacccatttttgagccaagcttcaaccctcagccttgaaaaacaagtctttaatttaatttttgttttttgcctaaatccaaagaaaaagggctgccgggccaggcgcggtggctcacgcctgtaatcccagcactttggcaggccgaggcaggtggatcacctgacgtcagtagtttgagaccagcctggccaacatggtgaaaccctgtatctactaaaaatacaaaaattagccggacgtggtggtgcgcgcatgtaatcccagctactcgggaggctgaggcggaagaatcacttgaacccgggaggcggaggttccagtgagccgagatggcgctattgcactccagtctgggtaacagggagactgcatctcaaaaaaaaaaaaaaaaaaaaaaaagggctgtccatgtattcacacacccctcaaaaaaagcctttagttcctactttagccactggtttctcagaatccaaagatcacatattctagtgtaacactgcaagaagtcttgagaaaaagattattgtagtgttcaaaatatttttgtattgttaatgcatcatcatagaaaaacttttaaacatgagaataaagatactttttactgggtttgtttttcaaagcctga

SEQ ID NO: 288070 - DNA, 3330 bp, Artificial Sequence
  derived and/or modified sequence
ccgccagctcgcggagccgctctgccccgcgccctagcccgcgcctgcagcccgcccaggcggagtcagcccgcgctccgcccgccgcgatccgagctcggaggttcggactccgggctcgccgccccccgggccggctccgcgccccgcactcccggcgcccagcgccccgcgccccggcgggcggagcgcaccatgccgcagctggactccggcgggggcggcgcgggcggcggcgacgacctcggcgcgccggacgagctgctggccttccaggatgaaggcgaggagcaggacgacaagagccgcgacagcgccgccggtcccgagcgcgacctggccgagctcaagtcgtcgctcgtgaacgagtccgagggcgcggccggcggcgcagggatcccgggggtcccgggggccggcgccggggcccgcggcgaggccgaggctctcgggcgggaacacgctgcgcagagactcttcccggacaaacttccagagcccctggaggacggcctgaaggccccggagtgcaccagcggcatgtacaaagagaccgtctactccgccttcaatctgctcatgcattacccacccccctcgggagcagggcagcacccccagccgcagcccccgctgcacaaggccaatcagcccccccacggtgtcccccaactctctctctacgaacatttcaacagcccacatcccacccctgcacctgcggacatcagccagaagcaagttcacaggcctctgcagacccctgacctctctggcttctactccctgacctcaggcagcatggggcagctcccccacactgtgagctggttcacccacccatccttgatgctaggttctggtgtacctggtcacccagcagccatcccccacccggccattgtgcccccctcagggaagcaggagctgcagcccttcgaccgcaacctgaagacacaagcagagtccaaggcagagaaggaggccaagaagccaaccatcaagaagcccctcaatgccttcatgctgtacatgaaggagatgagagccaaggtcattgcagagtgcacacttaaggagagcgctgccatcaaccagatcctgggccgcaggtggcacgcgctgtcgcgagaagagcaggccaagtactatgagctggcccgcaaggagaggcagctgcacatgcagctatacccaggctggtcagcgcgggacaactacgggaagaagaagaggcggtcgagggaaaagcaccaagaatccaccacagaccctggctcgcctaagaaatgccgtgctcgctttggcctcaaccagcagacggattggtgtggtccgtgcaggaggaaaaagaaatgcattcggtacttacccggagaaggccgctgccccagccccgttccttccgatgacagtgctctaggctgccccgggtccccagctccccaggactcaccctcataccatctgctgccccgcttccccacagaactgcttactagccctgcggagccggcacctacatccccaggtctctccactgctctcagcctcccaaccccagggcccccacaggccccccgcagcaccctgcagagcacacaggtacagcaacaggaatctcagagacaggtggcctagcaggcacaggacacctggccgcctccaggagcctaccccctgaaagtgacagagacccagatctcatggaaactggccaggggtcctgttaacgtcatctcagggtccagaccctgaagatttcagaggctgcaggacttctgcctgaacctggggtcatcgattcaaactgctccaagtggtgggaatcagatctgtcttgatgtgtcatctaattaagggaatcccttgtacctatggctgcctgcatctattctttgtaccatctgtcttgccagccagaagcctctgcctccctagcttttctgctataggtcagagatgggctgaactgagcctagctaccttctctacccatctcccccatcccccactgccacaccctccccattcagacacttcatggaccaagaatgagctggtttgtcaaacaacatgtgagcatggtcacaagcacaaagctcaagatgacagctcttctaaggaaatggagaagctctgtttataaaaacaaaaacaaaaccagctgctactcataagttggaccagaggaagccccttactatgatctcaggagcttgcaagaagcaggaaggggaatggaataggttaagtttaggcctatcaacctaagcaacagaaataatctgacactaccttatcaggcaaattggggaggggagggtgtatctagctctagttcaaattatttggaagtgttccctgagaaacccaccagcctaagaagctctggccccaggcttgtcactagcagctgcagtcaacagttcaaagaagtcatggcccaaatccagtgtgcacccctccccattcacagagcctttttcacaattccatttccagttcatctatggcagtccagccagctcctgggcagcttgagagggcaaacccaaaacctcatgacagccagagcctgtctttcagcattcagtccgcctggccggctccagtttccccatggggctgcgggacagaggaccattacaactagatcaaggagcccagaaaacctccagtagtggacaacaggttttcaccatagcctacgttaacccatttttgagccaagcttcaaccctcagccttgaaaaacaagtctttaatttaatttttgttttttgcctaaatccaaagaaaaagggctgccgggccaggcgcggtggctcacgcctgtaatcccagcactttggcaggccgaggcaggtggatcacctgacgtcagtagtttgagaccagcctggccaacatggtgaaaccctgtatctactaaaaatacaaaaattagccggacgtggtggtgcgcgcatgtaatcccagctactcgggaggctgaggcggaagaatcacttgaacccgggaggcggaggttccagtgagccgagatggcgctattgcactccagtctgggtaacagggagactgcatctcaaaaaaaaaaaaaaaaaaaaaaaagggctgtccatgtattcacacacccctcaaaaaaagcctttagttcctactttagccactggtttctcagaatccaaagatcacatattctagtgtaacactgcaagaagtcttgagaaaaagattattgtagtgttcaaaatatttttgtattgttaatgcatcatcatagaaaaacttttaaacatgagaataaagatactttttactggg

SEQ ID NO: 288071 - DNA, 1198 bp, Artificial Sequence
  derived and/or modified sequence
atccccgcctcccctcctgcccaggtgactgactaatccgccgccttcaggagacagaattggccaaggcctgaaggccccggagtgcaccagcggcatgtacaaagagaccgtctactccgccttcaatctgctcatgcattacccacccccctcgggagcagggcagcacccccagccgcagcccccgctgcacaaggccaatcagcccccccacggtgtcccccaactctctctctacgaacatttcaacagcccacatcccacccctgcacctgcggacatcagccagaagcaagttcacaggcctctgcagacccctgacctctctggcttctactccctgacctcaggcagcatggggcagctcccccacactgtgagctggttcacccacccatccttgatgctaggttctggtgtacctggtcacccagcagccatcccccacccggccattgtgcccccctcagggaagcaggagctgcagcccttcgaccgcaacctgaagacacaagcagagtccaaggcagagaaggaggccaagaagccaaccatcaagaagcccctcaatgccttcatgctgtacatgaaggagatgagagccaaggtcattgcagagtgcacacttaaggagagcgctgccatcaaccagatcctgggccgcaggtggcacgcgctgtcgcgagaagagcaggccaagtactatgagctggcccgcaaggagaggcagctgcacatgcagctatacccaggctggtcagcgcgggacaactacgggaagaagaagaggcggtcgagggaaaagcaccaagaatccaccacagaccctggctcgcctaagaaatgccgtgctcgctttggcctcaaccagcagacggattggtgtggtccgtgcaggaggaaaaagaaatgcattcggtacttacccggagaaggccgctgccccagccccgttccttccgatgacagtgctctaggctgccccgggtccccagctccccaggactcaccctcataccatctgctgccccgcttccccacagaactgcttactagccctgcggagccggcacctacatccccaggtctctccactgctctcagcctcccaaccccagggcccccacaggccccccgcagcaccctgcagagcacacaggtacagcaacaggaatctcagagacaggtggcctag

SEQ ID NO: 288072 - DNA, 1485 bp, Artificial Sequence
  derived and/or modified sequence
atgccccagctggacagcggcggcggcggcgccggcggcggcgacgacctgggcgcccccgacgagctgctggccttccaggacgagggcgaggagcaggacgacaagagcagagacagcgccgccggccccgagagagacctggccgagctgaagagcagcctggtgaacgagagcgagggcgccgccggcggcgccggcatccccggcgtgcccggcgccggcgccggcgccagaggcgaggccgaggccctgggcagagagcacgccgcccagagactgttccccgacaagctgcccgagcccctggaggacggcctgaaggcccccgagtgcaccagcggcatgtacaaggagaccgtgtacagcgccttcaacctgctgatgcactaccccccccccagcggcgccggccagcacccccagccccagccccccctgcacaaggccaaccagcccccccacggcgtgccccagctgagcctgtacgagcacttcaacagcccccaccccacccccgcccccgccgacatcagccagaagcaggtgcacagacccctgcagacccccgacctgagcggcttctacagcctgaccagcggcagcatgggccagctgccccacaccgtgagctggttcacccaccccagcctgatgctgggcagcggcgtgcccggccaccccgccgccatcccccaccccgccatcgtgccccccagcggcaagcaggagctgcagcccttcgacagaaacctgaagacccaggccgagagcaaggccgagaaggaggccaagaagcccaccatcaagaagcccctgaacgccttcatgctgtacatgaaggagatgagagccaaggtgatcgccgagtgcaccctgaaggagagcgccgccatcaaccagatcctgggcagaagatggcacgccctgagcagagaggagcaggccaagtactacgagctggccagaaaggagagacagctgcacatgcagctgtaccccggctggagcgccagagacaactacggcaagaagaagagaagaagcagagagaagcaccaggagagcaccaccgaccccggcagccccaagaagtgcagagccagattcggcctgaaccagcagaccgactggtgcggcccctgcagaagaaagaagaagtgcatcagatacctgcccggcgagggcagatgccccagccccgtgcccagcgacgacagcgccctgggctgccccggcagccccgccccccaggacagccccagctaccacctgctgcccagattccccaccgagctgctgaccagccccgccagacacctgcacccccaggtgagccccctgctgagcgccagccagccccagggcccccacagaccccccgccgccccctgcagagcccacagatacagcaacagaaacctgagagacagatggcccagcagacacagaacccccggcagactgcaggagcccaccccctag

SEQ ID NO: 288073 - DNA, 1446 bp, Artificial Sequence
  derived and/or modified sequence
atgccccagctggacagcggcggcggcggcgccggcggcggcgacgacctgggcgcccccgacgagctgctggccttccaggacgagggcgaggagcaggacgacaagagcagagacagcgccgccggccccgagagagacctggccgagctgaagagcagcctggtgaacgagagcgagggcgccgccggcggcgccggcatccccggcgtgcccggcgccggcgccggcgccagaggcgaggccgaggccctgggcagagagcacgccgcccagagactgttccccgacaagctgcccgagcccctggaggacggcctgaaggcccccgagtgcaccagcggcatgtacaaggagaccgtgtacagcgccttcaacctgctgatgcactaccccccccccagcggcgccggccagcacccccagccccagccccccctgcacaaggccaaccagcccccccacggcgtgccccagctgagcctgtacgagcacttcaacagcccccaccccacccccgcccccgccgacatcagccagaagcaggtgcacagacccctgcagacccccgacctgagcggcttctacagcctgaccagcggcagcatgggccagctgccccacaccgtgagctggttcacccaccccagcctgatgctgggcagcggcgtgcccggccaccccgccgccatcccccaccccgccatcgtgccccccagcggcaagcaggagctgcagcccttcgacagaaacctgaagacccaggccgagagcaaggccgagaaggaggccaagaagcccaccatcaagaagcccctgaacgccttcatgctgtacatgaaggagatgagagccaaggtgatcgccgagtgcaccctgaaggagagcgccgccatcaaccagatcctgggcagaagatggcacgccctgagcagagaggagcaggccaagtactacgagctggccagaaaggagagacagctgcacatgcagctgtaccccggctggagcgccagagacaactacggcaagaagaagagaagaagcagagagaagcaccaggagagcaccaccgaccccggcagccccaagaagtgcagagccagattcggcctgaaccagcagaccgactggtgcggcccctgcagaagaaagaagaagtgcatcagatacctgcccggcgagggcagatgccccagccccgtgcccagcgacgacagcgccctgggctgccccggcagccccgccccccaggacagccccagctaccacctgctgcccagattccccaccgagctgctgaccagccccgccgagcccgcccccaccagccccggcctgagcaccgccctgagcctgcccacccccggccccccccaggcccccagaagcaccctgcagagcacccaggtgcagcagcaggagagccagagacaggtggcctag

SEQ ID NO: 288074 - protein, 384 aa, Artificial Sequence
  derived and/or modified sequence
MPQLDSGGGGAGGGDDLGAPDELLAFQDEGEEQDDKSRDSAAGPERDLAELKSSLVNESEGAAGGAGIPGVPGAGAGARGEAEALGREHAAQRLFPDKLPEPLEDGLKAPECTSGMYKETVYSAFNLLMHYPPPSGAGQHPQPQPPLHKANQPPHGVPQLSLYEHFNSPHPTPAPADISQKQVHRPLQTPDLSGFYSLTSGSMGQLPHTVSWFTHPSLMLGSGVPGHPAAIPHPAIVPPSGKQELQPFDRNLKTQAESKAEKEAKKPTIKKPLNAFMLYMKEMRAKVIAECTLKESAAINQILGRRWHALSREEQAKYYELARKERQLHMQLYPGWSARDNYGKKKRRSREKHQESTTETNWPRELKDGNGQESLSMSSSSSPA

SEQ ID NO: 288075 - protein, 365 aa, Artificial Sequence
  derived and/or modified sequence
MPQLDSGGGGAGGGDDLGAPDELLAFQDEGEEQDDKSRDSAAGPERDLAELKSSLVNESEGAAGGAGIPGVPGAGAGARGEAEALGREHAAQRLFPDKLPEPLEDGLKAPECTSGMYKETVYSAFNLLMHYPPPSGAGQHPQPQPPLHKANQPPHGVPQLSLYEHFNSPHPTPAPADISQKQVHRPLQTPDLSGFYSLTSGSMGQLPHTVSWFTHPSLMLGSGVPGHPAAIPHPAIVPPSGKQELQPFDRNLKTQAESKAEKEAKKPTIKKPLNAFMLYMKEMRAKVIAECTLKESAAINQILGRRWHALSREEQAKYYELARKERQLHMQLYPGWSARDNYGKKKRRSREKHQESTTDNSLHYS

SEQ ID NO: 288076 - protein, 369 aa, Artificial Sequence
  derived and/or modified sequence
MPQLDSGGGGAGGGDDLGAPDELLAFQDEGEEQDDKSRDSAAGPERDLAELKSSLVNESEGAAGGAGIPGVPGAGAGARGEAEALGREHAAQRLFPDKLPEPLEDGLKAPECTSGMYKETVYSAFNLLMHYPPPSGAGQHPQPQPPLHKANQPPHGVPQLSLYEHFNSPHPTPAPADISQKQVHRPLQTPDLSGFYSLTSGSMGQLPHTVSWFTHPSLMLGSGVPGHPAAIPHPAIVPPSGKQELQPFDRNLKTQAESKAEKEAKKPTIKKPLNAFMLYMKEMRAKVIAECTLKESAAINQILGRRWHALSREEQAKYYELARKERQLHMQLYPGWSARDNYGKKKRRSREKHQESTTDGIPACTILSP

SEQ ID NO: 288077 - protein, 123 aa, Artificial Sequence
  derived and/or modified sequence
MYKETVYSAFNLLMHYPPPSGAGQHPQPQPPLHKANQPPHGVPQLSLYEHFNSPHPTPAPADISQKQVHRPLQTPDLSGFYSLTSGSMGQLPHTVSWFTHPSLMLGSGVPGHPAAIPHPAIVP

SEQ ID NO: 288078 - protein, 147 aa, Artificial Sequence
  derived and/or modified sequence
MYKETVYSAFNLLMHYPPPSGAGQHPQPQPPLHKANQPPHGVPQLSLYEHFNSPHPTPAPADISQKQVHRPLQTPDLSGFYSLTSGSMGQLPHTVSWFTHPSLMLGSGVPGHPAAIPHPAIVPPSGKQELQPFDRNLKTQAESKAEK

SEQ ID NO: 288079 - DNA, 1155 bp, Artificial Sequence
  derived and/or modified sequence
atgccccagttggattcaggaggaggtggggcaggcggcggcgatgatctcggtgcaccagacgaactccttgccttccaggatgaaggtgaagaacaggatgacaagagccgggacagcgctgctggccctgaacgagatcttgcagagttgaagagcagcctagtcaacgagtctgaaggggctgctggtggggccggcatcccaggagtccctggtgccggagcaggcgctcggggcgaagcagaagctcttggaagggagcatgcagcccagcggctctttcccgacaagctgcctgaacccctggaggatgggcttaaggcccctgagtgtacttctggcatgtacaaagagaccgtctactcggctttcaatttactcatgcattatcccccgccctctggagctggacagcatccgcagccgcagccccctcttcacaaggccaaccaacccccgcatggtgttcctcagctgtcactgtacgaacatttcaacagcccacaccccaccccagccccagcggatatatcccagaaacaggtacacaggcctctgcaaactcccgacctgtctggattttactcactaacaagtggctcaatgggacagctcccccacacggtctcctggtttacccatcccagcttgatgctcggttctggggtacccggtcatcccgccgcaatacctcaccctgctattgtccccccttctggcaagcaagaactgcagccctttgacagaaatctcaaaacccaggcagagtctaaggccgagaaagaagccaagaagccaacaatcaagaaacccttaaacgcatttatgttgtatatgaaggaaatgcgcgctaaggtcatcgctgagtgcactctgaaagaatcagccgctattaaccagattcttggtcgccgctggcatgccctgagtcgtgaggagcaggcaaagtactatgagctcgcacgcaaagaacgccagctgcacatgcagctctaccctggttggagtgccagagacaattacggcaaaaaaaaacgaaggtcacgcgagaagcatcaggagagcacaacagagacgaactggcctcgagagctaaaggatggcaacggtcaagagagtctgtctatgtcctcctcatcgtcgcctgcctag

SEQ ID NO: 288080 - DNA, 1098 bp, Artificial Sequence
  derived and/or modified sequence
atgccacaacttgactccggcggcgggggggctggcgggggcgatgacctgggggccccagacgagcttttggctttccaggacgagggagaggagcaagacgacaaatctcgcgacagcgcagcaggacctgagagggatttggccgagctaaagagttccctcgtaaatgaatctgaaggtgcggctggaggcgccggtatacctggtgtccctggggctggcgccggcgcccggggagaggcggaagccctgggccgggagcacgccgctcaaagactgtttcctgacaagctgccggagccattagaagacgggctgaaagcgccagaatgcactagcggtatgtataaggagaccgtgtattcagctttcaacctgcttatgcactaccctcctccaagtggtgcgggtcagcatccacagcctcagcctcctctacacaaggccaaccaacctccgcacggcgtgccgcaactgtccctctatgagcactttaatagtccacatccaacacctgctcctgccgacatcagtcagaagcaggtccatcgaccactgcagacccctgacctaagcggcttctatagccttactagcggttcgatgggacagctcccacacacagtcagttggtttacgcatccatcacttatgctcggaagcggcgtgcctgggcatccggctgcaattccccacccagccattgtgccaccatcgggtaaacaggagctccagccctttgatagaaacttaaagacgcaggcagagtcaaaagccgagaaggaagccaaaaaaccaaccattaaaaagcccctcaacgcgttcatgctgtatatgaaggagatgcgcgcaaaggtaatcgcagaatgtaccctaaaggaatccgcggcaattaatcagatactgggacggagatggcatgccctgtccagggaagagcaggccaaatactatgaactggcacgcaaagagcggcagctccacatgcaattgtatccaggatggagtgccagggataattacgggaagaagaagagaaggagcagggagaaacatcaggaatccacaacagacaatagccttcattactcttag

SEQ ID NO: 288081 - DNA, 1110 bp, Artificial Sequence
  derived and/or modified sequence
atgcctcagctagactcaggtgggggaggtgcaggaggtggtgacgacctcggggcgcccgatgagttgctggcttttcaggatgagggcgaggagcaggatgataagtcccgggactcagccgccggcccagaacgggacttagccgagctcaagagctcactggtcaatgaatcggagggcgccgctgggggcgcaggcatccccggagtgcctggcgccggcgcaggtgccagaggcgaagcagaggcactaggccgagagcacgccgctcagcggctgtttcccgataagcttcctgaacctttggaagacgggctgaaggcccccgaatgcactagtggcatgtataaggaaaccgtctactccgccttcaacttgctcatgcactatccaccccccagcggggccggacagcatcctcagcctcagccccccctgcacaaagccaatcagccgccacacggcgtcccccagctttctttgtacgagcattttaacagcccccatcccacacctgcccctgcagatatctctcagaagcaggtgcataggcccttgcagaccccggatctgagcggattctattctttgacatccggttctatgggtcagctccctcatacagtttcgtggttcacccaccccagcctgatgctgggaagcggggtgcccggtcatcccgccgccattcctcaccccgcgattgtgccccctagcggtaaacaggagctccagcctttcgataggaacctgaaaacacaggcagaatccaaggctgagaaagaggctaaaaaacccaccatcaagaagccactgaatgccttcatgctctatatgaaggaaatgcgagctaaagttattgccgagtgcactttaaaggagtctgccgctattaaccagattctgggacggaggtggcatgctctgagtagggaggagcaagctaagtactacgaactggcaagaaaggaaagacaactgcatatgcagctgtatcctggatggtccgcccgcgataattacggtaaaaagaagcggagaagccgcgagaagcatcaagagtctaccaccgatggtattcctgcctgtacaatcctgagtccctag

SEQ ID NO: 288082 - DNA, 1155 bp, Artificial Sequence
  derived and/or modified sequence
atgccccagctggacagcggcggcggcggggccggcggcggagatgacctgggcgccccagatgagctgctggccttccaggatgaaggagaggagcaggatgacaagagccgggacagcgctgctggccctgagcgggacctggccgagctgaagagcagcctggtgaatgaaagtgaaggagctgctggaggagctggcatccctggggtgcctggggccggggccggggcccggggggaggccgaggccctgggccgggagcacgccgcccagaggctcttcccagacaagctgcctgagcccctggaggatggcctgaaggccccagaatgtaccagcggcatgtacaaggagaccgtgtacagcgccttcaacctgctgatgcactacccacctccttctggagctggccagcacccccagccccagccccccctgcacaaggccaaccagccccctcatggagtgccccagctgagcctgtatgagcacttcaacagcccccaccccaccccagccccagctgacatcagccagaagcaggtgcaccggcccctgcagaccccagacctgagcggcttctacagcctgaccagcggctccatgggccagctgccccacacagtgtcctggttcacccaccccagcctgatgctgggcagcggcgtgcccggccaccctgctgccatcccccacccagccatcgtgccccccagcggcaagcaggagctgcagccctttgacaggaacctgaagacccaggccgagagcaaggccgagaaggaggccaagaagcccaccatcaagaagcccctgaatgccttcatgctgtacatgaaggagatgagggccaaggtgattgctgagtgcaccctgaaggagagcgctgccatcaaccagatcctgggccgccgctggcacgccctgagccgggaggagcaggccaagtactatgagctggccaggaaggagcggcagctgcacatgcagctgtacccaggctggagcgcccgggacaactacggcaagaagaagagaagaagccgggagaagcaccaggagagcaccacagagaccaactggccccgggagctgaaggatggaaatggccaggagagcctgtccatgagcagcagcagcagccctgcctag

SEQ ID NO: 288083 - DNA, 1098 bp, Artificial Sequence
  derived and/or modified sequence
atgccccagctggacagcggcggcggcggggccggcggcggagatgacctgggcgccccagatgagctgctggccttccaggatgaaggagaggagcaggatgacaagagccgggacagcgctgctggccctgagcgggacctggccgagctgaagagcagcctggtgaatgaaagtgaaggagctgctggaggagctggcatccctggggtgcctggggccggggccggggcccggggggaggccgaggccctgggccgggagcacgccgcccagaggctcttcccagacaagctgcctgagcccctggaggatggcctgaaggccccagaatgtaccagcggcatgtacaaggagaccgtgtacagcgccttcaacctgctgatgcactacccacctccttctggagctggccagcacccccagccccagccccccctgcacaaggccaaccagccccctcatggagtgccccagctgagcctgtatgagcacttcaacagcccccaccccaccccagccccagctgacatcagccagaagcaggtgcaccggcccctgcagaccccagacctgagcggcttctacagcctgaccagcggctccatgggccagctgccccacacagtgtcctggttcacccaccccagcctgatgctgggcagcggcgtgcccggccaccctgctgccatcccccacccagccatcgtgccccccagcggcaagcaggagctgcagccctttgacaggaacctgaagacccaggccgagagcaaggccgagaaggaggccaagaagcccaccatcaagaagcccctgaatgccttcatgctgtacatgaaggagatgagggccaaggtgattgctgagtgcaccctgaaggagagcgctgccatcaaccagatcctgggccgccgctggcacgccctgagccgggaggagcaggccaagtactatgagctggccaggaaggagcggcagctgcacatgcagctgtacccaggctggagcgcccgggacaactacggcaagaagaagagaagaagccgggagaagcaccaggagagcaccacagacaacagcctgcactacagctag

SEQ ID NO: 288084 - DNA, 1110 bp, Artificial Sequence
  derived and/or modified sequence
atgccccagctggacagcggcggcggcggggccggcggcggagatgacctgggcgccccagatgagctgctggccttccaggatgaaggagaggagcaggatgacaagagccgggacagcgctgctggccctgagcgggacctggccgagctgaagagcagcctggtgaatgaaagtgaaggagctgctggaggagctggcatccctggggtgcctggggccggggccggggcccggggggaggccgaggccctgggccgggagcacgccgcccagaggctcttcccagacaagctgcctgagcccctggaggatggcctgaaggccccagaatgtaccagcggcatgtacaaggagaccgtgtacagcgccttcaacctgctgatgcactacccacctccttctggagctggccagcacccccagccccagccccccctgcacaaggccaaccagccccctcatggagtgccccagctgagcctgtatgagcacttcaacagcccccaccccaccccagccccagctgacatcagccagaagcaggtgcaccggcccctgcagaccccagacctgagcggcttctacagcctgaccagcggctccatgggccagctgccccacacagtgtcctggttcacccaccccagcctgatgctgggcagcggcgtgcccggccaccctgctgccatcccccacccagccatcgtgccccccagcggcaagcaggagctgcagccctttgacaggaacctgaagacccaggccgagagcaaggccgagaaggaggccaagaagcccaccatcaagaagcccctgaatgccttcatgctgtacatgaaggagatgagggccaaggtgattgctgagtgcaccctgaaggagagcgctgccatcaaccagatcctgggccgccgctggcacgccctgagccgggaggagcaggccaagtactatgagctggccaggaaggagcggcagctgcacatgcagctgtacccaggctggagcgcccgggacaactacggcaagaagaagagaagaagccgggagaagcaccaggagagcaccacagatggcatcccagcctgcaccatcctgagcccctag

SEQ ID NO: 288085 - DNA, 1155 bp, Artificial Sequence
  derived and/or modified sequence
atgccccagctggacagcggcggcggcggcgccggcggcggcgacgatctaggagcgccagacgaacttctggcgtttcaggacgaaggggaggagcaggacgacaaatctcgggactcagccgcgggaccagaacgagatctagccgaactcaaatcctcccttgtcaatgaatccgagggcgctgcaggcggagcggggataccaggcgtcccaggagccggagccggggcacgaggagaagcggaagccctcgggcgggaacacgccgcccagaggttgtttcctgacaagctccctgagcctctggaagacggactgaaagccccagaatgtacctccggtatgtacaaggagaccgtgtatagcgcctttaatctgctaatgcattatccacctccttctggtgcagggcagcatccccagcctcagccacccctgcataaagccaatcagccaccacacggggttccccagctgtccctatacgaacacttcaactcaccccatcccacacctgcaccagccgacatctcacaaaagcaggtgcataggcctctacagaccccagatttgtcaggcttctactcactgacttcgggatccatggggcagctgccccacacagtttcttggtttacacacccttctctgatgctaggcagtggagtccctggccatcctgctgcaatccctcaccccgctattgtgccgcctagtggtaagcaagaactgcagcccttcgatcgcaatctgaagacacaggccgagagcaaagctgaaaaggaggccaagaaacctacaattaaaaaaccacttaatgcattcatgttgtatatgaaggagatgagagcgaaagtgatcgccgagtgtacactaaaggagagcgcagcgatcaaccaaatactcggtcgccggtggcacgccctcagccgcgaagaacaggcaaagtactatgagctggccagaaaagagagacaactccacatgcagctgtacccaggttggagcgctcgtgacaactacgggaagaagaagaggaggtctcgcgagaaacaccaggaatcgactactgaaaccaactggccacgagagctaaaggatggaaacggccaggaaagcttgtccatgtccagttcctcatctcctgcttag

SEQ ID NO: 288086 - DNA, 1098 bp, Artificial Sequence
  derived and/or modified sequence
atgccccagctggacagcggcggcggcggcgccggcggcggcgacgatctaggtgcgccagatgaacttctggcttttcaggatgagggcgaagagcaagacgacaagtctagagacagtgccgctggacctgagcgggacctagccgagctcaagagttcactggtaaatgaatcagagggcgcggccggaggggcggggatccctggcgtgcctggtgctggggccggtgcgcggggagaggcagaggcactgggaagagagcatgcagcccagaggttatttcctgacaaattgcctgagccactggaagacgggctcaaagctccagaatgtacctcagggatgtacaaggaaacagtttactcggccttcaacttgcttatgcactacccccctcctagtggtgccggtcagcacccacagccacagccccctttacacaaggccaatcagccaccacatggtgttcctcagctgtctctgtatgagcacttcaatagcccacatcccacacccgctccagccgatatctcccagaagcaagttcaccgccctcttcagacacctgatctctccggcttttattcactcacttcggggtcaatgggtcagctgccacacactgtgtcatggttcacacacccaagtctgatgttgggctcaggcgtccctgggcacccagcagctatcccacaccccgctatcgtcccaccgtccgggaaacaagaacttcagccattcgatcgcaacctcaagacacaggccgagtccaaagcagagaaggaagctaagaagcccaccataaaaaagccacttaatgccttcatgctgtacatgaaggagatgcgggcaaaagtgatagctgagtgcaccctgaaagagtccgcagccatcaatcagattctggggaggcggtggcacgcattgtcacgcgaggagcaagccaagtactatgaacttgcccgcaaggagcgacagctccacatgcagctgtatccagggtggagcgcgagggacaattatggcaaaaagaagcgaaggagccgtgagaaacaccaggagagtacaaccgacaatagtctccactacagctag

SEQ ID NO: 288087 - DNA, 1110 bp, Artificial Sequence
  derived and/or modified sequence
atgccccagctggacagcggcggcggcggcgccggcggcggcgacgatctgggtgctccggatgaactcctggcttttcaggacgagggtgaggaacaggacgacaaaagtagggactccgccgctggccctgagcgggacctggccgaacttaaatcttcacttgttaacgagtcagagggcgccgcaggtggagccgggattcctggggtgcccggcgccggagccggcgcacgaggcgaggcagaggctctcggacgagagcatgctgcccagcgcctgtttccggacaagttgcctgagcccctggaggacgggctcaaggctcccgaatgtaccagtggtatgtacaaggagacagtatatagtgcgttcaacctgctgatgcactacccccctccttccggagccgggcaacatccacagccgcagccgccgttgcacaaagctaatcagccgccccacggcgttccacagcttagcctgtatgagcatttcaatagtccacaccctacgcctgctccagccgatatttctcagaagcaggttcatagaccacttcagactcccgatctttctggattctatagcctgacctctggctctatgggccaactgccacacacagtgagctggttcacacatccttccctgatgctcggatccggggtgccagggcaccccgccgctataccccaccctgccattgtcccgccatccggcaaacaggagctacagccttttgaccgaaacctaaaaacccaagctgagagtaaggcagaaaaagaagcaaagaagccgacaattaagaagcctctaaatgcctttatgttgtacatgaaggaaatgcgtgccaaggtgatcgccgagtgcactttgaaagaatcggcggctattaaccagatccttggaagacggtggcatgccctcagtagagaggagcaggctaaatattatgaacttgcccgaaaagaacgccagcttcacatgcagctgtacccaggatggtccgccagggacaattacgggaagaaaaaaagacgcagcagggaaaaacatcaggaatcaacaacggacggcatccctgcctgcaccatcttgagcccctag

SEQ ID NO: 288088 - DNA, 1351 bp, Artificial Sequence
  derived and/or modified sequence
cccgccagctcgcggagccgctctgccccgcgccctagcccgcgcctgcagcccgcccaggcggagtcagcccgcgctccgcccgccgcgatccgagctcggaggttcggactccgggctcgccgccccccgggccggctccgcgccccgcactcccggcgcccagcgccccgcgccccggcgggcggagcgcaccatgccgcagctggactccggcgggggcggcgcgggcggcggcgacgacctcggcgcgccggacgagctgctggccttccaggatgaaggcgaggagcaggacgacaagagccgcgacagcgccgccggtcccgagcgcgacctggccgagctcaagtcgtcgctcgtgaacgagtccgagggcgcggccggcggcgcagggatcccgggggtcccgggggccggcgccggggcccgcggcgaggccgaggctctcgggcgggaacacgctgcgcagagactcttcccggacaaacttccagagcccctggaggacggcctgaaggccccggagtgcaccagcggcatgtacaaagagaccgtctactccgccttcaatctgctcatgcattacccacccccctcgggagcagggcagcacccccagccgcagcccccgctgcacaaggccaatcagcccccccacggtgtcccccaactctctctctacgaacatttcaacagcccacatcccacccctgcacctgcggacatcagccagaagcaagttcacaggcctctgcagacccctgacctctctggcttctactccctgacctcaggcagcatggggcagctcccccacactgtgagctggttcacccacccatccttgatgctaggttctggtgtacctggtcacccagcagccatcccccacccggccattgtgcccccctcagggaagcaggagctgcagcccttcgaccgcaacctgaagacacaagcagagtccaaggcagagaaggaggccaagaagccaaccatcaagaagcccctcaatgccttcatgctgtacatgaaggagatgagagccaaggtcattgcagagtgcacacttaaggagagcgctgccatcaaccagatcctgggccgcaggtggcacgcgctgtcgcgagaagagcaggccaagtactatgagctggcccgcaaggagaggcagctgcacatgcagctatacccaggctggtcagcgcgggacaactacgggaagaagaagaggcggtcgagggaaaagcaccaagaatccaccacagagacaaactggcccagagaactcaaggatggtaatggacaagagtcactgtccatgtcttcttcctctagcccagcttga

SEQ ID NO: 288089 - DNA, 1294 bp, Artificial Sequence
  derived and/or modified sequence
cccgccagctcgcggagccgctctgccccgcgccctagcccgcgcctgcagcccgcccaggcggagtcagcccgcgctccgcccgccgcgatccgagctcggaggttcggactccgggctcgccgccccccgggccggctccgcgccccgcactcccggcgcccagcgccccgcgccccggcgggcggagcgcaccatgccgcagctggactccggcgggggcggcgcgggcggcggcgacgacctcggcgcgccggacgagctgctggccttccaggatgaaggcgaggagcaggacgacaagagccgcgacagcgccgccggtcccgagcgcgacctggccgagctcaagtcgtcgctcgtgaacgagtccgagggcgcggccggcggcgcagggatcccgggggtcccgggggccggcgccggggcccgcggcgaggccgaggctctcgggcgggaacacgctgcgcagagactcttcccggacaaacttccagagcccctggaggacggcctgaaggccccggagtgcaccagcggcatgtacaaagagaccgtctactccgccttcaatctgctcatgcattacccacccccctcgggagcagggcagcacccccagccgcagcccccgctgcacaaggccaatcagcccccccacggtgtcccccaactctctctctacgaacatttcaacagcccacatcccacccctgcacctgcggacatcagccagaagcaagttcacaggcctctgcagacccctgacctctctggcttctactccctgacctcaggcagcatggggcagctcccccacactgtgagctggttcacccacccatccttgatgctaggttctggtgtacctggtcacccagcagccatcccccacccggccattgtgcccccctcagggaagcaggagctgcagcccttcgaccgcaacctgaagacacaagcagagtccaaggcagagaaggaggccaagaagccaaccatcaagaagcccctcaatgccttcatgctgtacatgaaggagatgagagccaaggtcattgcagagtgcacacttaaggagagcgctgccatcaaccagatcctgggccgcaggtggcacgcgctgtcgcgagaagagcaggccaagtactatgagctggcccgcaaggagaggcagctgcacatgcagctatacccaggctggtcagcgcgggacaactacgggaagaagaagaggcggtcgagggaaaagcaccaagaatccaccacagataactctcttcactattcctag

SEQ ID NO: 288090 - DNA, 1155 bp, Artificial Sequence
  derived and/or modified sequence
atgcctcagctggattccggcggtggcggtgcaggcggtggtgacgatctgggcgctcctgacgagctgctcgcttttcaagatgagggggaggagcaggacgataaatcgagagactcggcagccggacctgaaagggatcttgccgagctcaaaagctctctggtcaacgagtccgaaggcgcagctggtggagctgggattccaggggttcccggagccggagctggcgcacggggagaggcagaagcccttggaagagagcatgctgctcaacggctgttccccgacaagttgcctgagcccttggaagacggcctgaaggcccctgagtgcacttctggaatgtacaaggagactgtgtattccgcatttaacctacttatgcactatcccccaccttctggagccggacaacacccccaaccacaacctccacttcataaagcaaatcagcccccacatggagtgccccagctctctctgtatgaacatttcaatagtccccaccccacaccagccccagcggacatctcacaaaagcaggtccacagacccttgcaaacccctgacttgtccggcttttactccttaaccagcgggtccatgggacagctgccccacactgtctcttggtttacacacccatcactgatgttgggctccggagttcccggtcatcctgctgccattccacaccccgcaattgtgccacctagtggtaaacaggagctgcagccgtttgatcgcaatctaaagacccaagcagagtctaaagctgaaaaggaggcaaagaaacccaccatcaaaaagcctctgaacgccttcatgctgtacatgaaggagatgcgggctaaggtgatagcggaatgtactttaaaagaatctgccgcaatcaatcagatcctgggccgtaggtggcacgccctgagccgagaggagcaagctaagtactatgagctggcaagaaaggaacggcaactgcacatgcagctgtacccagggtggtctgcccgtgacaactacggaaagaaaaagaggcggtctcgggagaaacaccaggagtctacaactgaaactaattggccacgagaattgaaggatggaaacggacaggaaagcctctctatgagcagtagcagctctccagcttag

SEQ ID NO: 288091 - DNA, 1098 bp, Artificial Sequence
  derived and/or modified sequence
atgccccagctcgatagtggtggcggtggggcaggtggtggcgacgacctcggtgcccctgatgaactgctggcattccaggatgaaggggaggagcaggacgacaaatccagggatagcgctgcgggacccgaaagggaccttgctgagctgaaaagcagcctagtgaatgaatctgagggcgcagcaggaggcgctggtatccccggagttcctggtgccggtgctggtgccaggggcgaggcagaggcgctcgggagagaacacgcggcacagaggttgttcccggacaagctgccagagcctctcgaggacggcttgaaggcacccgagtgcacctctggtatgtataaggaaaccgtgtacagcgcatttaatctgctgatgcattacccgccacctagcggggctggtcagcatcctcaacctcagccccctctacataaagccaaccagcctccgcatggggtcccccaactgagtctgtatgagcacttcaattcaccacatcccaccccagcccctgcggatatctcacagaaacaggttcatcgcccactccagacacccgacctcagtggcttttatagcttaacttcaggatcaatgggacagctcccccacacggtatcatggttcacccatccttccttaatgttgggatcaggggtgccaggccaccccgcagcaatcccgcacccggctatcgtgcccccttcaggtaagcaggagctgcagccgttcgatagaaatttaaagacccaggcagaatctaaggcagagaaggaggccaaaaagcctaccattaagaagcccctgaatgcattcatgctgtacatgaaagagatgcgggctaaagtgatagctgaatgtacgctgaaagagtctgccgcaatcaaccagattttgggacggagatggcatgccctttcacgggaagaacaagccaaatattacgaactcgctcggaaggagcggcagcttcacatgcaactctacccgggttggtccgcgcgagacaactacgggaaaaagaaaagaagatctcgagaaaagcatcaggagtccacaactgacaacagcctccattactcatag

SEQ ID NO: 288092 - DNA, 1110 bp, Artificial Sequence
  derived and/or modified sequence
atgcctcagttagattctgggggaggaggagccggtgggggtgacgacctgggcgcaccagacgaactattggccttccaggacgaaggcgaggagcaggatgacaaatccagggactccgctgcagggcctgagagggatctggctgaacttaagtcctcactggtcaatgagagcgaaggagctgcgggaggggctggaatcccaggagtcccgggtgccggagcgggagccagaggggaggccgaggcccttggaagagagcatgccgcacagcgcctttttccagataagctgcccgagcccctggaggatggtctgaaggcacccgaatgcaccagtggcatgtataaggagacggtgtattcagcctttaacttgcttatgcactaccctcctccaagcggagccggacagcacccccagcctcagccaccactacacaaagcaaatcagccaccccacggagttccacagttatcgctgtacgagcattttaatagccctcacccaaccccagcacctgcagatatttctcagaaacaagtgcacaggccccttcaaacacctgacctctctgggttttatagcctgacgtcgggcagtatgggtcaattgccacataccgttagctggttcactcatccgagtctgatgctcgggagtggcgtgcctggacaccctgcggcaatccctcatccggctattgttcctccttcaggaaaacaggagcttcaaccctttgatagaaatctgaagacccaggccgagagcaaggcagagaaggaggctaaaaagccgaccatcaagaaacccttaaatgcttttatgctgtacatgaaagagatgcgagctaaggtgatcgccgaatgtaccctcaaggagtcagccgcaatcaaccagattttaggccgtcggtggcatgcactgtctcgggaggagcaggccaaatattacgaattggcacgcaaagaacgacagctgcacatgcagctgtaccccggatggagtgcccgagacaattacggcaaaaaaaagagaaggtccagagagaagcatcaggagagtaccactgatggcattcctgcctgcactatcctgagcccatag

SEQ ID NO: 288093 - DNA, 1306 bp, Artificial Sequence
  derived and/or modified sequence
cccgccagctcgcggagccgctctgccccgcgccctagcccgcgcctgcagcccgcccaggcggagtcagcccgcgctccgcccgccgcgatccgagctcggaggttcggactccgggctcgccgccccccgggccggctccgcgccccgcactcccggcgcccagcgccccgcgccccggcgggcggagcgcaccatgccgcagctggactccggcgggggcggcgcgggcggcggcgacgacctcggcgcgccggacgagctgctggccttccaggatgaaggcgaggagcaggacgacaagagccgcgacagcgccgccggtcccgagcgcgacctggccgagctcaagtcgtcgctcgtgaacgagtccgagggcgcggccggcggcgcagggatcccgggggtcccgggggccggcgccggggcccgcggcgaggccgaggctctcgggcgggaacacgctgcgcagagactcttcccggacaaacttccagagcccctggaggacggcctgaaggccccggagtgcaccagcggcatgtacaaagagaccgtctactccgccttcaatctgctcatgcattacccacccccctcgggagcagggcagcacccccagccgcagcccccgctgcacaaggccaatcagcccccccacggtgtcccccaactctctctctacgaacatttcaacagcccacatcccacccctgcacctgcggacatcagccagaagcaagttcacaggcctctgcagacccctgacctctctggcttctactccctgacctcaggcagcatggggcagctcccccacactgtgagctggttcacccacccatccttgatgctaggttctggtgtacctggtcacccagcagccatcccccacccggccattgtgcccccctcagggaagcaggagctgcagcccttcgaccgcaacctgaagacacaagcagagtccaaggcagagaaggaggccaagaagccaaccatcaagaagcccctcaatgccttcatgctgtacatgaaggagatgagagccaaggtcattgcagagtgcacacttaaggagagcgctgccatcaaccagatcctgggccgcaggtggcacgcgctgtcgcgagaagagcaggccaagtactatgagctggcccgcaaggagaggcagctgcacatgcagctatacccaggctggtcagcgcgggacaactacgggaagaagaagaggcggtcgagggaaaagcaccaagaatccaccacagatgggatccctgcctgtaccatcctgagcccttaa

SEQ ID NO: 288094 - DNA, 584 bp, Artificial Sequence
  derived and/or modified sequence
gcgccgccccagttgcgcgcggccctcggggtctccagcgcgcagagcgtccctgccccggcgtcggccccgacccccgcggtcccaccgcccctcactcccctccggttctccctccaggctctcgggcgggaacacgctgcgcagagactcttcccggacaaacttccagagcccctggaggacggcctgaaggccccggagtgcaccagcggcatgtacaaagagaccgtctactccgccttcaatctgctcatgcattacccacccccctcgggagcagggcagcacccccagccgcagcccccgctgcacaaggccaatcagcccccccacggtgtcccccaactctctctctacgaacatttcaacagcccacatcccacccctgcacctgcggacatcagccagaagcaagttcacaggcctctgcagacccctgacctctctggcttctactccctgacctcaggcagcatggggcagctcccccacactgtgagctggttcacccacccatccttgatgctaggttctggtgtacctggtcacccagcagccatcccccacccggccattgtgcc

SEQ ID NO: 288095 - DNA, 539 bp, Artificial Sequence
  derived and/or modified sequence
acttccggtgccctgacctttataggagtaaacagacccccgccatccccgcctcccctcctgcccaggcctgaaggccccggagtgcaccagcggcatgtacaaagagaccgtctactccgccttcaatctgctcatgcattacccacccccctcgggagcagggcagcacccccagccgcagcccccgctgcacaaggccaatcagcccccccacggtgtcccccaactctctctctacgaacatttcaacagcccacatcccacccctgcacctgcggacatcagccagaagcaagttcacaggcctctgcagacccctgacctctctggcttctactccctgacctcaggcagcatggggcagctcccccacactgtgagctggttcacccacccatccttgatgctaggttctggtgtacctggtcacccagcagccatcccccacccggccattgtgcccccctcagggaagcaggagctgcagcccttcgaccgcaacctgaagacacaagcagagtccaaggcagagaagg

SEQ ID NO: 288096 - DNA, 1155 bp, Artificial Sequence
  derived and/or modified sequence
atgccccagctggacagcggcggcggcggcgccggcggcggcgacgacctgggcgcccccgacgagctgctggccttccaggacgagggcgaggagcaggacgacaagagcagagacagcgccgccggccccgagagagacctggccgagctgaagagcagcctggtgaacgagagcgagggcgccgccggcggcgccggcatccccggcgtgcccggcgccggcgccggcgccagaggcgaggccgaggccctgggcagagagcacgccgcccagagactgttccccgacaagctgcccgagcccctggaggacggcctgaaggcccccgagtgcaccagcggcatgtacaaggagaccgtgtacagcgccttcaacctgctgatgcactaccccccccccagcggcgccggccagcacccccagccccagccccccctgcacaaggccaaccagcccccccacggcgtgccccagctgagcctgtacgagcacttcaacagcccccaccccacccccgcccccgccgacatcagccagaagcaggtgcacagacccctgcagacccccgacctgagcggcttctacagcctgaccagcggcagcatgggccagctgccccacaccgtgagctggttcacccaccccagcctgatgctgggcagcggcgtgcccggccaccccgccgccatcccccaccccgccatcgtgccccccagcggcaagcaggagctgcagcccttcgacagaaacctgaagacccaggccgagagcaaggccgagaaggaggccaagaagcccaccatcaagaagcccctgaacgccttcatgctgtacatgaaggagatgagagccaaggtgatcgccgagtgcaccctgaaggagagcgccgccatcaaccagatcctgggcagaagatggcacgccctgagcagagaggagcaggccaagtactacgagctggccagaaaggagagacagctgcacatgcagctgtaccccggctggagcgccagagacaactacggcaagaagaagagaagaagcagagagaagcaccaggagagcaccaccgagaccaactggcccagagagctgaaggacggcaacggccaggagagcctgagcatgagcagcagcagcagccccgcctag

SEQ ID NO: 288097 - DNA, 1098 bp, Artificial Sequence
  derived and/or modified sequence
atgccccagctggacagcggcggcggcggcgccggcggcggcgacgacctgggcgcccccgacgagctgctggccttccaggacgagggcgaggagcaggacgacaagagcagagacagcgccgccggccccgagagagacctggccgagctgaagagcagcctggtgaacgagagcgagggcgccgccggcggcgccggcatccccggcgtgcccggcgccggcgccggcgccagaggcgaggccgaggccctgggcagagagcacgccgcccagagactgttccccgacaagctgcccgagcccctggaggacggcctgaaggcccccgagtgcaccagcggcatgtacaaggagaccgtgtacagcgccttcaacctgctgatgcactaccccccccccagcggcgccggccagcacccccagccccagccccccctgcacaaggccaaccagcccccccacggcgtgccccagctgagcctgtacgagcacttcaacagcccccaccccacccccgcccccgccgacatcagccagaagcaggtgcacagacccctgcagacccccgacctgagcggcttctacagcctgaccagcggcagcatgggccagctgccccacaccgtgagctggttcacccaccccagcctgatgctgggcagcggcgtgcccggccaccccgccgccatcccccaccccgccatcgtgccccccagcggcaagcaggagctgcagcccttcgacagaaacctgaagacccaggccgagagcaaggccgagaaggaggccaagaagcccaccatcaagaagcccctgaacgccttcatgctgtacatgaaggagatgagagccaaggtgatcgccgagtgcaccctgaaggagagcgccgccatcaaccagatcctgggcagaagatggcacgccctgagcagagaggagcaggccaagtactacgagctggccagaaaggagagacagctgcacatgcagctgtaccccggctggagcgccagagacaactacggcaagaagaagagaagaagcagagagaagcaccaggagagcaccaccgacaacagcctgcactacagctag

SEQ ID NO: 288098 - DNA, 1110 bp, Artificial Sequence
  derived and/or modified sequence
atgccccagctggacagcggcggcggcggcgccggcggcggcgacgacctgggcgcccccgacgagctgctggccttccaggacgagggcgaggagcaggacgacaagagcagagacagcgccgccggccccgagagagacctggccgagctgaagagcagcctggtgaacgagagcgagggcgccgccggcggcgccggcatccccggcgtgcccggcgccggcgccggcgccagaggcgaggccgaggccctgggcagagagcacgccgcccagagactgttccccgacaagctgcccgagcccctggaggacggcctgaaggcccccgagtgcaccagcggcatgtacaaggagaccgtgtacagcgccttcaacctgctgatgcactaccccccccccagcggcgccggccagcacccccagccccagccccccctgcacaaggccaaccagcccccccacggcgtgccccagctgagcctgtacgagcacttcaacagcccccaccccacccccgcccccgccgacatcagccagaagcaggtgcacagacccctgcagacccccgacctgagcggcttctacagcctgaccagcggcagcatgggccagctgccccacaccgtgagctggttcacccaccccagcctgatgctgggcagcggcgtgcccggccaccccgccgccatcccccaccccgccatcgtgccccccagcggcaagcaggagctgcagcccttcgacagaaacctgaagacccaggccgagagcaaggccgagaaggaggccaagaagcccaccatcaagaagcccctgaacgccttcatgctgtacatgaaggagatgagagccaaggtgatcgccgagtgcaccctgaaggagagcgccgccatcaaccagatcctgggcagaagatggcacgccctgagcagagaggagcaggccaagtactacgagctggccagaaaggagagacagctgcacatgcagctgtaccccggctggagcgccagagacaactacggcaagaagaagagaagaagcagagagaagcaccaggagagcaccaccgacggcatccccgcctgcaccatcctgagcccctag

SEQ ID NO: 288099 - DNA, 981 bp, Artificial Sequence
  derived and/or modified sequence
atggacagcaacctgagagacatcaacgagagcacccccctggcctacgccctgtactgcggccacaccgcctgcgtgaagctgctgagccaggagagcagaaccgagcccaccagacccccccccagccagagcagcagaccccagaagaaggagagaagattcaacgtgctgaaccagatcttctgcaagaacaagaaggaggagcagagagcccaccagaaggaccccagcagagacagatacagagaggaggacaccagcgaggtgaacgacatcatcaccaccttcgacagcatcgtgggcaccaactgccaggagcagcccggcgaccaggtggccatggtggagttcaagaagaagaccagcgacaacagcaagtacctgctgcccgagaagaagcccctggccagaaagggcctgccccccatcagaacccagagcctgccccccatcaccctgggcaacaacttcctgaccgccagccacagagccaccagccacgccggcctgagcagcgccccccaccacatggcccagagaagccagaagagcagaagcgagcaggacctgctgaacaacagaaccggctgccagatgctgctggacaacccctggaagagcgacagcaaccaggtgttcagctacaaggtgtggaccgtgagcagcagcgacaagctgctggacagactgctgagcgtgagacccggccaccaggaggtgagcgtgcccccccacctgagacacctgcacaaccccagcagcggccagaacttccagcacctgagccccaacagacacaagatcagagacctgcccttcaccagaaacaacctggcccccctgcccgaccagaagttcctgagcggcgagcccctgagaaccaacagagtgctgcccgccatccccagccagagaagacacagcaccgccgccgaggagagcgagcacagcgccaaccccaccagcgacgagaactag

SEQ ID NO: 288100 - DNA, 981 bp, Artificial Sequence
  derived and/or modified sequence
atggactctaaccttagggacattaatgaaagtacaccattagcttacgccctttattgcggacatacggcttgcgttaaactgctctcccaggagtcgcgcactgaacctacccgcccccctccatcccagtcctctagaccccagaaaaaggagaggcgtttcaacgtactgaatcaaatattttgtaagaataagaaagaagagcagcgcgcccaccagaaagatccgtctcgcgataggtaccgtgaagaagacaccagtgaggtgaatgatattatcacaactttcgacagcatcgtcggaactaactgccaggaacagcccggtgaccaggtggcgatggtggaattcaaaaagaaaacaagcgataattcgaagtaccttttgcccgagaagaaacctttggcaagaaaggggctaccaccaatcagaactcaatcgctgccaccgatcaccctggggaacaattttcttacagctagccaccgggcaacttcccatgcaggccttagttccgcgcctcaccacatggcccagcgtagtcagaagagccgtagtgaacaagaccttctgaacaaccgaacagggtgtcagatgctgcttgataacccctggaaaagcgactcaaaccaggtcttcagctataaggtgtggaccgtgagctcctccgataagctgcttgaccgcctgctttctgttcgtcccggacaccaagaggtctccgtccctccacacctgcggcatctgcacaatccatcgtcagggcagaacttccagcatctgagccccaaccggcacaaaatacgcgatttgccatttacacgtaacaacctcgctccgctaccagatcaaaagttcttgagcggtgagcctctgaggactaatcgcgtactgcccgccatcccctcccagcggaggcactctacagccgccgaggaaagcgaacactctgctaatcccacgagcgacgagaactag

SEQ ID NO: 288101 - DNA, 981 bp, Artificial Sequence
  derived and/or modified sequence
atggacagcaacctgcgggacatcaatgaaagcacccccctggcctatgccctgtactgcggccacacagcctgtgtgaagctgctgagccaggagagcaggacagagcccacccggcccccacccagccagagcagccggccccagaagaaggagcggcgcttcaacgtgctgaaccagatcttctgcaagaacaagaaggaggagcagagggcccaccagaaggaccccagccgggaccgctaccgggaggaggacaccagcgaggtgaatgacatcatcaccacctttgacagcatcgtgggcaccaactgccaggagcagcccggggaccaggtggccatggtggagttcaagaagaagaccagtgacaacagcaagtacctgctgcctgagaagaagcccctggccaggaagggcctgccccccatccgcacccagagcctgccccccatcaccctgggcaacaacttcctgacagccagccaccgggccaccagccatgctggcctgagcagcgccccccaccacatggcccagaggagccagaagagccgctctgagcaggacctgctgaacaacagaacaggctgccagatgctgctggacaacccctggaagagtgacagcaaccaggtgttctcctacaaggtgtggacagtgagcagcagtgacaagctgctggaccggctgctgtctgtgcggcccggccaccaggaggtgtctgtgcccccccacctgcggcacctgcacaaccccagcagcggccagaacttccagcacctgagccccaacagacacaagatccgggacctgcccttcaccaggaacaacctggcccccctgcctgaccagaagttcctgtctggagagcccctgcggaccaacagagtgctgcctgccatccccagccagaggaggcacagcacagctgctgaggagagcgagcacagcgccaaccccaccagtgatgaaaattag

SEQ ID NO: 288102 - DNA, 981 bp, Artificial Sequence
  derived and/or modified sequence
atggacagcaacctgcgggacatcaacgagagcacccccctggcctatgccctgtactgtggacataccgcctgcgtcaagctactctctcaggagtccaggaccgaacctacgagaccccctccatcacaatcttctcgccctcagaagaaggagagacgttttaacgtcctcaaccaaatcttttgcaagaataagaaagaggaacagcgggcacaccagaaggatcccagccgtgaccggtaccgcgaggaggacacgtccgaggtaaatgatatcattaccacatttgattccatagttggcaccaattgtcaggaacagccaggagatcaggtagcgatggttgagttcaagaaaaagaccagcgacaattcgaagtatctgctcccagaaaaaaaaccactagctagaaagggacttcctccgatccgcacacagtctctgcctcccataaccttagggaataactttcttaccgcctctcatcgcgccacatcgcacgccggcctttcctccgccccacatcacatggcccagaggtctcagaaatcccgttccgaacaggacctgctgaacaatagaaccggatgtcaaatgctcttagacaacccttggaagtctgactccaaccaggtgttctcatacaaagtttggactgtttcctcatctgacaaactattggacaggttgctgagcgtacgccctgggcaccaagaagtgtcggtcccaccccacctccggcatcttcataatcccagttcaggccaaaatttccagcacttatccccaaacagacacaagatccgggacttgcccttcactcggaacaacctggcacctctccctgaccaaaaattcctctcgggggaacccctacggactaacagggtgctgcctgcgatcccaagtcagagaagacattccaccgctgcagaagagtctgaacactcagccaaccctacttcggacgagaattag

SEQ ID NO: 288103 - DNA, 1518 bp, Artificial Sequence
  derived and/or modified sequence
gtccaccatcatccttcgggctcatttaacacttactatttctatactgtaaatggcaacaagattttccctacctcaacctgactttgagcaggagctgttgctggctaagcagcctgaacaattcacatgctcagacgcttgtgcttttttcacatggcccctccaggacacctctgcactgggctgcagctgcagggaaggccgaatgtgtccagtcactgctggagttgggaatggacagcaacctgcgggacatcaatgagagcacgcccttggcctatgccctgtactgcggtcacacggcgtgtgtcaaactcctctcccaagagagcagaacagagcctactcgaccccctccctcccagagcagtcggccccagaagaaggagagacggttcaacgtgctcaaccaaatattctgcaaaaacaagaaagaagagcagagagcccatcagaaggatcccagcagggaccgatacagagaggaggacacctcagaagtcaatgacatcatcaccacctttgatagcatcgtgggtaccaactgccaagaacagcctggtgatcaggtggctatggttgaatttaagaagaaaacctcagacaattcaaaatatctcttaccagaaaagaaaccgctggcccgtaaggggcttccaccaatcagaacgcagagtctcccacccatcaccctgggcaataacttcctaacagcctcccatagggccacttcccatgcaggcctgagctctgctcctcatcatatggcccagcgatctcagaaaagtcgaagtgagcaggatttattaaataacagaactggctgccagatgttactagataacccctggaagagtgattctaatcaggtattttcctacaaagtttggactgtgtcttcttctgataagctgctggacagattgctcagtgtccggcctggtcaccaagaggtctccgtgccaccacaccttcgccatctacataatccatcatcaggacaaaattttcagcatctttccccaaacagacacaaaatcagggatcttcctttcactcggaacaacctagctcccctaccagatcaaaaatttctatctggagaacctctgcggacaaaccgagtgcttcctgcaattccaagtcaacgaagacacagcacagcagcagaagagagtgaacattctgccaaccccaccagtgatgaaaattaactgtgggccactcgctgcagaaatgtagatgaatatgtattttcaactctcaaaggacaagattactccagtttgtaagaacgaagaccaatttagtaagctgcattctataagccatcagttttataactcgaaattctttattccaaataaagatactccctaaataagcacttagaatatttgggtgtgcatattaagtctgtgaatttctgtgacttccacatgccaaaattaaaagacaaaatatgttatcagtaggaaaactgagctatgtttggtttgctttgtggcatgtgca

SEQ ID NO: 288104 - DNA, 981 bp, Artificial Sequence
  derived and/or modified sequence
atggacagcaacctgcgggatatcaatgaaagtacacccctcgcatacgcattgtactgcggacatacagcttgcgtcaagctcttgtcacaagaatctcggacagagccaaccagacctccaccatctcaatcctcacggccacagaagaaggagagaaggtttaatgtcctaaaccaaatcttctgcaaaaacaagaaggaagaacaacgggcacatcaaaaggatccctcccgcgaccggtaccgcgaggaggataccagcgaggtcaacgacattatcaccactttcgatagtatagtagggaccaattgccaggagcagcccggagaccaggtggctatggtggaattcaaaaaaaagacatcagacaactcgaaatacctcctgcccgagaaaaagccactggctcgaaaaggactccctccaatcaggacacagagcctcccccctattacgttgggaaacaactttcttaccgcgtcgcacagggccacctcccacgccggactcagctctgccccacaccatatggcacaacgcagccagaagagtaggagtgagcaggacctattgaacaatagaaccggctgccaaatgctgctggataacccctggaaatccgactccaaccaagttttctcctataaggtctggaccgtaagcagtagtgataaactgctggatcggcttctctctgtgcggcctggccatcaggaagtctccgtgcctcctcacctccggcacctgcacaacccctcctccggtcagaatttccagcacctgagcccaaatagacacaaaatcagggacctgcccttcacccgaaacaatctggcccctttgcctgatcagaagtttttgagtggggaacccctgcgcaccaaccgcgtgttgccagccataccatcccaacgcaggcactctacagccgctgaagaaagtgaacactcagcgaatcctactagcgatgaaaattag

SEQ ID NO: 288105 - protein, 791 aa, Artificial Sequence
  derived and/or modified sequence
MSQPGQKPAASPRPRRAAAARRTHEHVSEKTSESPSKPGEKKGSDEKKAASLGSSQSSRTYAGGTASATKVSASSGATSKSSSMNPTETKAIPVSQQMEGPHLPNKKKHKKQAVKTEPEKKSQSTKLSVVHEKKSQEGKPKEHTEPKSLPKQASDTGSNDAHNKKAVSRSAEQQPSEKSTEPKTKPQDMISAGGESVAGITAISGKPGDKKKEKKSLTPAVPVESKPDKPSGKSGMDAALDDLIDTLGGPEETEEENTTYTGPEVSDPMSSTYIEELGKREVTIPPKYRELLAKKEGITGPPADSSKPIGPDDAIDALSSDFTCGSPTAAGKKTEKEESTEVLKAQSAGTVRSAAPPQEKKRKVEKDTMSDQALEALSASLGTRQAEPELDLRSIKEVDEAKAKEEKLEKCGEDDETIPSEYRLKPATDKDGKPLLPEPEEKPKPRSESELIDELSEDFDRSECKEKPSKPTEKTEESKAAAPAPVSEAVCRTSMCSIQSAPPEPATLKGTVPDDAVEALADSLGKKEADPEDGKPVMDKVKEKAKEEDREKLGEKEETIPPDYRLEEVKDKDGKPLLPKESKEQLPPMSEDFLLDALSEDFSGPQNASSLKFEDAKLAAAISEVVSQTPASTTQAGAPPRDTSQSDKDLDDALDKLSDSLGQRQPDPDENKPMEDKVKEKAKAEHRDKLGERDDTIPPEYRHLLDDNGQDKPVKPPTKKSEDSKKPADDQDPIDALSGDLDSCPSTTETSQNTAKDKCKKAASSSKAPKNGGKAKDSAKTTEETSKPKDD

SEQ ID NO: 288106 - DNA, 2376 bp, Artificial Sequence
  derived and/or modified sequence
atgtcccagcccggtcagaagcctgctgcatctcctaggccccgacgagctgcagctgccagacgcactcacgaacacgttagtgagaagacaagtgaatctcctagtaagcctggggagaagaaaggaagcgatgaaaagaaagctgcctctctgggctctagtcagtcctcccgcacttacgctggtgggactgcctccgcaaccaaagtgtccgcatcttcaggtgccacatctaagagttccagtatgaacccaactgaaacaaaagccatacccgtgtcccaacagatggaagggcctcatttgcctaacaaaaagaagcacaagaagcaggccgtcaagaccgaaccagagaagaagagtcagagcacaaaattatcggtagttcacgaaaaaaaaagccaggaaggaaaacctaaggagcacaccgaacctaagtccctccctaagcaggctagtgatactggttcaaatgatgcacacaacaaaaaagctgtaagtcgtagcgcggagcaacagccttctgagaaatcaactgaacccaaaaccaagcctcaggatatgatttctgctggaggtgagtctgtggccgggatcactgctatttcaggaaaaccgggggacaagaaaaaagaaaagaagagtttgactccagccgtgccagtcgaatcgaaacccgataagccttctggaaagagtgggatggacgccgcactagatgaccttatcgataccctggggggccccgaagagacagaagaagaaaatacgacatacacgggtcctgaagtctcggaccccatgagcagcacttacatcgaggagttgggtaaaagagaagtgactataccacccaagtaccgtgaactactggccaagaaggagggcatcacaggcccacctgctgacagttcgaaacctattggtcccgacgacgccatcgacgccctgagcagcgatttcacatgtggctctccaactgctgcaggtaaaaaaaccgaaaaggaggaatccaccgaggttctcaaggcgcagagcgctggcaccgtccggtccgctgccccccctcaagagaagaagagaaaggtcgagaaggacacaatgtcagatcaagctctggaagcactgtccgccagcctgggcactcggcaggccgaacccgagcttgacctcaggtcaatcaaggaggtggatgaagcaaaagctaaagaagagaagctggaaaagtgtggggaggacgacgagaccatccccagcgaataccgcttaaagcccgccacagataaagacggcaagcccctgttacccgaacctgaagaaaagcccaagccgaggagcgagtccgaattaatcgatgaactgtcagaggattttgatcggagcgagtgcaaagagaagccgtccaaaccaacggaaaaaacagaagagagcaaggcagccgcccctgcaccagtgagcgaagcagtgtgccgtacaagcatgtgctcaatacagtctgctccacccgagcctgcgactctgaagggaactgtgcctgatgatgccgtagaggccctagccgacagtttgggaaaaaaggaggccgatccggaagatggaaaacccgtcatggacaaggtgaaagagaaagctaaagaggaagatagagagaagctcggagagaaggaagaaaccataccccctgactatagattagaagaagtgaaagacaaggacgggaagcccctgctccctaaggagagcaaggagcagcttcccccaatgtcagaagacttcttattggacgctctctctgaggactttagtgggccgcagaacgcaagctccctgaagttcgaagatgccaaactcgccgccgctattagtgaggtcgtaagccagacccctgcttctacgacccaggccggtgctccaccgagagatacgtcccagtccgacaaagatctagatgacgcacttgacaaactgagcgactccctcggtcagaggcagccggatcccgatgagaataaaccaatggaagataaggtgaaagagaaggccaaggcagagcacagagataagctgggggaacgggatgacacaatcccccctgaataccgccatctgctcgacgacaacggccaggataagccagtcaagcccccaacaaaaaagtccgaagactcaaaaaaacccgcggacgatcaggacccaatcgacgcactttccggcgatctagattcttgccctagtacgaccgagacgagccagaacactgctaaggacaagtgcaagaaagcagcatcttccagcaaggccccgaaaaatgggggcaaagcgaaggactcagccaaaacaaccgaggagaccagcaaaccaaaggatgattag

SEQ ID NO: 288107 - DNA, 2376 bp, Artificial Sequence
  derived and/or modified sequence
atgtcacaacccggacagaaacccgctgctagccctagaccccgtagagccgccgcagcaagacgaactcatgagcacgtttccgagaaaacttcagaatcccctagcaaacccggcgagaaaaagggatcagacgaaaagaaggccgcatccctgggatcctcacagagttctcgaacttatgctggcggaactgccagcgcaaccaaagtgtccgcttcatcaggggcaacctccaagtcctcgagcatgaaccccaccgagaccaaggcgatccctgtctcccagcaaatggaaggaccacacctgcccaataagaagaaacacaagaaacaggctgtgaagacagaacctgagaaaaagtctcaatccacaaagctttctgttgtgcatgaaaagaagagccaggaagggaagcccaaggagcatactgagccgaaatccctgcctaagcaggcctctgacacgggctcaaatgacgcacacaataagaaggctgtgagtagatccgccgagcagcaaccttcagaaaagagcaccgagcctaagaccaagccccaggatatgatttctgccggtggtgaaagtgtcgcggggattacagctatctcgggaaaacccggggataagaagaaagaaaaaaagagccttacacccgccgtacccgtggagagcaaaccagataagccaagcggtaaaagtggtatggatgccgccctcgacgacctaattgataccctgggtggccctgaggagaccgaggaggagaataccacatacaccgggccagaggtcagcgatccgatgagcagtacctacattgaagaactcgggaaaagagaggtcaccattccacctaaatatagggagcttctggctaaaaaagaggggatcactggtccaccagctgacagttccaagccgatagggcctgacgatgccatagatgccctcagttctgatttcacttgcggcagccccaccgccgcagggaaaaagactgaaaaggaagagagcacagaagttctgaaggctcaaagtgcaggtactgtgcggtccgcagccccccctcaagagaaaaagcgcaaggttgagaaagatacaatgtcagaccaagcattggaagctctcagtgcatctctaggaactcgccaggccgaacccgaactggatctaaggtccatcaaggaagttgacgaagccaaggcaaaggaagaaaagctggagaagtgcggcgaagatgatgaaacaatccccagcgagtaccgtctaaagccagccacagataaggacggcaagccactcctaccagagccggaagagaagcccaagcccagatctgagtctgaattaatcgatgaactctccgaggatttcgaccgcagcgaatgcaaagaaaagcccagcaagccaaccgagaaaacagaagaaagcaaggccgcagctcctgcacccgtttccgaagctgtttgccgtacaagtatgtgctctatacagtctgcaccgcctgagccagcgaccctgaaaggaaccgtgccagacgacgcagtcgaggcgctggccgattccctggggaagaaggaggcagatcctgaggatggaaagcccgttatggacaaggtgaaagaaaaggctaaagaggaggatcgtgaaaaactgggagagaaggaggagaccatccctccagactacagacttgaggaggtaaaggataaggacggcaaaccgctccttcctaaagaatcgaaagagcagctgccgcccatgtctgaggatttcttgctggatgcactgtccgaggatttctctggtccccagaacgcctcctctctgaaattcgaggacgcgaaactggctgctgcaatctcagaggttgtctcccagactccggcatcgaccacgcaagcaggcgctcccccgagggacactagccaatcggataaagacctcgacgacgccttggataaactgtctgacagtttgggtcagagacaaccagatccggacgaaaataagcctatggaagacaaagttaaagaaaaggccaaggccgaacaccgcgataaacttggcgagagggatgataccattcctcccgagtatcgccacctgctcgacgataatggccaggacaaacctgttaaaccaccaactaagaagtccgaggacagcaagaagccggctgacgatcaggatcctattgacgctctcagtggtgacctcgactcttgccccagcacaacggagacatctcagaacaccgcaaaagacaagtgcaagaaagccgcttcttcgtcaaaagcaccgaagaacggcggcaaagctaaagactcagctaagaccactgaggagacatccaaacccaaggatgactag

SEQ ID NO: 288108 - DNA, 2376 bp, Artificial Sequence
  derived and/or modified sequence
atgagccagcccggccagaagccagctgccagcccccggcccaggagagctgctgctgcccggaggacccatgagcacgtgtctgagaagaccagcgagagccccagcaagccaggagagaagaagggcagtgatgagaagaaggccgccagcctgggcagcagccagagcagcaggacctacgccggcggcacagccagcgccaccaaggtgtctgccagcagcggggccaccagcaagagcagctccatgaaccccacagagaccaaggccatccctgtgtcccagcagatggagggcccccacctgcccaacaagaagaagcacaagaagcaggccgtgaagacagagcctgagaagaagagccagagcaccaagctgtctgtggtgcatgagaagaagagccaggagggcaagcccaaggagcacacagagcccaagagcctgcccaagcaggccagtgacaccggcagcaatgatgcccacaacaagaaggctgtgagccgctctgctgagcagcagcccagcgagaagagcacagagcccaagaccaagccccaggacatgatctctgctggaggagagagcgtggccggcatcacagccatcagcggcaagccaggggacaagaagaaggagaagaagagcctgaccccagctgtgcctgtggagagcaagccagacaagcccagcggcaagagcggcatggatgctgccctggatgacctgattgacaccctgggcggccctgaggagacagaggaggagaacaccacctacacaggccctgaggtgtctgaccccatgagcagcacctacatcgaggagctgggcaagcgggaggtgaccatcccccccaagtaccgggagctgctggccaagaaggagggcatcactggacctcctgctgacagcagcaagcccatcggcccagatgatgccattgatgccctgagcagtgacttcacctgtggcagccccacagctgctgggaagaagacagagaaggaggagagcacagaggtgctgaaggcccagagcgctggcaccgtgcgctctgctgccccaccccaggagaagaagaggaaggtggagaaggacaccatgtctgaccaggccctggaggccctgagcgccagcctgggcacccggcaggccgagcctgagctggacctgcggagcatcaaggaggtggatgaggccaaggccaaggaggagaagctggagaagtgtggagaagatgatgagaccatccccagcgagtaccgcctgaagccagccacagacaaggatggcaagcccctgctgcctgagcctgaggagaagcccaagcccaggtctgagagcgagctgattgatgagctgtctgaagattttgacagaagtgagtgcaaggagaagcccagcaagcccacagagaagacagaggagagcaaggctgctgccccagcccctgtgtctgaggccgtgtgcaggacctccatgtgcagcatccagagcgcccctcctgagcccgccaccctgaagggcaccgtgcctgatgatgctgtggaggccctggccgacagcctgggcaagaaggaggccgaccctgaagatggcaagcctgtgatggacaaggtgaaggagaaggccaaggaggaggaccgggagaagctgggggagaaggaggagaccatccccccagactaccgcctggaggaggtgaaggacaaggatggcaagcccctgctgcccaaggagagcaaggagcagctgccccccatgtctgaggacttcctgctggatgccctgtctgaggacttcagcggcccccagaatgccagcagcctgaagtttgaagatgccaagctggccgccgccatcagcgaggtggtgtcccagaccccagccagcaccacccaggccggggccccaccccgggacaccagccagagcgacaaggacctggatgatgccctggacaagctgagtgacagcctgggccagaggcagcctgaccctgatgagaacaagcccatggaggacaaggtgaaggagaaggccaaggccgagcaccgggacaagctgggggagagagatgacaccatccccccagagtaccgccacctgctggatgacaatggccaggacaagcctgtgaagccacccaccaagaagtctgaggacagcaagaagccagcagatgaccaggaccccattgatgccctgagcggggacctggacagctgccccagcaccacagagaccagccagaacacagccaaggacaagtgcaagaaggccgccagcagcagcaaggcccccaagaatggaggcaaggccaaggacagcgccaagaccacagaggagaccagcaagcccaaggatgactag

SEQ ID NO: 288109 - DNA, 2376 bp, Artificial Sequence
  derived and/or modified sequence
atgagccagcccggccagaagcccgccgccagcccccggccccggagggccgctgctgcccgccgaactcacgagcacgtgagcgagaagacatccgagagcccctctaagcccggcgaaaaaaaggggtccgacgagaaaaaagcagctagcttaggaagttcccagtccagccgcacttacgcagggggtacagcatcggcaaccaaagtttccgcttcctctggagccactagtaaaagctcatccatgaatcctactgagactaaggccatcccagtgtcccagcaaatggagggcccacacttgccaaataagaaaaaacacaagaaacaggccgttaagaccgaacccgagaaaaagtcccagagcacaaagctgtccgtggtccacgaaaaaaaatcccaagagggtaagccgaaagagcatacggaacccaaatccttacccaaacaagcttcagataccggttcgaacgacgctcacaacaaaaaggcggtctcaagatccgcagagcagcaaccttcagaaaagagcactgaacctaaaacaaagccacaggacatgatttccgcaggcggagagtccgtagccggtataactgccatcagtggtaagcccggagacaagaagaaggagaaaaagtctttaaccccggccgtccccgttgagagtaaaccggacaagccttccggcaagagcggcatggatgcagctctcgatgacctcattgacactctgggaggcccagaagagacagaggaggagaacactacatacactggcccggaagtgtccgatcccatgtcttctacatacatcgaagagctggggaagagagaggttacaatccctccaaagtaccgcgaacttctggccaagaaggagggcatcactgggcctccagctgactccagcaaaccaatcggccccgatgacgctattgatgccctctcttcagactttacatgtggtagcccaaccgccgcaggtaaaaagacggagaaggaagagtcaaccgaggttctgaaggcacagagtgccggcacagtgcgatccgctgccccccctcaggaaaaaaagagaaaggtggaaaaggatacaatgagtgaccaggccttagaagctctgtctgcgagcctcgggacccgccaggccgagcccgagttggatcttaggtccataaaggaagtcgatgaagccaaggctaaggaggagaaactcgagaaatgcggagaggatgatgagacgattccaagtgagtatagacttaaacctgccactgataaagatggaaagcctctgctgccggaaccagaggagaagcctaagccccggagtgaaagcgaactgatcgacgagttatctgaagattttgatcgctcagagtgcaaagaaaagcccagtaagcccaccgagaagacagaggaaagcaaggctgcggctccagcccccgttagcgaggccgtctgccgcacatccatgtgcagcatccaatcagcccccccagagcctgcgacactaaaagggacagttcccgacgacgccgttgaagctctggctgattcactgggcaagaaagaggctgatccagaggacggcaaacccgttatggacaaggtgaaggagaaggctaaagaagaggatcgggaaaaacttggagaaaaggaggaaactatccctccagattataggcttgaggaggtcaaagacaaagacggaaaaccactgctgccaaaagaatcaaaagagcaactccctcctatgtcagaagattttctgttggacgcactttccgaggactttagcggccctcagaacgcctccagcctgaagtttgaagacgccaaactggctgccgcaatctcagaagtggtgtcccagacgccggcctcaactacacaagcaggcgcacctcctcgggatacaagccagagtgataaagatctcgacgatgcgctcgataaactttcagacagtctgggtcagcggcaacccgaccctgatgaaaataaaccgatggaagataaagttaaggagaaagccaaagccgaacacagagataaattgggggaacgtgatgacaccatccccccagagtacaggcatctcttggacgataatgggcaggataaacccgtcaaaccgcccactaagaaaagcgaggacagcaagaagcctgccgacgaccaggaccccatagatgccctgagcggggacctggactcctgtcctagcaccacagagacaagtcaaaataccgcgaaagataaatgcaagaaagccgcttcatcctcaaaagcaccaaagaacggcgggaaggctaaggattctgccaaaacaacagaggagacttccaagcccaaggacgattag

SEQ ID NO: 288110 - DNA, 2376 bp, Artificial Sequence
  derived and/or modified sequence
atgagccagcccggccagaagcccgccgccagcccccggccccggcgcgcagctgcagctagaaggacccacgagcacgtctctgaaaaaacatctgagtctcctagcaagcccggggaaaaaaagggttctgacgagaaaaaggcggcttcgcttgggagcagccagtcttcgagaacctatgcgggcggaaccgctagtgccacaaaggtgtccgctagttctggcgctacatcaaagagtagctctatgaacccaactgagaccaaggcaatcccggtctcccagcaaatggagggtccccacctgcccaacaagaaaaagcacaagaagcaggccgtgaaaactgagcctgaaaagaagtctcagtctaccaaactttcagttgtacacgaaaagaaaagtcaggaaggcaaacctaaagagcatacagaacccaagagcctccccaaacaggccagtgacacagggtcgaatgacgcacataacaagaaagcagttagtagaagtgccgagcagcagccctcagaaaagagtactgaacctaagacgaagccgcaagatatgattagtgccgggggggaaagtgtggctggcattacagccatctcaggcaagccaggcgataagaaaaaggagaagaagagcctgactccagcagtcccagtggaaagcaagcctgataagccttctggtaaatcaggcatggatgctgctcttgatgacctgattgacactctcggaggaccagaagaaacggaagaggagaataccacatatactggtccagaggtgtctgatcccatgtccagcacatatatcgaagagctggggaagagggaggtgacaattccccccaagtaccgggagctgttagcaaaaaaggaaggcattacagggccgccggcggactcctcaaaaccaatcggcccagacgatgccatcgacgctctgagttctgattttacatgcggatcgcccaccgcggcaggaaagaagacagaaaaagaggagagcaccgaggtgctgaaagcccagtccgcggggacagtgagaagcgccgccccgccccaggagaagaagcgcaaggtagaaaaagacacaatgtccgaccaggctctggaggccctcagtgccagtcttggtacacgacaagcggagcctgagctcgacttaaggtccataaaagaggtggacgaggcaaaggcaaaggaagaaaagctcgagaagtgcggagaggacgacgaaactattccttcagaataccgcttaaaacctgcaacagataaggatggcaaaccactgctgccggaacccgaagagaagcccaagccacggtccgaatccgaattgattgacgagctgtcggaagactttgaccgcagcgagtgcaaggaaaaaccctctaaacccacggagaagacagaggaaagtaaagcagcggcacccgcccctgtttctgaagcggtttgcaggacctctatgtgttccatccagtcagctccgccagagcccgctacactcaagggtaccgtccccgatgacgctgtggaggctctagcagattccctcggcaagaaagaggccgatcccgaggacgggaaaccagtgatggataaggtgaaggagaaagctaaggaagaggaccgggaaaagttgggggagaaggaggaaacgataccacccgactaccgattagaggaagtcaaggacaaagatggtaagccccttcttcctaaggaaagcaaggagcagctgccccccatgagtgaagacttcttactcgacgccttatcagaggacttttccggaccacagaatgcatcttccctcaagtttgaggacgcaaaactcgccgccgctattagcgaggtggtgagccagacgccagcttccacgacccaagctggagcccctccacgggacactagtcagtcagacaaggatttggacgatgctctagacaaactatcggacagtctggggcagaggcagccagaccctgacgaaaataaacctatggaagataaggtcaaggagaaggctaaggcagagcacagggacaagttgggcgagcgggacgatactataccccccgagtatagacatctcctcgatgataatggccaggataaacccgtgaagcctccaacgaagaagagtgaagattctaaaaaacccgccgacgatcaggacccgatagacgctctgagtggggatctggatagctgtccatcaactacagaaacatctcagaatactgctaaggataaatgtaagaaggctgccagttcttcaaaggctcctaaaaatggcggcaaggctaaggatagcgccaaaacaacagaagaaacatccaagccaaaagacgactag

SEQ ID NO: 288111 - DNA, 2376 bp, Artificial Sequence
  derived and/or modified sequence
atgtcgcagcctggccagaaaccagctgcctctccgcgtcctagaagagccgctgcagctaggagaacccacgaacacgttagcgagaagacctcagaaagcccaagcaaacctggcgagaaaaagggctcagacgaaaagaaggccgcatcacttggaagtagccagtccagtcggacttacgccggagggacagccagcgcaaccaaggtttcggctagttcaggggcaaccagcaagtcttcgtctatgaaccctactgagacaaaggcaattccggtttcccaacagatggaagggccacacctccccaataagaaaaagcacaagaagcaggccgtgaaaacagagcccgagaagaagagccaatcaaccaagttgtctgtggttcacgaaaagaagtcacaggaagggaaacctaaagagcataccgaacctaagtcgttgcccaagcaagcgtctgacactgggagtaacgacgcccacaacaaaaaggccgtaagcaggagtgccgaacagcagccaagcgaaaagtctactgagcccaaaacaaagccccaagacatgattagcgccggtggggagagcgtagccggaatcacagccatctctgggaagccaggtgacaagaaaaaagagaagaaatcgttaacacccgcagtcccggtggagagtaagccagataagccttcaggaaagtccggcatggatgctgcgcttgatgatcttatcgacacattgggcggtcccgaagaaaccgaggaggagaacaccacctatacagggccagaggtgagcgatccaatgtccagcacgtatattgaggagctgggaaagcgggaggtgactatccccccaaaatacagagagctgctggccaaaaaagaaggaattactggccctccagccgactcatcaaagcccataggacccgacgatgctatcgacgccctgtctagtgacttcacctgtggctccccaactgctgcgggaaagaagactgagaaagaggagtcaacagaagtcctgaaggcgcagtctgccggaaccgtgcgttctgctgctccaccccaagagaagaagcggaaggtcgaaaaagataccatgagcgatcaagctcttgaggctctgagtgcttctctggggacgcggcaggcagagccagagctcgacctaaggtctatcaaagaggtagatgaggctaaggccaaggaagaaaaactggaaaagtgcggcgaggacgatgagacaatcccaagcgaatacagactgaagccggctacagacaaagatggcaagcccttactgccggagcctgaggagaagccaaagcctcgcagcgagtccgaattaatagatgagttgagtgaggacttcgacaggtcagagtgcaaggagaagccatctaaaccaactgagaagaccgaggaaagtaaggccgcagccccagccccagtgtcggaggcagtttgtcgcacatcaatgtgttccattcaatctgcacctcccgaaccggcaaccctcaaaggcactgtgcctgacgatgccgtggaggcactggcggactccctcggcaaaaaagaggccgatccagaagacggaaagccggtgatggacaaggttaaggagaaggcaaaggaagaggaccgtgagaagcttggggaaaaggaggagaccattccacccgactatagactggaggaggtgaaggataaggatgggaagccattgctgcctaaagaaagcaaggagcagctgccaccgatgagtgaggatttcctgctggatgctctctccgaagacttctccggccctcagaacgcttccagcttgaaattcgaagatgcaaagctagcagcggcaattagcgaggtggtctcacagacacctgcttctacaacccaggccggagccccacccagggatacttctcagagcgacaaggatcttgatgatgcccttgataagctgtctgatagcctggggcagcgccaaccagaccctgatgaaaataagcctatggaggataaggtgaaagagaaagctaaggctgaacacagagataagctcggggaaagggatgacactataccacctgaataccgacatctgcttgatgacaacgggcaggacaaaccagtgaaaccccctactaagaagagtgaagactcaaaaaaaccagccgatgaccaggatcccattgacgccctgagcggagatctggattcatgtccgagtaccaccgaaacctctcaaaacactgcaaaggataaatgcaagaaagccgcttctagttcaaaggcacccaagaacgggggaaaggcaaaggattccgctaaaactactgaagaaacttcaaagccaaaggatgattag

SEQ ID NO: 288112 - DNA, 2376 bp, Artificial Sequence
  derived and/or modified sequence
atgagccagcccggtcaaaagccggcagcttccccacgacccagacgcgcagctgcagccaggaggacacacgaacacgtctccgagaaaacatctgagtctcctagcaagccgggagaaaagaaagggagcgatgagaagaaggccgctagtctgggcagtagccagagttcacgaacatacgccggaggaaccgcctctgcaactaaagtgtcagccagttctggcgcaacgagtaaatctagctcgatgaaccccacggaaaccaaagccattccggtatcacagcaaatggaaggtcctcacctgccgaataagaaaaagcacaagaagcaggctgtcaagactgagcccgagaagaagagtcagtccaccaagctgagcgtggtccacgagaagaagtcacaggaaggaaaaccaaaggagcacaccgagcctaaaagtctgcctaagcaggcgtcggataccggatccaacgatgcccataacaagaaagccgtttccagatccgctgagcaacagccgtccgagaaatctaccgaacccaagactaagccgcaagatatgatttccgccggaggtgagagtgtcgctggcattaccgctatttctgggaaacccggagacaaaaaaaaggagaagaagagcctcactccagcagtacctgtggaaagcaagccggacaaacctagcggcaagtcaggaatggacgcagccctcgatgatctgatcgatacactagggggaccagaagagaccgaagaagagaacacaacctatacgggccctgaggtctcagatccaatgtcttcaacctatatagaggaattgggaaaaagggaagtcacaattccaccaaagtaccgggagctcctggctaagaaagagggtatcactggcccaccggctgatagcagcaagcctatcggacccgacgatgctattgacgccttaagcagtgattttacatgtgggtctccaactgccgcaggcaagaagaccgaaaaagaggagtcaaccgaggtgctgaaagcccagtccgccggtacagtccggagtgccgcaccccctcaggagaaaaagaggaaggttgaaaaggacactatgagcgaccaggccctcgaagctctgtccgcttccctcggaaccaggcaggccgagcccgagcttgatctgcggtctataaaagaagtggacgaggcaaaagcgaaagaggagaaattggagaagtgtggtgaagatgatgagaccatccctagtgagtaccggcttaaacctgcaacagacaaagacggaaaacccctgctcccggagcccgaggaaaagcctaagccacgcagcgagtcagagttgatagacgagctcagcgaggacttcgaccggtcagaatgtaaagaaaagccgtctaaacctactgaaaagacagaggagagcaaagccgctgcacctgccccagtgagtgaagctgtgtgtcgcacatcaatgtgtagcattcaaagtgcgcctccagaacccgctaccttaaaaggcacggtgcctgacgatgccgttgaggccctggctgacagtttgggaaaaaaagaagctgaccctgaagacggaaagcctgttatggacaaagtaaaggagaaggccaaagaggaggatcgggaaaagctgggagaaaaagaagagaccattcctccggattataggcttgaggaggtgaaagataaagatggaaagccactgttaccaaaggaatccaaagaacaattacccccaatgagcgaggatttcctccttgacgcgttgtctgaagacttcagtggacctcaaaacgcctcctctctgaaattcgaagatgccaagctggccgctgcaatttccgaagtggtatcccaaacccctgcctccaccacccaggccggagccccaccaagagatacatcacagtctgacaaagatctggacgatgctctggacaagctgtccgacagcctgggtcaaagacagccagatccagatgaaaataaaccaatggaggacaaagtaaaggagaaggccaaggccgaacatagagataaattaggagaacgcgacgataccattcccccagagtatcggcacctcctcgatgataatggacaagacaaacctgtgaaaccgccaaccaaaaaatcagaagattcgaagaagccagcagacgatcaggaccctattgatgctttatcaggggatctggacagttgtccctccaccactgaaacaagccaaaacacagctaaagataagtgcaaaaaggcggcaagcagctcaaaggcacctaaaaacgggggaaaggcaaaagatagcgcgaagaccacagaggagacaagtaaaccgaaagacgattag

SEQ ID NO: 288113 - DNA, 4629 bp, Artificial Sequence
  derived and/or modified sequence
ggcccatcggggctaggggaaccccggcgcagacctggggtggggtcggaaaagctgtttcatcgcccgctcccgggccctccgctccctccctccctccctctctccctggcaggactccccgccaggcctccccgccactctccgcggcgcattccgggaggcagcggccgcagcggcctcgccatgtcccagcccggccagaagcccgccgcctccccgcggccccggcgagcagccgccgcccgccgcacccatgagcatgtcagtgaaaaaaccagtgaatcgccttccaaaccaggagaaaagaaaggatcagatgagaaaaaagcagcaagcctcggcagcagtcaatcctccagaacctatgctggtggaacagcctcggccaccaaggtgtcagcttcctctggtgcaaccagcaagtcttccagtatgaatcccacagaaaccaaggccattccagtcagccaacagatggaaggaccacatcttcctaacaagaaaaaacacaaaaaacaggctgtaaaaacagaacctgagaagaagtcacagtcaaccaagctgtctgtggttcatgagaaaaaatcccaagaaggaaagccaaaagaacacacagagccaaaaagcctacccaagcaggcatcagatacaggaagtaacgatgctcacaataaaaaagcagtttccagatcagctgaacagcagccatcagagaaatcaacagaaccaaagactaaaccacaagacatgatttctgctggtggagagagtgttgctggtatcactgcaatatctggcaagccgggtgacaagaaaaaagaaaagaaatcattaaccccagctgtgccagttgaatctaaaccggataaaccatcgggaaagtcaggcatggatgctgctttggatgacttaatagatactttaggaggacctgaagaaactgaagaagaaaatacaacgtatactggaccagaagtttcagatccaatgagttccacctacatagaggaattgggtaaaagagaagtcacaattcctccaaaatatagggaactattggctaaaaaggaagggatcacagggcctcctgcagactcttcgaaacccatagggccagatgatgctatagacgccttgtcatctgacttcacctgtgggtcgcctacagctgctggaaagaaaactgaaaaagaggaatctacagaagttttaaaagctcagtcagcagggacagtcagaagtgctgctccaccccaagagaagaaaagaaaggtggagaaggatacaatgagtgatcaagcactcgaggctctgtcggcttcactgggcacccggcaagcagaacctgagctcgacctccgctcaattaaggaagtcgatgaggcaaaagctaaagaagaaaaactagagaagtgtggtgaggatgatgaaacaatcccatctgagtacagattaaaaccagccacggataaagatggaaaaccactattgccagagcctgaagaaaaacccaagcctcggagtgaatcagaactcattgatgaactttcagaagattttgaccggtctgaatgtaaagagaaaccatctaagccaactgaaaagacagaagaatctaaggccgctgctccagctcctgtgtcggaggctgtgtgtcggacctccatgtgtagtatacagtcagcaccccctgagccggctaccttgaagggcacagtgccagatgatgctgtagaagccttggctgatagcctggggaaaaaggaagcagatccagaagatggaaaacctgtgatggataaagtcaaggagaaggccaaagaagaagaccgtgaaaagcttggtgaaaaagaagaaacaattcctcctgattatagattagaagaggtcaaggataaagatggaaagccactcctgccaaaagagtctaaggaacagcttccacccatgagtgaagacttccttctggatgctttgtctgaggacttctctggtccacaaaatgcttcatctcttaaatttgaagatgctaaacttgctgctgccatctctgaagtggtttcccaaaccccagcttcaacgacccaagctggagccccaccccgtgatacctcgcagagtgacaaagacctcgatgatgccttggataaactctctgacagtctaggacaaaggcagcctgacccagatgagaacaaaccaatggaagataaagtaaaggaaaaagctaaagctgaacatagagacaagcttggagaaagagatgacactatcccacctgaatacagacatctcctggatgataatggacaggacaaaccagtgaagccacctacaaagaaatcagaggattcaaagaaacctgcagatgaccaagaccccattgatgctctctcaggagatctggacagctgtccctccactacagaaacctcacagaacacagcaaaggataagtgcaagaaggctgcttccagctccaaagcacctaagaatggaggtaaagcgaaggattcagcaaagacaacagaggaaacttccaagccaaaagatgactaaagaaatacaagttaaggtatctggtatctgcatgtaaaatcttcagctggtggatggtgacttttgaagaacaaaaggctttggcaacagaaaacaattgttctgggtgatttctagaatggtttttgttgagtctctgaacatcctaaatattggtttgttattcttttccagaaagaaaatgaatttgactggttcacctgtgtactgagtattgataaactttgaatttttttaattgccttcaattgggagagaaagctttatatttgtaagaaatatatttgataaagtttcttaaagcaacaccaaaaaaacaaaagaaaagctaagtgaatttttgcacattctacacacagtgcctgtaaatctcatttgtattttcagtttgcccttaattttttttgttagtgtttagaaaacaatgttttaaacattcttcagtgttctgatttcttattaccccctttcctcttgggcttttgaactgtatttgatgttgctttgggataatgtttataagtcaaacataagatattgtacattgggcacatatctcctcttgggctgctaataataaattaataacaggtaacctggacaaaccaggaagcaccaaaccccttttcagtttgaactcttctttgccaggtgtgaggacttctgcatcttacagtcagcacagaacacactgagacttgaatcaagtcagcaacagagcaaaataaaggttagataagtccttgtgtagcaaatttcgagcataagaaataaaatctaattaattcttagggtactcatctgacttgaactctgttggtttactgtgttagtaaactgtgctttctattatctatacataaaacctgagcagcaactgtgtctttagagctattgccacattagcctttgcactgtatagcgtctggctttatggaacttaagtttaccaaatataaaaagaaacttctgcttttaaaaaaattatatatatatattaaatttgaaacctgcatttctcccacagcaatgtaagaagtaggctctgatgtcctaccactttgaatggttttctaatatcttaatgaatagttcctgaacattgcactgatatcatcgattagaattttgatatttaatttcatctttatttcctggtagagaatgcaggaaaagatgtcaggtacataacataaaacagattgggaatttattgtttccaaagggcatggccttccttagcatcagtttgaagcttttgttatgacttagctgacttgtggcagcggggcaagcaaaaacaataacactgcttataaatggcaccacatcttgttaacctcccccccaaatactctctgaaagtcatgcacatacctatgggattttacacaccaccagcttaaaatgctatgtctctatccatcagaaatagtcattattctatttttaaggcagcaacaagaaaagaaaaaacacttttcctgagggatttctaaccatgtatctaatcctcccatttgggcagtataggtgtttgcttttttgttttctttttttaagaaaaaccttgaaacctttgacactgacagatgtgtttgcaaggatacggcttcagtattactaatttccatgtgtatctggaagtatttttaaatggcataccaaaatccagaagtttaaagatgcctataaaagtaaacaacatttatttaaaaagaactctgaatatgccttcttttttaattagaaatatcttcgagacttgggtgtttgttaataactaataactggagtaagctacaggatctaaagcagccctttttacagtctagttaggagagagaaaataattgcaaatatccacttagaggcaaagaacaattttttattatcaaaaaggtttctgcacattgttgtggcaatattgtatctgtttagaaaatgggcttttccaaaagcaaacaaagataggttcctcaggtgaccaaaactgaaaatcaatatttccatgtttcattaatcaaggcataaaatacaattaaagcaaaatattttacattaaaa

SEQ ID NO: 288114 - DNA, 2539 bp, Artificial Sequence
  derived and/or modified sequence
ctgggcatcgaaggaggaacgctgcaacctccaaccccttctttctgaccaaccgggaccagagcagtgctggggccggggcgggtcaccgggactccccgccaggcctccccgccactctccgcggcgcattccgggaggcagcggccgcagcggcctcgccatgtcccagcccggccagaagcccgccgcctccccgcggccccggcgagcagccgccgcccgccgcacccatgagcatgtcagtgaaaaaaccagtgaatcgccttccaaaccaggagaaaagaaaggatcagatgagaaaaaagcagcaagcctcggcagcagtcaatcctccagaacctatgctggtggaacagcctcggccaccaaggtgtcagcttcctctggtgcaaccagcaagtcttccagtatgaatcccacagaaaccaaggccattccagtcagccaacagatggaaggaccacatcttcctaacaagaaaaaacacaaaaaacaggctgtaaaaacagaacctgagaagaagtcacagtcaaccaagctgtctgtggttcatgagaaaaaatcccaagaaggaaagccaaaagaacacacagagccaaaaagcctacccaagcaggcatcagatacaggaagtaacgatgctcacaataaaaaagcagtttccagatcagctgaacagcagccatcagagaaatcaacagaaccaaagactaaaccacaagacatgatttctgctggtggagagagtgttgctggtatcactgcaatatctggcaagccgggtgacaagaaaaaagaaaagaaatcattaaccccagctgtgccagttgaatctaaaccggataaaccatcgggaaagtcaggcatggatgctgctttggatgacttaatagatactttaggaggacctgaagaaactgaagaagaaaatacaacgtatactggaccagaagtttcagatccaatgagttccacctacatagaggaattgggtaaaagagaagtcacaattcctccaaaatatagggaactattggctaaaaaggaagggatcacagggcctcctgcagactcttcgaaacccatagggccagatgatgctatagacgccttgtcatctgacttcacctgtgggtcgcctacagctgctggaaagaaaactgaaaaagaggaatctacagaagttttaaaagctcagtcagcagggacagtcagaagtgctgctccaccccaagagaagaaaagaaaggtggagaaggatacaatgagtgatcaagcactcgaggctctgtcggcttcactgggcacccggcaagcagaacctgagctcgacctccgctcaattaaggaagtcgatgaggcaaaagctaaagaagaaaaactagagaagtgtggtgaggatgatgaaacaatcccatctgagtacagattaaaaccagccacggataaagatggaaaaccactattgccagagcctgaagaaaaacccaagcctcggagtgaatcagaactcattgatgaactttcagaagattttgaccggtctgaatgtaaagagaaaccatctaagccaactgaaaagacagaagaatctaaggccgctgctccagctcctgtgtcggaggctgtgtgtcggacctccatgtgtagtatacagtcagcaccccctgagccggctaccttgaagggcacagtgccagatgatgctgtagaagccttggctgatagcctggggaaaaaggaagcagatccagaagatggaaaacctgtgatggataaagtcaaggagaaggccaaagaagaagaccgtgaaaagcttggtgaaaaagaagaaacaattcctcctgattatagattagaagaggtcaaggataaagatggaaagccactcctgccaaaagagtctaaggaacagcttccacccatgagtgaagacttccttctggatgctttgtctgaggacttctctggtccacaaaatgcttcatctcttaaatttgaagatgctaaacttgctgctgccatctctgaagtggtttcccaaaccccagcttcaacgacccaagctggagccccaccccgtgatacctcgcagagtgacaaagacctcgatgatgccttggataaactctctgacagtctaggacaaaggcagcctgacccagatgagaacaaaccaatggaagataaagtaaaggaaaaagctaaagctgaacatagagacaagcttggagaaagagatgacactatcccacctgaatacagacatctcctggatgataatggacaggacaaaccagtgaagccacctacaaagaaatcagaggattcaaagaaacctgcagatgaccaagaccccattgatgctctctcaggagatctggacagctgtccctccactacagaaacctcacagaacacagcaaaggataagtgcaagaaggctgcttccagctccaaagcacctaagaatggaggtaaagcgaaggattcagcaaagacaacagaggaaacttccaagccaaaagatgactaa

SEQ ID NO: 288115 - DNA, 2376 bp, Artificial Sequence
  derived and/or modified sequence
atgagccagcccggccagaagcccgccgccagccccagacccagaagagccgccgccgccagaagaacccacgagcacgtgagcgagaagaccagcgagagccccagcaagcccggcgagaagaagggcagcgacgagaagaaggccgccagcctgggcagcagccagagcagcagaacctacgccggcggcaccgccagcgccaccaaggtgagcgccagcagcggcgccaccagcaagagcagcagcatgaaccccaccgagaccaaggccatccccgtgagccagcagatggagggcccccacctgcccaacaagaagaagcacaagaagcaggccgtgaagaccgagcccgagaagaagagccagagcaccaagctgagcgtggtgcacgagaagaagagccaggagggcaagcccaaggagcacaccgagcccaagagcctgcccaagcaggccagcgacaccggcagcaacgacgcccacaacaagaaggccgtgagcagaagcgccgagcagcagcccagcgagaagagcaccgagcccaagaccaagccccaggacatgatcagcgccggcggcgagagcgtggccggcatcaccgccatcagcggcaagcccggcgacaagaagaaggagaagaagagcctgacccccgccgtgcccgtggagagcaagcccgacaagcccagcggcaagagcggcatggacgccgccctggacgacctgatcgacaccctgggcggccccgaggagaccgaggaggagaacaccacctacaccggccccgaggtgagcgaccccatgagcagcacctacatcgaggagctgggcaagagagaggtgaccatcccccccaagtacagagagctgctggccaagaaggagggcatcaccggcccccccgccgacagcagcaagcccatcggccccgacgacgccatcgacgccctgagcagcgacttcacctgcggcagccccaccgccgccggcaagaagaccgagaaggaggagagcaccgaggtgctgaaggcccagagcgccggcaccgtgagaagcgccgcccccccccaggagaagaagagaaaggtggagaaggacaccatgagcgaccaggccctggaggccctgagcgccagcctgggcaccagacaggccgagcccgagctggacctgagaagcatcaaggaggtggacgaggccaaggccaaggaggagaagctggagaagtgcggcgaggacgacgagaccatccccagcgagtacagactgaagcccgccaccgacaaggacggcaagcccctgctgcccgagcccgaggagaagcccaagcccagaagcgagagcgagctgatcgacgagctgagcgaggacttcgacagaagcgagtgcaaggagaagcccagcaagcccaccgagaagaccgaggagagcaaggccgccgcccccgcccccgtgagcgaggccgtgtgcagaaccagcatgtgcagcatccagagcgccccccccgagcccgccaccctgaagggcaccgtgcccgacgacgccgtggaggccctggccgacagcctgggcaagaaggaggccgaccccgaggacggcaagcccgtgatggacaaggtgaaggagaaggccaaggaggaggacagagagaagctgggcgagaaggaggagaccatcccccccgactacagactggaggaggtgaaggacaaggacggcaagcccctgctgcccaaggagagcaaggagcagctgccccccatgagcgaggacttcctgctggacgccctgagcgaggacttcagcggcccccagaacgccagcagcctgaagttcgaggacgccaagctggccgccgccatcagcgaggtggtgagccagacccccgccagcaccacccaggccggcgccccccccagagacaccagccagagcgacaaggacctggacgacgccctggacaagctgagcgacagcctgggccagagacagcccgaccccgacgagaacaagcccatggaggacaaggtgaaggagaaggccaaggccgagcacagagacaagctgggcgagagagacgacaccatcccccccgagtacagacacctgctggacgacaacggccaggacaagcccgtgaagccccccaccaagaagagcgaggacagcaagaagcccgccgacgaccaggaccccatcgacgccctgagcggcgacctggacagctgccccagcaccaccgagaccagccagaacaccgccaaggacaagtgcaagaaggccgccagcagcagcaaggcccccaagaacggcggcaaggccaaggacagcgccaagaccaccgaggagaccagcaagcccaaggacgactag

SEQ ID NO: 288116 - DNA, 2972 bp, Artificial Sequence
  derived and/or modified sequence
tctgggcatcgaaggaggaacgctgcaacctccaaccccttctttctgaccaaccgggaccagagcagtgctggggccggggcgggtcaccggcatgtcagtgaaaaaaccagtgaatcgccttccaaaccaggagaaaagaaaggatcagatgagaaaaaagcagcaagcctcggcagcagtcaatcctccagaacctatgctggtggaacagcctcggccaccaaggtgtcagcttcctctggtgcaaccagcaagtcttccagtatgaatcccacagaaaccaaggccattccagtcagccaacagatggaaggaccacatcttcctaacaagaaaaaacacaaaaaacaggctgtaaaaacagaacctgagaagaagtcacagtcaaccaagctgtctgtggttcatgagaaaaaatcccaagaaggaaagccaaaagaacacacagagccaaaaagcctacccaagcaggcatcagatacaggaagtaacgatgctcacaataaaaaagcagtttccagatcagctgaacagcagccatcagagaaatcaacagaaccaaagactaaaccacaagacatgatttctgctggtggagagagtgttgctggtatcactgcaatatctggcaagccgggtgacaagaaaaaagaaaagaaatcattaaccccagctgtgccagttgaatctaaaccggataaaccatcgggaaagtcaggcatggatgctgctttggatgacttaatagatactttaggaggacctgaagaaactgaagaagaaaatacaacgtatactggaccagaagtttcagatccaatgagttccacctacatagaggaattgggtaaaagagaagtcacaattcctccaaaatatagggaactattggctaaacccatagggccagatgatgctatagacgccttgtcatctgacttcacctgtgggtcgcctacagctgctggaaagaaaactgaaaaagaggaatctacagaagttttaaaagctcagtcagcagggacagtcagaagtgctgctccaccccaagagaagaaaagaaaggtggagaaggatacaatgagtgatcaagcactcgaggctctgtcggcttcactgggcacccggcaagcagaacctgagctcgacctccgctcaattaaggaagtcgatgaggcaaaagctaaagaagaaaaactagagaagtgtggtgaggatgatgaaacaatcccatctgagtacagattaaaaccagccacggataaagatggaaaaccactattgccagagcctgaagaaaaacccaagcctcggagtgaatcagaactcattgatgaactttcagaagattttgaccggtctgaatgtaaagagaaaccatctaagccaactgaaaagacagaagaatctaaggccgctgctccagctcctgtgtcggaggctgtgtgtcggacctccatgtgtagtatacagtcagcaccccctgagccggctaccttgaagggcacagtgccagatgatgctgtagaagccttggctgatagcctggggaaaaaggaagcagatccagaagatggaaaacctgtgatggataaagtcaaggagaaggccaaagaagaagaccgtgaaaagcttggtgaaaaagaagaaacaattcctcctgattatagattagaagaggtcaaggataaagatggaaagccactcctgccaaaagagtctaaggaacagcttccacccatgagtgaagacttccttctggatgctttgtctgaggacttctctggtccacaaaatgcttcatctcttaaatttgaagatgctaaacttgctgctgccatctctgaagtggtttcccaaaccccagcttcaacgacccaagctggagccccaccccgtgatacctcgcagagtgacaaagacctcgatgatgccttggataaactctctgacagtctaggacaaaggcagcctgacccagatgagaacaaaccaatggaagataaagtaaaggaaaaagctaaagctgaacatagagacaagcttggagaaagagatgacactatcccacctgaatacagacatctcctggatgataatggacaggacaaaccagtgaagccacctacaaagaaatcagaggattcaaagaaacctgcagatgaccaagaccccattgatgctctctcaggagatctggacagctgtccctccactacagaaacctcacagaacacagcaaaggataagtgcaagaaggctgcttccagctccaaagcacctaagaatggaggtaaagcgaaggattcagcaaagacaacagaggaaacttccaagccaaaagatgactaaagaaatacaagttaaggtatctggtatctgcatgtaaaatcttcagctggtggatggtgacttttgaagaacaaaaggctttggcaacagaaaacaattgttctgggtgatttctagaatggtttttgttgagtctctgaacatcctaaatattggtttgttattcttttccagaaagaaaatgaatttgactggttcacctgtgtactgagtattgataaactttgaatttttttaattgccttcaattgggagagaaagctttatatttgtaagaaatatatttgataaagtttcttaaagcaacaccaaaaaaacaaaagaaaagctaagtgaatttttgcacattctacacacagtgcctgtaaatctcatttgtattttcagtttgcccttaattttttttgttagtgtttagaaaacaatgttttaaacattcttcagtgttctgatttcttattaccccctttcctcttgggcttttgaactgtatttgatgttgctttgggataatgtttataagtcaaacataagatattgtacattgggcacatatctcctcttgggctgctaataataaattaataacaggtaacctggacaaaccaggaagcacc

SEQ ID NO: 288117 - protein, 708 aa, Artificial Sequence
  derived and/or modified sequence
MNPTETKAIPVSQQMEGPHLPNKKKHKKQAVKTEPEKKSQSTKLSVVHEKKSQEGKPKEHTEPKSLPKQASDTGSNDAHNKKAVSRSAEQQPSEKSTEPKTKPQDMISAGGESVAGITAISGKPGDKKKEKKSLTPAVPVESKPDKPSGKSGMDAALDDLIDTLGGPEETEEENTTYTGPEVSDPMSSTYIEELGKREVTIPPKYRELLAKKEGITGPPADSSKPIGPDDAIDALSSDFTCGSPTAAGKKTEKEESTEVLKAQSAGTVRSAAPPQEKKRKVEKDTMSDQALEALSASLGTRQAEPELDLRSIKEVDEAKAKEEKLEKCGEDDETIPSEYRLKPATDKDGKPLLPEPEEKPKPRSESELIDELSEDFDRSECKEKPSKPTEKTEESKAAAPAPVSEAVCRTSMCSIQSAPPEPATLKGTVPDDAVEALADSLGKKEADPEDGKPVMDKVKEKAKEEDREKLGEKEETIPPDYRLEEVKDKDGKPLLPKESKEQLPPMSEDFLLDALSEDFSGPQNASSLKFEDAKLAAAISEVVSQTPASTTQAGAPPRDTSQSDKDLDDALDKLSDSLGQRQPDPDENKPMEDKVKEKAKAEHRDKLGERDDTIPPEYRHLLDDNGQDKPVKPPTKKSEDSKKPADDQDPIDALSGDLDSCPSTTETSQNTAKDKCKKAASSSKAPKNGGKAKDSAKTTEETSKPKDD

SEQ ID NO: 288118 - protein, 642 aa, Artificial Sequence
  derived and/or modified sequence
MNPTETKAIPVSQQMEGPHLPNKKKHKKQAVKTEPEKKSQSTKLSVVHEKKSQEGKPKEHTEPKSLPKQASDTGSNDAHNKKAVSRSAEQQPSEKSTEPKTKPQDMISAGGESVAGITAISGKPGDKKKEKKSLTPAVPVESKPDKPSGKSGMDAALDDLIDTLGGPEETEEENTTYTGPEVSDPMSSTYIEELGKREVTIPPKYRELLAKKEGITGPPADSSKPIGPDDAIDALSSDFTCGSPTAAGKKTEKEESTEVLKAQSAGTVRSAAPPQEKKRKVEKDTMSDQALEALSASLGTRQAEPELDLRSIKEVDEAKAKEEKLEKCGEDDETIPSEYRLKPATDKDGKPLLPEPEEKPKPRSESELIDELSEDFDRSECKEKPSKPTEKTEESKAAAPAPVSEAVCRTSMCSIQSAPPEPATLKGTVPDDAVEALADSLGKKEADPEDGKPVMDKVKEKAKEEDREKLGEKEETIPPDYRLEEVKDKDGKPLLPKESKEQLPPMSEDFLLDALSEDFSGPQNASSLKFEDAKLAAAISEVVSQTPASTTQAGAPPRDTSQSDKDLDDALDKLSDSLGQRQPDPDENKPMEDKVKEKAKAEHRDKLGERDDTIPPEYRHLLDDNGQDKPVKPPTKKSEDSK

SEQ ID NO: 288119 - protein, 694 aa, Artificial Sequence
  derived and/or modified sequence
MEGPHLPNKKKHKKQAVKTEPEKKSQSTKLSVVHEKKSQEGKPKEHTEPKSLPKQASDTGSNDAHNKKAVSRSAEQQPSEKSTEPKTKPQDMISAGGESVAGITAISGKPGDKKKEKKSLTPAVPVESKPDKPSGKSGMDAALDDLIDTLGGPEETEEENTTYTGPEVSDPMSSTYIEELGKREVTIPPKYRELLAKKEGITGPPADSSKPIGPDDAIDALSSDFTCGSPTAAGKKTEKEESTEVLKAQSAGTVRSAAPPQEKKRKVEKDTMSDQALEALSASLGTRQAEPELDLRSIKEVDEAKAKEEKLEKCGEDDETIPSEYRLKPATDKDGKPLLPEPEEKPKPRSESELIDELSEDFDRSECKEKPSKPTEKTEESKAAAPAPVSEAVCRTSMCSIQSAPPEPATLKGTVPDDAVEALADSLGKKEADPEDGKPVMDKVKEKAKEEDREKLGEKEETIPPDYRLEEVKDKDGKPLLPKESKEQLPPMSEDFLLDALSEDFSGPQNASSLKFEDAKLAAAISEVVSQTPASTTQAGAPPRDTSQSDKDLDDALDKLSDSLGQRQPDPDENKPMEDKVKEKAKAEHRDKLGERDDTIPPEYRHLLDDNGQDKPVKPPTKKSEDSKKPADDQDPIDALSGDLDSCPSTTETSQNTAKDKCKKAASSSKAPKNGGKAKDSAKTTEETSKPKDD

SEQ ID NO: 288120 - DNA, 2487 bp, Artificial Sequence
  derived and/or modified sequence
acattggtaaggtgttttcccccattgaaactaatattttctattttcaagaaaaaagcagcaagcctcggcagcagtcaatcctccagaacctatgctggtggaacagcctcggccaccaaggtgtcagcttcctctggtgcaaccagcaagtcttccagtatgaatcccacagaaaccaaggccattccagtcagccaacagatggaaggaccacatcttcctaacaagaaaaaacacaaaaaacaggctgtaaaaacagaacctgagaagaagtcacagtcaaccaagctgtctgtggttcatgagaaaaaatcccaagaaggaaagccaaaagaacacacagagccaaaaagcctacccaagcaggcatcagatacaggaagtaacgatgctcacaataaaaaagcagtttccagatcagctgaacagcagccatcagagaaatcaacagaaccaaagactaaaccacaagacatgatttctgctggtggagagagtgttgctggtatcactgcaatatctggcaagccgggtgacaagaaaaaagaaaagaaatcattaaccccagctgtgccagttgaatctaaaccggataaaccatcgggaaagtcaggcatggatgctgctttggatgacttaatagatactttaggaggacctgaagaaactgaagaagaaaatacaacgtatactggaccagaagtttcagatccaatgagttccacctacatagaggaattgggtaaaagagaagtcacaattcctccaaaatatagggaactattggctaaaaaggaagggatcacagggcctcctgcagactcttcgaaacccatagggccagatgatgctatagacgccttgtcatctgacttcacctgtgggtcgcctacagctgctggaaagaaaactgaaaaagaggaatctacagaagttttaaaagctcagtcagcagggacagtcagaagtgctgctccaccccaagagaagaaaagaaaggtggagaaggatacaatgagtgatcaagcactcgaggctctgtcggcttcactgggcacccggcaagcagaacctgagctcgacctccgctcaattaaggaagtcgatgaggcaaaagctaaagaagaaaaactagagaagtgtggtgaggatgatgaaacaatcccatctgagtacagattaaaaccagccacggataaagatggaaaaccactattgccagagcctgaagaaaaacccaagcctcggagtgaatcagaactcattgatgaactttcagaagattttgaccggtctgaatgtaaagagaaaccatctaagccaactgaaaagacagaagaatctaaggccgctgctccagctcctgtgtcggaggctgtgtgtcggacctccatgtgtagtatacagtcagcaccccctgagccggctaccttgaagggcacagtgccagatgatgctgtagaagccttggctgatagcctggggaaaaaggaagcagatccagaagatggaaaacctgtgatggataaagtcaaggagaaggccaaagaagaagaccgtgaaaagcttggtgaaaaagaagaaacaattcctcctgattatagattagaagaggtcaaggataaagatggaaagccactcctgccaaaagagtctaaggaacagcttccacccatgagtgaagacttccttctggatgctttgtctgaggacttctctggtccacaaaatgcttcatctcttaaatttgaagatgctaaacttgctgctgccatctctgaagtggtttcccaaaccccagcttcaacgacccaagctggagccccaccccgtgatacctcgcagagtgacaaagacctcgatgatgccttggataaactctctgacagtctaggacaaaggcagcctgacccagatgagaacaaaccaatggaagataaagtaaaggaaaaagctaaagctgaacatagagacaagcttggagaaagagatgacactatcccacctgaatacagacatctcctggatgataatggacaggacaaaccagtgaagccacctacaaagaaatcagaggattcaaagaaacctgcagatgaccaagaccccattgatgctctctcaggagatctggacagctgtccctccactacagaaacctcacagaacacagcaaaggataagtgcaagaaggctgcttccagctccaaagcacctaagaatggaggtaaagcgaaggattcagcaaagacaacagaggaaacttccaagccaaaagatgactaaagaaatacaagttaaggtatctggtatctgcatgtaaaatcttcagctggtggatggtgacttttgaagaacaaaaggctttggcaacagaaaacaattgttctgggtgatttctagaatggtttttgttgagtctctgaacatcctaaatattggtttgttattcttttccagaaagaaaatgaatttgactggttc

SEQ ID NO: 288121 - protein, 772 aa, Artificial Sequence
  derived and/or modified sequence
MSQPGQKPAASPRPRRAAAARRTHEHVSEKTSESPSKPGEKKGSDEKKAASLGSSQSSRTYAGGTASATKVSASSGATSKSSSMNPTETKAIPVSQQMEGPHLPNKKKHKKQAVKTEPEKKSQSTKPKSLPKQASDTGSNDAHNKKAVSRSAEQQPSEKSTEPKTKPQDMISAGGESVAGITAISGKPGDKKKEKKSLTPAVPVESKPDKPSGKSGMDAALDDLIDTLGGPEETEEENTTYTGPEVSDPMSSTYIEELGKREVTIPPKYRELLAKKEGITGPPADSSKPIGPDDAIDALSSDFTCGSPTAAGKKTEKEESTEVLKAQSAGTVRSAAPPQEKKRKVEKDTMSDQALEALSASLGTRQAEPELDLRSIKEVDEAKAKEEKLEKCGEDDETIPSEYRLKPATDKDGKPLLPEPEEKPKPRSESELIDELSEDFDRSECKEKPSKPTEKTEESKAAAPAPVSEAVCRTSMCSIQSAPPEPATLKGTVPDDAVEALADSLGKKEADPEDGKPVMDKVKEKAKEEDREKLGEKEETIPPDYRLEEVKDKDGKPLLPKESKEQLPPMSEDFLLDALSEDFSGPQNASSLKFEDAKLAAAISEVVSQTPASTTQAGAPPRDTSQSDKDLDDALDKLSDSLGQRQPDPDENKPMEDKVKEKAKAEHRDKLGERDDTIPPEYRHLLDDNGQDKPVKPPTKKSEDSKKPADDQDPIDALSGDLDSCPSTTETSQNTAKDKCKKAASSSKAPKNGGKAKDSAKTTEETSKPKDD

SEQ ID NO: 288122 - DNA, 2319 bp, Artificial Sequence
  derived and/or modified sequence
atgtcgcagccaggccagaaaccagcagcctctcccaggcccagacgtgcggcggccgcacgccggacccacgagcacgtgagcgagaagacaagcgagtctccctccaaacccggcgaaaagaagggcagtgatgaaaaaaaagcagccagccttgggtccagtcagtcaagccggacatatgccggaggaacagcatccgccacgaaagtgtcagcatcttccggagccacttccaagagtagcagtatgaacccaactgagaccaaggcaatccccgtgtcccagcagatggagggaccacacttgccaaataaaaagaagcacaaaaagcaggcggtgaagacagaaccagagaagaagtcccagtccaccaagcccaagagtctaccaaagcaggcctccgatacaggttccaacgacgcccataataaaaaagccgtttcgaggtctgccgaacaacagccctccgaaaaatctacagagcccaagaccaagccccaagacatgatctccgctggcggcgagagcgtcgcgggaatcacagcaatctcagggaagccaggggataagaagaaggagaaaaagtcactcactcccgccgtgccagtggaaagcaagcctgataagcccagcggcaagagtggaatggacgccgcactcgacgatctcatcgataccctgggaggcccagaggaaaccgaagaggagaacaccacttatactggcccagaggtgtctgatcctatgtcaagcacatacatcgaggaactcggcaagcgcgaggtcacaatccccccaaagtaccgggaactccttgcgaaaaaagaagggatcacaggcccacctgctgattcttccaagcctattggaccggatgacgcgattgacgctctgagttccgatttcacctgcggaagtcccacggccgcagggaagaagacagagaaagaagagtccacagaagtactgaaggctcaatccgctgggaccgtgcggtccgcagccccaccacaggagaagaagaggaaagttgaaaaagacactatgtcagaccaggccctggaggcattgagtgctagcctggggacgaggcaggccgagccagaactggatctcaggtcgatcaaagaggtcgatgaggcgaaggcaaaagaggagaaactggagaagtgtggggaggatgatgaaacaatccccagcgaatatcgacttaaaccagcaaccgataaagacgggaagcccctgctgcctgagcccgaagagaagcctaagccccgcagtgagtctgaattaatcgatgagctgagtgaggattttgacaggagcgaatgtaaagaaaaaccctcgaagcccaccgagaaaaccgaggaatccaaagctgctgctcccgcccccgtcagcgaagcggtatgccgaactagcatgtgttccattcagagcgcccccccagaacccgcaacgctgaagggaacagtcccggatgacgccgtggaagcactggcagactctttggggaaaaaggaggctgatcccgaggatggtaagcctgtcatggataaagtcaaggaaaaagcaaaggaagaggatagggagaagctgggcgaaaaggaagagacgattccccccgattatcgactggaggaagttaaagacaaggacggaaagccccttcttccgaaagagagtaaagaacaactgcctcccatgagcgaagatttcttgctcgatgcgttgagcgaggatttttccggacctcagaacgcatccagcttgaagttcgaggacgcaaaactggccgccgccatctccgaagtggtgtcccagacgcctgcctccactacacaggccggcgctcctccgagggacactagtcagtccgataaagacctcgacgacgccctcgataagttgtctgactctcttgggcagcgacaaccagacccagatgagaataaaccaatggaagacaaggtcaaagaaaaagcgaaagctgagcatcgggacaagctgggcgaaagggatgacacgattccacctgagtatcgccacctgctagatgacaatggacaggataagccagtcaagccccccacaaaaaagagcgaagattcaaagaaaccagctgacgatcaggatcccatagatgcgctgagcggcgatctggattcctgtccaagcactaccgagacatcccagaacacagcaaaggacaaatgtaaaaaagcagcctcttcatcgaaagccccaaaaaatggaggtaaagcaaaggacagcgcaaagaccacagaagagacatctaagccaaaagatgattag

SEQ ID NO: 288123 - DNA, 2319 bp, Artificial Sequence
  derived and/or modified sequence
atgagccagcccggccagaagccagctgccagcccccggcccaggagagctgctgctgcccggaggacccatgagcacgtgtctgagaagaccagcgagagccccagcaagccaggagagaagaagggcagtgatgagaagaaggccgccagcctgggcagcagccagagcagcaggacctacgccggcggcacagccagcgccaccaaggtgtctgccagcagcggggccaccagcaagagcagctccatgaaccccacagagaccaaggccatccctgtgtcccagcagatggagggcccccacctgcccaacaagaagaagcacaagaagcaggccgtgaagacagagcctgagaagaagagccagagcaccaagcccaagagcctgcccaagcaggccagtgacaccggcagcaatgatgcccacaacaagaaggctgtgagccgctctgctgagcagcagcccagcgagaagagcacagagcccaagaccaagccccaggacatgatctctgctggaggagagagcgtggccggcatcacagccatcagcggcaagccaggggacaagaagaaggagaagaagagcctgaccccagctgtgcctgtggagagcaagccagacaagcccagcggcaagagcggcatggatgctgccctggatgacctgattgacaccctgggcggccctgaggagacagaggaggagaacaccacctacacaggccctgaggtgtctgaccccatgagcagcacctacatcgaggagctgggcaagcgggaggtgaccatcccccccaagtaccgggagctgctggccaagaaggagggcatcaccggccccccagctgacagcagcaagcccatcggcccagatgatgccattgatgccctgagcagtgacttcacctgtggcagccccacagctgctgggaagaagacagagaaggaggagagcacagaggtgctgaaggcccagagcgctggcaccgtgcgctctgctgccccaccccaggagaagaagaggaaggtggagaaggacaccatgtctgaccaggccctggaggccctgagcgccagcctgggcacccggcaggccgagcctgagctggacctgcggagcatcaaggaggtggatgaggccaaggccaaggaggagaagctggagaagtgtggggaggatgatgagaccatccccagcgagtaccgcctgaagccagccacagacaaggatggcaagcccctgctgcctgagcctgaggagaagcccaagcccaggtctgagagcgagctgattgatgagctgtctgaggactttgacagaagtgagtgcaaggagaagcccagcaagcccacagagaagacagaggagagcaaggccgccgccccagcccctgtgtctgaggccgtgtgcaggacctccatgtgcagcatccagagcgcccctcctgagcccgccaccctgaagggcaccgtgcctgatgatgctgtggaggccctggccgacagcctgggcaagaaggaggccgaccctgaagatggcaagcctgtgatggacaaggtgaaggagaaggccaaggaggaggaccgggagaagctgggggagaaggaggagaccatccccccagactaccgcctggaggaggtgaaggacaaggatggcaagcccctgctgcccaaggagagcaaggagcagctgccccccatgtctgaggacttcctgctggatgccctgtctgaggacttcagcggcccccagaatgccagcagcctgaagtttgaagatgccaagctggccgccgccatcagcgaggtggtgtcccagaccccagccagcaccacccaggccggggccccaccccgggacaccagccagagcgacaaggacctggatgatgccctggacaagctgagtgacagcctgggccagaggcagcctgaccctgatgagaacaagcccatggaggacaaggtgaaggagaaggccaaggccgagcaccgggacaagctgggggagagagatgacaccatccccccagagtaccgccacctgctggatgacaatggccaggacaagcctgtgaagccacccaccaagaagtctgaggacagcaagaagccagcagatgaccaggaccccattgatgccctgagcggggacctggacagctgccccagcaccacagagaccagccagaacacagccaaggacaagtgcaagaaggccgccagcagcagcaaggcccccaagaatggaggcaaggccaaggacagcgccaagaccacagaggagaccagcaagcccaaggatgactag

SEQ ID NO: 288124 - DNA, 2319 bp, Artificial Sequence
  derived and/or modified sequence
atgagccagcccggccagaagcccgccgccagcccccggccccggcgcgctgctgccgcgcggagaactcacgagcacgtcagcgagaaaacatctgagtcacctagcaaaccgggcgagaaaaagggatccgacgagaagaaggccgcttcgctgggctccagtcagtctagccggacatacgctggcggcaccgcttcggccacaaaggtgtctgcaagtagcggggcaaccagcaagtcatctagtatgaacccaacagagacaaaagcaatcccggtgtcacagcaaatggaaggaccgcatctacctaataagaaaaaacacaaaaagcaggccgtcaagactgaacctgagaagaaatctcagtccacaaagcccaagtctcttcctaagcaggcaagcgacacaggatctaacgatgctcacaataagaaggctgtgagccgatccgcggagcaacagcccagcgagaagtccaccgaacccaagacaaagccacaagatatgatcagcgctggcggggagtcggtggctggcatcaccgccataagcgggaagccaggggacaaaaaaaaggaaaaaaagagtttgactcctgccgtgcccgtcgagtctaaacctgataagccttcagggaagtctggaatggacgcggctctggacgacctcattgacactctgggcggaccagaagagacagaggaagagaacacgacatatactggacccgaagtatctgacccaatgagcagcacgtatatcgaagagttgggcaaaagagaggttacgatcccacctaaataccgcgagctgctggctaaaaaagagggcatcacggggcctccggccgactcgagtaagccaattggccctgatgacgccatcgacgctctcagttccgatttcacttgcgggtcccccactgctgctggaaagaaaacggagaaagaagaatctacagaggttcttaaggcacagagcgctggtaccgtacgctcagctgcgcctccacaggaaaagaagcgaaaggtcgaaaaagatacgatgtctgaccaggccctggaggccctgtcggcctctttaggcacgcggcaggccgagccagagttggacctgcgatccatcaaggaagtggatgaggctaaggcgaaagaggagaaattagaaaagtgcggtgaggatgacgagaccatccccagtgagtatcgactcaaaccagcaacagacaaggatgggaagcctctgttgccggaacccgaagaaaaacccaagcccagaagcgaaagcgagcttattgacgagctgtctgaagatttcgaccggtcagagtgcaaggaaaaacctagcaaaccgacagaaaaaacagaggagagcaaagcagcggcaccagcgcccgtcagtgaggccgtgtgccgaacttccatgtgcagcatccagagcgcgccaccggaacctgctacccttaagggaactgttcctgatgacgcggtcgaagcattagctgattccttggggaaaaaggaagccgatccagaagacgggaagccggtcatggacaaggtgaaggagaaagcaaaagaagaggatagagaaaaactgggcgagaaggaggagactatcccacccgattacaggctggaagaggtgaaggacaaggatggaaaaccgttactgcctaaggaaagtaaggaacagcttccacctatgagcgaagatttcctgcttgatgcactgtccgaggactttagcggaccgcagaacgcctcaagtctgaagttcgaggacgcgaagctggccgcggctattagcgaggtggttagccaaacccctgcatctacaacacaagcaggcgcaccccctagggatacatctcaatcagataaagacttggacgatgccctggataagctatcggacagcctcgggcaacggcagcccgaccctgatgaaaacaagccaatggaggacaaggtcaaggaaaaagcaaaggccgaacaccgggacaagttgggagagcgggacgacactattccccccgagtatcggcacctgctcgacgataacggccaggacaaaccagttaagccccctaccaagaagtccgaggactctaagaaacccgccgatgatcaggatcctatcgatgcactgtctggtgacctcgattcttgcccgtcgacaacggaaacttcccagaataccgctaaggataaatgtaagaaggccgcttccagctccaaagcccccaaaaatgggggcaaggctaaagactccgctaaaaccaccgaagaaacgtctaaacctaaggacgactag

SEQ ID NO: 288125 - DNA, 2319 bp, Artificial Sequence
  derived and/or modified sequence
atgtcccagccaggccaaaagccagcagccagcccacgaccacgacgtgcggctgcagccaggcggacccatgagcacgtgagcgagaagacaagcgaatcgcccagcaagcctggagagaaaaagggctccgacgagaaaaaggcggcaagcctcggtagctcgcaatcatcgcgcacttatgccggaggcacagcatctgctaccaaggtgtcagctagcagcggagcaacaagcaaatcaagctcgatgaatccaaccgagaccaaggctatccccgtcagccaacagatggaaggccctcatctgcccaataagaaaaagcataagaagcaggcggtgaaaaccgagcctgaaaagaaatcacaatccactaagccaaaatctctgcccaagcaggccagcgataccgggagcaacgatgctcataataagaaggccgtctcccgctcggccgagcaacaacctagcgaaaaatctacggaacccaaaactaagccccaagacatgatcagcgccggtggcgagtccgtagctggcatcacggcaatctcaggaaaacccggtgataaaaagaaagaaaaaaaaagtctgactccagctgtaccagtggaaagtaaaccagataaaccttcagggaaatccggcatggatgctgccctggatgacctcatcgacacactgggtggccctgaagaaacagaggaggaaaatacaacctatacagggccagaagttagtgatcccatgagtagcacgtatatcgaagagctgggaaagagagaagtgaccatccccccaaagtacagagaactccttgccaagaaggaaggcatcacgggaccgcctgccgattctagcaaaccaattgggcctgacgacgctattgatgcactatcaagcgacttcacatgtggttctcctactgcagccggaaagaagactgaaaaagaggagtctacagaggttttgaaagcacagagcgcgggaactgtaagaagcgcagcccctccccaagaaaaaaagcgtaaggttgagaaagatacaatgtcagatcaggcgctggaggcactgagcgccagcttaggcacccggcaagccgaacctgagctagacttgcgttccatcaaagaagtggacgaagccaaggctaaggaagaaaagcttgaaaagtgcggcgaggatgacgagacgattccatccgagtatcggttgaagcccgctactgataaagacggaaaaccactgttaccagaaccagaggagaaaccgaagcccaggagcgaatccgaactgatagatgagctgtcggaagattttgaccgtagcgagtgcaaagaaaagcctagtaagcccaccgaaaaaacggaagagtccaaggcagccgctcctgctccagtgtctgaggcagtctgtcggacgtcaatgtgctctatacaatctgctcctccagagcccgctacgttgaaaggaaccgtgccggacgacgcagttgaagccctggcagatagtctcggaaaaaaggaagccgaccccgaggatgggaagcctgtaatggacaaggtgaaagaaaaggccaaagaggaagaccgtgagaagctgggagagaaggaagagactatcccccctgactatagactggaggaggttaaagacaaagacggaaaacccctgcttccaaaggagtccaaagagcagcttcccccaatgtcagaagacttcctgctggatgcgctgagcgaggattttagtggaccacagaacgcgtcctctctgaagttcgaagatgctaagttggctgcagctatcagcgaggtggtgtcacagacccccgctagcacaactcaggctggcgcaccgccacgtgatacaagccagtctgacaaagatctagatgatgcgctggacaaacttagcgattcactgggccagcggcagcctgatcccgatgaaaataagccgatggaagacaaagtgaaggagaaggcaaaggccgagcaccgggataagctaggggagcgcgacgacaccatcccacccgaataccgccatctgctggacgacaacggacaagataaaccagtgaagcctcccacaaagaagtcggaggactccaagaagccagccgacgaccaggacccgattgatgccttgagcggcgatttggattcttgccccagtaccaccgaaacttcccagaacacggccaaagataagtgtaagaaggctgcatcttcgagtaaggccccaaaaaatgggggtaaagctaaagacagtgcaaaaaccacagaggaaaccagtaagccaaaggatgattag

SEQ ID NO: 288126 - DNA, 4572 bp, Artificial Sequence
  derived and/or modified sequence
ggcccatcggggctaggggaaccccggcgcagacctggggtggggtcggaaaagctgtttcatcgcccgctcccgggccctccgctccctccctccctccctctctccctggcaggactccccgccaggcctccccgccactctccgcggcgcattccgggaggcagcggccgcagcggcctcgccatgtcccagcccggccagaagcccgccgcctccccgcggccccggcgagcagccgccgcccgccgcacccatgagcatgtcagtgaaaaaaccagtgaatcgccttccaaaccaggagaaaagaaaggatcagatgagaaaaaagcagcaagcctcggcagcagtcaatcctccagaacctatgctggtggaacagcctcggccaccaaggtgtcagcttcctctggtgcaaccagcaagtcttccagtatgaatcccacagaaaccaaggccattccagtcagccaacagatggaaggaccacatcttcctaacaagaaaaaacacaaaaaacaggctgtaaaaacagaacctgagaagaagtcacagtcaaccaagccaaaaagcctacccaagcaggcatcagatacaggaagtaacgatgctcacaataaaaaagcagtttccagatcagctgaacagcagccatcagagaaatcaacagaaccaaagactaaaccacaagacatgatttctgctggtggagagagtgttgctggtatcactgcaatatctggcaagccgggtgacaagaaaaaagaaaagaaatcattaaccccagctgtgccagttgaatctaaaccggataaaccatcgggaaagtcaggcatggatgctgctttggatgacttaatagatactttaggaggacctgaagaaactgaagaagaaaatacaacgtatactggaccagaagtttcagatccaatgagttccacctacatagaggaattgggtaaaagagaagtcacaattcctccaaaatatagggaactattggctaaaaaggaagggatcacagggcctcctgcagactcttcgaaacccatagggccagatgatgctatagacgccttgtcatctgacttcacctgtgggtcgcctacagctgctggaaagaaaactgaaaaagaggaatctacagaagttttaaaagctcagtcagcagggacagtcagaagtgctgctccaccccaagagaagaaaagaaaggtggagaaggatacaatgagtgatcaagcactcgaggctctgtcggcttcactgggcacccggcaagcagaacctgagctcgacctccgctcaattaaggaagtcgatgaggcaaaagctaaagaagaaaaactagagaagtgtggtgaggatgatgaaacaatcccatctgagtacagattaaaaccagccacggataaagatggaaaaccactattgccagagcctgaagaaaaacccaagcctcggagtgaatcagaactcattgatgaactttcagaagattttgaccggtctgaatgtaaagagaaaccatctaagccaactgaaaagacagaagaatctaaggccgctgctccagctcctgtgtcggaggctgtgtgtcggacctccatgtgtagtatacagtcagcaccccctgagccggctaccttgaagggcacagtgccagatgatgctgtagaagccttggctgatagcctggggaaaaaggaagcagatccagaagatggaaaacctgtgatggataaagtcaaggagaaggccaaagaagaagaccgtgaaaagcttggtgaaaaagaagaaacaattcctcctgattatagattagaagaggtcaaggataaagatggaaagccactcctgccaaaagagtctaaggaacagcttccacccatgagtgaagacttccttctggatgctttgtctgaggacttctctggtccacaaaatgcttcatctcttaaatttgaagatgctaaacttgctgctgccatctctgaagtggtttcccaaaccccagcttcaacgacccaagctggagccccaccccgtgatacctcgcagagtgacaaagacctcgatgatgccttggataaactctctgacagtctaggacaaaggcagcctgacccagatgagaacaaaccaatggaagataaagtaaaggaaaaagctaaagctgaacatagagacaagcttggagaaagagatgacactatcccacctgaatacagacatctcctggatgataatggacaggacaaaccagtgaagccacctacaaagaaatcagaggattcaaagaaacctgcagatgaccaagaccccattgatgctctctcaggagatctggacagctgtccctccactacagaaacctcacagaacacagcaaaggataagtgcaagaaggctgcttccagctccaaagcacctaagaatggaggtaaagcgaaggattcagcaaagacaacagaggaaacttccaagccaaaagatgactaaagaaatacaagttaaggtatctggtatctgcatgtaaaatcttcagctggtggatggtgacttttgaagaacaaaaggctttggcaacagaaaacaattgttctgggtgatttctagaatggtttttgttgagtctctgaacatcctaaatattggtttgttattcttttccagaaagaaaatgaatttgactggttcacctgtgtactgagtattgataaactttgaatttttttaattgccttcaattgggagagaaagctttatatttgtaagaaatatatttgataaagtttcttaaagcaacaccaaaaaaacaaaagaaaagctaagtgaatttttgcacattctacacacagtgcctgtaaatctcatttgtattttcagtttgcccttaattttttttgttagtgtttagaaaacaatgttttaaacattcttcagtgttctgatttcttattaccccctttcctcttgggcttttgaactgtatttgatgttgctttgggataatgtttataagtcaaacataagatattgtacattgggcacatatctcctcttgggctgctaataataaattaataacaggtaacctggacaaaccaggaagcaccaaaccccttttcagtttgaactcttctttgccaggtgtgaggacttctgcatcttacagtcagcacagaacacactgagacttgaatcaagtcagcaacagagcaaaataaaggttagataagtccttgtgtagcaaatttcgagcataagaaataaaatctaattaattcttagggtactcatctgacttgaactctgttggtttactgtgttagtaaactgtgctttctattatctatacataaaacctgagcagcaactgtgtctttagagctattgccacattagcctttgcactgtatagcgtctggctttatggaacttaagtttaccaaatataaaaagaaacttctgcttttaaaaaaattatatatatatattaaatttgaaacctgcatttctcccacagcaatgtaagaagtaggctctgatgtcctaccactttgaatggttttctaatatcttaatgaatagttcctgaacattgcactgatatcatcgattagaattttgatatttaatttcatctttatttcctggtagagaatgcaggaaaagatgtcaggtacataacataaaacagattgggaatttattgtttccaaagggcatggccttccttagcatcagtttgaagcttttgttatgacttagctgacttgtggcagcggggcaagcaaaaacaataacactgcttataaatggcaccacatcttgttaacctcccccccaaatactctctgaaagtcatgcacatacctatgggattttacacaccaccagcttaaaatgctatgtctctatccatcagaaatagtcattattctatttttaaggcagcaacaagaaaagaaaaaacacttttcctgagggatttctaaccatgtatctaatcctcccatttgggcagtataggtgtttgcttttttgttttctttttttaagaaaaaccttgaaacctttgacactgacagatgtgtttgcaaggatacggcttcagtattactaatttccatgtgtatctggaagtatttttaaatggcataccaaaatccagaagtttaaagatgcctataaaagtaaacaacatttatttaaaaagaactctgaatatgccttcttttttaattagaaatatcttcgagacttgggtgtttgttaataactaataactggagtaagctacaggatctaaagcagccctttttacagtctagttaggagagagaaaataattgcaaatatccacttagaggcaaagaacaattttttattatcaaaaaggtttctgcacattgttgtggcaatattgtatctgtttagaaaatgggcttttccaaaagcaaacaaagataggttcctcaggtgaccaaaactgaaaatcaatatttccatgtttcattaatcaaggcataaaatacaattaaagcaaaatattttacattaaaa

SEQ ID NO: 288127 - DNA, 2319 bp, Artificial Sequence
  derived and/or modified sequence
atgagccagcccggccagaagcccgccgccagccccagacccagaagagccgccgccgccagaagaacccacgagcacgtgagcgagaagaccagcgagagccccagcaagcccggcgagaagaagggcagcgacgagaagaaggccgccagcctgggcagcagccagagcagcagaacctacgccggcggcaccgccagcgccaccaaggtgagcgccagcagcggcgccaccagcaagagcagcagcatgaaccccaccgagaccaaggccatccccgtgagccagcagatggagggcccccacctgcccaacaagaagaagcacaagaagcaggccgtgaagaccgagcccgagaagaagagccagagcaccaagcccaagagcctgcccaagcaggccagcgacaccggcagcaacgacgcccacaacaagaaggccgtgagcagaagcgccgagcagcagcccagcgagaagagcaccgagcccaagaccaagccccaggacatgatcagcgccggcggcgagagcgtggccggcatcaccgccatcagcggcaagcccggcgacaagaagaaggagaagaagagcctgacccccgccgtgcccgtggagagcaagcccgacaagcccagcggcaagagcggcatggacgccgccctggacgacctgatcgacaccctgggcggccccgaggagaccgaggaggagaacaccacctacaccggccccgaggtgagcgaccccatgagcagcacctacatcgaggagctgggcaagagagaggtgaccatcccccccaagtacagagagctgctggccaagaaggagggcatcaccggcccccccgccgacagcagcaagcccatcggccccgacgacgccatcgacgccctgagcagcgacttcacctgcggcagccccaccgccgccggcaagaagaccgagaaggaggagagcaccgaggtgctgaaggcccagagcgccggcaccgtgagaagcgccgcccccccccaggagaagaagagaaaggtggagaaggacaccatgagcgaccaggccctggaggccctgagcgccagcctgggcaccagacaggccgagcccgagctggacctgagaagcatcaaggaggtggacgaggccaaggccaaggaggagaagctggagaagtgcggcgaggacgacgagaccatccccagcgagtacagactgaagcccgccaccgacaaggacggcaagcccctgctgcccgagcccgaggagaagcccaagcccagaagcgagagcgagctgatcgacgagctgagcgaggacttcgacagaagcgagtgcaaggagaagcccagcaagcccaccgagaagaccgaggagagcaaggccgccgcccccgcccccgtgagcgaggccgtgtgcagaaccagcatgtgcagcatccagagcgccccccccgagcccgccaccctgaagggcaccgtgcccgacgacgccgtggaggccctggccgacagcctgggcaagaaggaggccgaccccgaggacggcaagcccgtgatggacaaggtgaaggagaaggccaaggaggaggacagagagaagctgggcgagaaggaggagaccatcccccccgactacagactggaggaggtgaaggacaaggacggcaagcccctgctgcccaaggagagcaaggagcagctgccccccatgagcgaggacttcctgctggacgccctgagcgaggacttcagcggcccccagaacgccagcagcctgaagttcgaggacgccaagctggccgccgccatcagcgaggtggtgagccagacccccgccagcaccacccaggccggcgccccccccagagacaccagccagagcgacaaggacctggacgacgccctggacaagctgagcgacagcctgggccagagacagcccgaccccgacgagaacaagcccatggaggacaaggtgaaggagaaggccaaggccgagcacagagacaagctgggcgagagagacgacaccatcccccccgagtacagacacctgctggacgacaacggccaggacaagcccgtgaagccccccaccaagaagagcgaggacagcaagaagcccgccgacgaccaggaccccatcgacgccctgagcggcgacctggacagctgccccagcaccaccgagaccagccagaacaccgccaaggacaagtgcaagaaggccgccagcagcagcaaggcccccaagaacggcggcaaggccaaggacagcgccaagaccaccgaggagaccagcaagcccaaggacgactag

SEQ ID NO: 288128 - protein, 756 aa, Artificial Sequence
  derived and/or modified sequence
MSQPGQKPAASPRPRRAAAARRTHEHVSEKTSESPSKPGEKKGSDEKKAASLGSSQSSRTYAGGTASATKVSASSGATSKSSSMNPTETKAVKTEPEKKSQSTKLSVVHEKKSQEGKPKEHTEPKSLPKQASDTGSNDAHNKKAVSRSAEQQPSEKSTEPKTKPQDMISAGGESVAGITAISGKPGDKKKEKKSLTPAVPVESKPDKPSGKSGMDAALDDLIDTLGGPEETEEENTTYTGPEVSDPMSSTYIEELGKREVTIPPKYRELLAKPIGPDDAIDALSSDFTCGSPTAAGKKTEKEESTEVLKAQSAGTVRSAAPPQEKKRKVEKDTMSDQALEALSASLGTRQAEPELDLRSIKEVDEAKAKEEKLEKCGEDDETIPSEYRLKPATDKDGKPLLPEPEEKPKPRSESELIDELSEDFDRSECKEKPSKPTEKTEESKAAAPAPVSEAVCRTSMCSIQSAPPEPATLKGTVPDDAVEALADSLGKKEADPEDGKPVMDKVKEKAKEEDREKLGEKEETIPPDYRLEEVKDKDGKPLLPKESKEQLPPMSEDFLLDALSEDFSGPQNASSLKFEDAKLAAAISEVVSQTPASTTQAGAPPRDTSQSDKDLDDALDKLSDSLGQRQPDPDENKPMEDKVKEKAKAEHRDKLGERDDTIPPEYRHLLDDNGQDKPVKPPTKKSEDSKKPADDQDPIDALSGDLDSCPSTTETSQNTAKDKCKKAASSSKAPKNGGKAKDSAKTTEETSKPKDD

SEQ ID NO: 288129 - DNA, 2271 bp, Artificial Sequence
  derived and/or modified sequence
atgtctcagcctggccagaaaccagcagccagcccacgcccccgccgggctgctgcagctaggaggacccatgaacacgtgagcgagaagactagcgagtccccaagcaaacccggcgagaagaagggcagtgacgagaaaaaagctgcctcactgggatctagtcaatcatcccggacatatgctggtgggaccgctagtgccacgaaggttagcgcaagctcgggcgctacaagtaagtcctcttctatgaacccaacagaaactaaggccgtgaaaaccgagccagagaaaaaatctcaatctacaaagctcagcgtcgtgcatgagaagaaaagccaggagggaaaacctaaagagcacaccgagcctaagtccttgcctaagcaggccagtgacaccggtagcaacgatgctcataataaaaaggcagtctcaagatcggctgaacagcagccgagtgagaagagcacagaacccaaaactaagccacaagacatgatttccgctgggggcgagtccgttgcagggatcacggccatctccggaaagcctggagataagaaaaaagagaaaaagtctctgacaccggcggtgcccgtggaaagtaagcccgataaaccatctggtaaatcaggcatggacgcagccttagacgatctgatcgacacacttggcggtccagaagaaactgaagaagagaacacaacatacacaggcccagaggtgagtgaccctatgtccagtacctacattgaagagcttggaaagagggaagtcaccattcctcccaagtatagagaattgcttgcaaaacccatcggtccggacgatgctatcgatgcactctcgtcagattttacatgtggatctccgacagctgcaggcaaaaaaaccgaaaaagaagagagtacagaggtgctgaaagcccaatctgccgggacggtgaggtccgcagcaccacctcaggagaagaaaagaaaggtggagaaggataccatgagcgaccaagcactggaagccctgtctgctagcttggggacaaggcaggccgagccagaacttgatctgagatcaatcaaagaggttgacgaagccaaagccaaggaagaaaagctggaaaagtgtggggaggacgacgagaccatcccctctgagtataggctgaagcccgcgaccgacaaagacggaaagcccctgctccccgagcctgaagagaagccaaagccccgctctgaaagcgagttgatagatgagctaagcgaagacttcgatcggtcagagtgcaaggagaaaccttcgaagcccactgagaaaacggaagagtccaaggctgctgcgcctgcacctgtgagcgaagctgtttgcaggacgagcatgtgcagcattcagtccgcacctcctgagcccgccaccctcaagggcaccgtgcccgacgacgcagtggaggcactcgctgatagccttggaaaaaaggaggccgacccagaagacggaaaaccggtgatggataaagtgaaggagaaggccaaggaggaagacagagagaaactaggcgaaaaggaggagacaataccacccgactataggctagaggaagtcaaagataaggatggcaaaccgctgctgcccaaagagagcaaggagcagctccctcccatgagtgaggactttctgctggatgctctatccgaagatttttcaggcccccagaatgcgagctctctgaagtttgaggacgcgaaactcgcagctgccatctccgaggtagttagccagaccccggccagcactacccaggcaggagcccctccccgagacacttcacagagtgataaagacctggacgacgcacttgataagctctcagattccttgggccagaggcagcccgaccctgatgagaacaagcctatggaagataaagtgaaggagaaggccaaagcagaacatagagacaagcttggggagagggatgacacaattccccccgaataccgccatttgctggacgataacggtcaggataagcctgtcaagccacctaccaagaagagcgaagatagcaagaagcccgccgatgaccaagacccgattgacgcactgtccggtgatttggattcttgtcccagcacaacagagaccagccagaatactgcaaaggataaatgcaagaaagccgcttcatcttcaaaggcgccaaagaatggtggcaaggcaaaagattctgcaaaaaccaccgaagaaacgtcgaaacctaaggacgactag

SEQ ID NO: 288130 - DNA, 2271 bp, Artificial Sequence
  derived and/or modified sequence
atgagccagcccggccagaagccagctgccagcccccggcccaggagagctgctgctgcccggaggacccatgagcacgtgtctgagaagaccagcgagagccccagcaagccaggagagaagaagggcagtgatgagaagaaggccgccagcctgggcagcagccagagcagcaggacctacgccggcggcacagccagcgccaccaaggtgtctgccagcagcggggccaccagcaagagcagctccatgaaccccacagagaccaaggctgtgaagacagagcctgagaagaagagccagagcaccaagctgtctgtggtgcatgagaagaagagccaggagggcaagcccaaggagcacacagagcccaagagcctgcccaagcaggccagtgacaccggcagcaatgatgcccacaacaagaaggctgtgagccgctctgctgagcagcagcccagcgagaagagcacagagcccaagaccaagccccaggacatgatctctgctggaggagagagcgtggccggcatcacagccatcagcggcaagccaggggacaagaagaaggagaagaagagcctgaccccagctgtgcctgtggagagcaagccagacaagcccagcggcaagagcggcatggatgctgccctggatgacctgattgacaccctgggcggccctgaggagacagaggaggagaacaccacctacacaggccctgaggtgtctgaccccatgagcagcacctacatcgaggagctgggcaagcgggaggtgaccatcccccccaagtaccgggagctgctggccaagcccatcggcccagatgatgccattgatgccctgagcagtgacttcacctgtggcagccccacagctgctgggaagaagacagagaaggaggagagcacagaggtgctgaaggcccagagcgctggcaccgtgcgctctgctgccccaccccaggagaagaagaggaaggtggagaaggacaccatgtctgaccaggccctggaggccctgagcgccagcctgggcacccggcaggccgagcctgagctggacctgcggagcatcaaggaggtggatgaggccaaggccaaggaggagaagctggagaagtgtggggaggatgatgagaccatccccagcgagtaccgcctgaagccagccacagacaaggatggcaagcccctgctgcctgagcctgaggagaagcccaagcccaggtctgagagcgagctgattgatgagctgtctgaggactttgacagaagtgagtgcaaggagaagcccagcaagcccacagagaagacagaggagagcaaggccgccgccccagcccctgtgtctgaggccgtgtgcaggacctccatgtgcagcatccagagcgcccctcctgagcccgccaccctgaagggcaccgtgcctgatgatgctgtggaggccctggccgacagcctgggcaagaaggaggccgaccctgaagatggcaagcctgtgatggacaaggtgaaggagaaggccaaggaggaggaccgggagaagctgggggagaaggaggagaccatccccccagactaccgcctggaggaggtgaaggacaaggatggcaagcccctgctgcccaaggagagcaaggagcagctgccccccatgtctgaggacttcctgctggatgccctgtctgaggacttcagcggcccccagaatgccagcagcctgaagtttgaagatgccaagctggccgccgccatcagcgaggtggtgtcccagaccccagccagcaccacccaggccggggccccaccccgggacaccagccagagcgacaaggacctggatgatgccctggacaagctgagtgacagcctgggccagaggcagcctgaccctgatgagaacaagcccatggaggacaaggtgaaggagaaggccaaggccgagcaccgggacaagctgggggagagagatgacaccatccccccagagtaccgccacctgctggatgacaatggccaggacaagcctgtgaagccacccaccaagaagtctgaggacagcaagaagccagcagatgaccaggaccccattgatgccctgagcggggacctggacagctgccccagcaccacagagaccagccagaacacagccaaggacaagtgcaagaaggccgccagcagcagcaaggcccccaagaatggaggcaaggccaaggacagcgccaagaccacagaggagaccagcaagcccaaggatgactag

SEQ ID NO: 288131 - DNA, 2271 bp, Artificial Sequence
  derived and/or modified sequence
atgagccagcccggccagaagcccgccgccagcccccggccccggagggctgcggctgcccggcgaactcacgaacatgtaagcgagaagacgtctgaaagcccctcaaagccaggtgaaaagaaaggttccgacgagaagaaggccgcgtctcttggatccagtcagagctcgcgaacatatgctggcggcaccgcttcagccacgaaagtgtcagccagtagtggtgcaacctctaaatctagttccatgaatcccactgagacaaaagccgtcaagactgagcccgagaagaaatcacagtccaccaagctatcagtcgtgcatgagaaaaaatcccaagaaggaaagcctaaggagcacacagagccgaaaagcctaccaaagcaggcaagtgataccggcagcaatgatgctcacaataagaaagccgtgagtcgttcggcggaacaacagccctctgaaaaaagcacggaacctaagactaaaccccaggacatgatcagcgcaggcggcgaaagtgtggccggcataacggctatttctgggaagcctggggacaaaaagaaagaaaagaagagtctcaccccagccgtgcccgtcgagtccaaacctgataagccctctgggaagtccggaatggatgcggccctcgatgatttgatcgataccctgggcggccctgaagagacagaagaggaaaataccacctacactggacctgaagtgtcagacccaatgtccagcacgtatattgaggagcttgggaaacgcgaagtcaccatcccccccaaatacagagagctgctggccaaaccgatcgggcccgacgacgctattgatgcactctccagtgatttcacatgtggatctcccactgcagcggggaagaaaaccgagaaagaagagtctaccgaagtgctgaaggcccaatcagcaggtacagtccggtcagcagcgcctcctcaggagaaaaaacgtaaagttgaaaaggatacaatgagcgaccaggccttagaggctttgtcggcctctttagggactaggcaagccgagcccgaattggaccttaggtcaatcaaagaggttgacgaggcaaaggccaaagaggaaaaactggaaaaatgcggcgaggatgacgagaccattccttccgagtacagactgaagccagccactgacaaagacgggaaaccactgctgccagagccagaagagaagcccaaaccgaggtctgaatctgaactaatcgacgaactttccgaagactttgatcgttctgaatgtaaggagaagccctcaaaacccacagaaaagacagaagagtctaaagctgcagccccggctccagtgtccgaagccgtttgccggaccagtatgtgcagcatccaaagcgcaccacctgagccagcaaccctaaaaggcacagtacccgatgacgctgtcgaagcactggccgacagtctcggcaaaaaggaagccgaccccgaggacggcaagccggtgatggataaggtgaaagaaaaggccaaggaagaggacagggagaagctgggcgagaaggaggaaacgattccgccagactacaggctcgaagaggtgaaggacaaggacggcaagccgctgttgccgaaagagagcaaagagcaactacctccgatgagtgaagattttttacttgatgctctctctgaagacttttctggaccccagaatgcatcctcattgaagtttgaagacgctaagctggccgccgctattagcgaggtagtgtcacagacacccgcttcaacaacacaggccggtgcaccccctagagacactagccagagcgacaaggatctggacgacgcacttgataagctgagcgacagccttggccagcgccagcccgaccccgatgagaataagcccatggaggacaaggtgaaagaaaaagctaaagcagaacaccgtgataagttgggtgaacgggatgataccatcccccctgagtatagacacttactggacgataacggccaagataaaccagtcaaaccacctaccaagaaatccgaagattccaaaaaacccgccgatgatcaagatcctatcgatgctttatctggcgaccttgactcttgcccatccactaccgaaacaagccagaacactgccaaggataaatgcaaaaaagccgcgtccagtagcaaagctcccaaaaatggaggcaaggccaaggactccgcgaagactaccgaggagacttctaaacccaaggatgactag

SEQ ID NO: 288132 - DNA, 2271 bp, Artificial Sequence
  derived and/or modified sequence
atgtctcagccaggtcagaaacccgctgcatctcctaggccacgtcgcgctgccgctgcaagaaggacccacgagcacgtgtcagaaaaaacttctgaaagtcctagcaagccaggcgaaaaaaaagggagtgacgagaagaaggccgcttctttggggtcctcacagagctccaggacgtatgctggagggaccgcctcagcaactaaggttagtgcatcctcaggtgctacatctaagtcctcctccatgaaccctacagaaactaaagccgttaaaacagagcctgagaagaagtcacagtctaccaaattgtcagttgttcacgaaaagaagtcacaagaagggaagcctaaagaacatacggaacccaagagtctacccaagcaggctagtgatactggcagcaatgacgcacacaacaagaaagcggtttcacgatctgctgaacagcaaccgagtgagaaatccactgagccgaagaccaaacctcaggatatgatttccgccggaggcgagagcgtagctggaattaccgcgatcagcggtaagcccggagacaaaaaaaaagagaaaaagtccctgacaccagcagttcctgtcgagtccaagcccgataagccgtccggaaaaagcggaatggacgccgctctggacgatttaatcgacaccttgggcggtccagaggagactgaggaagagaacacaacatataccggccctgaggtgagtgatccaatgagttcaacctatatagaggagctgggtaaacgggaggtcaccatcccacccaaatatcgagagctgctggctaagcccattggccctgacgatgccatcgacgctctttctagcgattttacttgcgggtcccccactgcggctggtaagaagactgagaaagaagagtctaccgaggtgttgaaagcgcagtccgccggaacagtccgctcagccgctcctccacaggagaaaaaacgaaaggtggagaaagataccatgtccgaccaagcactcgaggcgctgagcgccagtctgggaacacgccaggcagaaccggagttggatctaagatcgattaaggaagtggacgaagcaaaggcaaaggaggagaagctggagaaatgtggggaggatgacgaaaccatcccatctgagtataggctgaaacctgccactgataaagatggcaaacccctccttccagagcccgaagaaaaacccaagccacgtagcgaatcggaactcattgatgaactgagcgaggactttgataggtcggaatgcaaggagaagccctccaaacctactgagaaaaccgaggagtcaaaagcagccgctcccgctccagtcagcgaggctgtctgtagaaccagcatgtgttctattcagagtgcaccaccagagcccgcaaccttgaagggcaccgtgcctgacgacgccgtagaagcgctggccgacagcctgggcaagaaggaggccgaccccgaggacggaaaaccagtcatggacaaggtgaaagagaaggcaaaggaggaggaccgagaaaaattaggtgagaaggaagagaccatccccccagactacagacttgaggaggtcaaagataaggatggcaaacccttactgcctaaagagtcaaaagagcagctaccccctatgtctgaggattttctactcgatgctctgtccgaagatttctccgggccacaaaatgcatccagcttgaaattcgaggacgccaagctcgccgcagctattagcgaagtagtttctcagactccagcctcaacgacccaggctggtgcaccccctcgcgatacctcacagtctgataaggacctcgatgatgctctcgataagctcagcgatagtttagggcaaaggcaacctgatccagacgagaataagcctatggaggataaagtgaaagagaaggctaaagcagaacatcgggataaactaggagaaagagacgacaccatccccccagagtacaggcacttactggacgataacggtcaggacaaacccgttaagccccctacaaaaaaaagcgaggactcaaaaaagccagccgatgatcaggatcccatcgatgctctctctggtgacctcgactcctgcccatctactaccgagacgtcccagaacactgcaaaggacaaatgcaagaaagccgcaagctctagcaaggctccaaagaacgggggaaaagcaaaggattccgctaagactacagaggagactagcaaaccaaaggacgattag

SEQ ID NO: 288133 - DNA, 4524 bp, Artificial Sequence
  derived and/or modified sequence
ggcccatcggggctaggggaaccccggcgcagacctggggtggggtcggaaaagctgtttcatcgcccgctcccgggccctccgctccctccctccctccctctctccctggcaggactccccgccaggcctccccgccactctccgcggcgcattccgggaggcagcggccgcagcggcctcgccatgtcccagcccggccagaagcccgccgcctccccgcggccccggcgagcagccgccgcccgccgcacccatgagcatgtcagtgaaaaaaccagtgaatcgccttccaaaccaggagaaaagaaaggatcagatgagaaaaaagcagcaagcctcggcagcagtcaatcctccagaacctatgctggtggaacagcctcggccaccaaggtgtcagcttcctctggtgcaaccagcaagtcttccagtatgaatcccacagaaaccaaggctgtaaaaacagaacctgagaagaagtcacagtcaaccaagctgtctgtggttcatgagaaaaaatcccaagaaggaaagccaaaagaacacacagagccaaaaagcctacccaagcaggcatcagatacaggaagtaacgatgctcacaataaaaaagcagtttccagatcagctgaacagcagccatcagagaaatcaacagaaccaaagactaaaccacaagacatgatttctgctggtggagagagtgttgctggtatcactgcaatatctggcaagccgggtgacaagaaaaaagaaaagaaatcattaaccccagctgtgccagttgaatctaaaccggataaaccatcgggaaagtcaggcatggatgctgctttggatgacttaatagatactttaggaggacctgaagaaactgaagaagaaaatacaacgtatactggaccagaagtttcagatccaatgagttccacctacatagaggaattgggtaaaagagaagtcacaattcctccaaaatatagggaactattggctaaacccatagggccagatgatgctatagacgccttgtcatctgacttcacctgtgggtcgcctacagctgctggaaagaaaactgaaaaagaggaatctacagaagttttaaaagctcagtcagcagggacagtcagaagtgctgctccaccccaagagaagaaaagaaaggtggagaaggatacaatgagtgatcaagcactcgaggctctgtcggcttcactgggcacccggcaagcagaacctgagctcgacctccgctcaattaaggaagtcgatgaggcaaaagctaaagaagaaaaactagagaagtgtggtgaggatgatgaaacaatcccatctgagtacagattaaaaccagccacggataaagatggaaaaccactattgccagagcctgaagaaaaacccaagcctcggagtgaatcagaactcattgatgaactttcagaagattttgaccggtctgaatgtaaagagaaaccatctaagccaactgaaaagacagaagaatctaaggccgctgctccagctcctgtgtcggaggctgtgtgtcggacctccatgtgtagtatacagtcagcaccccctgagccggctaccttgaagggcacagtgccagatgatgctgtagaagccttggctgatagcctggggaaaaaggaagcagatccagaagatggaaaacctgtgatggataaagtcaaggagaaggccaaagaagaagaccgtgaaaagcttggtgaaaaagaagaaacaattcctcctgattatagattagaagaggtcaaggataaagatggaaagccactcctgccaaaagagtctaaggaacagcttccacccatgagtgaagacttccttctggatgctttgtctgaggacttctctggtccacaaaatgcttcatctcttaaatttgaagatgctaaacttgctgctgccatctctgaagtggtttcccaaaccccagcttcaacgacccaagctggagccccaccccgtgatacctcgcagagtgacaaagacctcgatgatgccttggataaactctctgacagtctaggacaaaggcagcctgacccagatgagaacaaaccaatggaagataaagtaaaggaaaaagctaaagctgaacatagagacaagcttggagaaagagatgacactatcccacctgaatacagacatctcctggatgataatggacaggacaaaccagtgaagccacctacaaagaaatcagaggattcaaagaaacctgcagatgaccaagaccccattgatgctctctcaggagatctggacagctgtccctccactacagaaacctcacagaacacagcaaaggataagtgcaagaaggctgcttccagctccaaagcacctaagaatggaggtaaagcgaaggattcagcaaagacaacagaggaaacttccaagccaaaagatgactaaagaaatacaagttaaggtatctggtatctgcatgtaaaatcttcagctggtggatggtgacttttgaagaacaaaaggctttggcaacagaaaacaattgttctgggtgatttctagaatggtttttgttgagtctctgaacatcctaaatattggtttgttattcttttccagaaagaaaatgaatttgactggttcacctgtgtactgagtattgataaactttgaatttttttaattgccttcaattgggagagaaagctttatatttgtaagaaatatatttgataaagtttcttaaagcaacaccaaaaaaacaaaagaaaagctaagtgaatttttgcacattctacacacagtgcctgtaaatctcatttgtattttcagtttgcccttaattttttttgttagtgtttagaaaacaatgttttaaacattcttcagtgttctgatttcttattaccccctttcctcttgggcttttgaactgtatttgatgttgctttgggataatgtttataagtcaaacataagatattgtacattgggcacatatctcctcttgggctgctaataataaattaataacaggtaacctggacaaaccaggaagcaccaaaccccttttcagtttgaactcttctttgccaggtgtgaggacttctgcatcttacagtcagcacagaacacactgagacttgaatcaagtcagcaacagagcaaaataaaggttagataagtccttgtgtagcaaatttcgagcataagaaataaaatctaattaattcttagggtactcatctgacttgaactctgttggtttactgtgttagtaaactgtgctttctattatctatacataaaacctgagcagcaactgtgtctttagagctattgccacattagcctttgcactgtatagcgtctggctttatggaacttaagtttaccaaatataaaaagaaacttctgcttttaaaaaaattatatatatatattaaatttgaaacctgcatttctcccacagcaatgtaagaagtaggctctgatgtcctaccactttgaatggttttctaatatcttaatgaatagttcctgaacattgcactgatatcatcgattagaattttgatatttaatttcatctttatttcctggtagagaatgcaggaaaagatgtcaggtacataacataaaacagattgggaatttattgtttccaaagggcatggccttccttagcatcagtttgaagcttttgttatgacttagctgacttgtggcagcggggcaagcaaaaacaataacactgcttataaatggcaccacatcttgttaacctcccccccaaatactctctgaaagtcatgcacatacctatgggattttacacaccaccagcttaaaatgctatgtctctatccatcagaaatagtcattattctatttttaaggcagcaacaagaaaagaaaaaacacttttcctgagggatttctaaccatgtatctaatcctcccatttgggcagtataggtgtttgcttttttgttttctttttttaagaaaaaccttgaaacctttgacactgacagatgtgtttgcaaggatacggcttcagtattactaatttccatgtgtatctggaagtatttttaaatggcataccaaaatccagaagtttaaagatgcctataaaagtaaacaacatttatttaaaaagaactctgaatatgccttcttttttaattagaaatatcttcgagacttgggtgtttgttaataactaataactggagtaagctacaggatctaaagcagccctttttacagtctagttaggagagagaaaataattgcaaatatccacttagaggcaaagaacaattttttattatcaaaaaggtttctgcacattgttgtggcaatattgtatctgtttagaaaatgggcttttccaaaagcaaacaaagataggttcctcaggtgaccaaaactgaaaatcaatatttccatgtttcattaatcaaggcataaaatacaattaaagcaaaatattttacattaaaa

SEQ ID NO: 288134 - DNA, 2271 bp, Artificial Sequence
  derived and/or modified sequence
atgagccagcccggccagaagcccgccgccagccccagacccagaagagccgccgccgccagaagaacccacgagcacgtgagcgagaagaccagcgagagccccagcaagcccggcgagaagaagggcagcgacgagaagaaggccgccagcctgggcagcagccagagcagcagaacctacgccggcggcaccgccagcgccaccaaggtgagcgccagcagcggcgccaccagcaagagcagcagcatgaaccccaccgagaccaaggccgtgaagaccgagcccgagaagaagagccagagcaccaagctgagcgtggtgcacgagaagaagagccaggagggcaagcccaaggagcacaccgagcccaagagcctgcccaagcaggccagcgacaccggcagcaacgacgcccacaacaagaaggccgtgagcagaagcgccgagcagcagcccagcgagaagagcaccgagcccaagaccaagccccaggacatgatcagcgccggcggcgagagcgtggccggcatcaccgccatcagcggcaagcccggcgacaagaagaaggagaagaagagcctgacccccgccgtgcccgtggagagcaagcccgacaagcccagcggcaagagcggcatggacgccgccctggacgacctgatcgacaccctgggcggccccgaggagaccgaggaggagaacaccacctacaccggccccgaggtgagcgaccccatgagcagcacctacatcgaggagctgggcaagagagaggtgaccatcccccccaagtacagagagctgctggccaagcccatcggccccgacgacgccatcgacgccctgagcagcgacttcacctgcggcagccccaccgccgccggcaagaagaccgagaaggaggagagcaccgaggtgctgaaggcccagagcgccggcaccgtgagaagcgccgcccccccccaggagaagaagagaaaggtggagaaggacaccatgagcgaccaggccctggaggccctgagcgccagcctgggcaccagacaggccgagcccgagctggacctgagaagcatcaaggaggtggacgaggccaaggccaaggaggagaagctggagaagtgcggcgaggacgacgagaccatccccagcgagtacagactgaagcccgccaccgacaaggacggcaagcccctgctgcccgagcccgaggagaagcccaagcccagaagcgagagcgagctgatcgacgagctgagcgaggacttcgacagaagcgagtgcaaggagaagcccagcaagcccaccgagaagaccgaggagagcaaggccgccgcccccgcccccgtgagcgaggccgtgtgcagaaccagcatgtgcagcatccagagcgccccccccgagcccgccaccctgaagggcaccgtgcccgacgacgccgtggaggccctggccgacagcctgggcaagaaggaggccgaccccgaggacggcaagcccgtgatggacaaggtgaaggagaaggccaaggaggaggacagagagaagctgggcgagaaggaggagaccatcccccccgactacagactggaggaggtgaaggacaaggacggcaagcccctgctgcccaaggagagcaaggagcagctgccccccatgagcgaggacttcctgctggacgccctgagcgaggacttcagcggcccccagaacgccagcagcctgaagttcgaggacgccaagctggccgccgccatcagcgaggtggtgagccagacccccgccagcaccacccaggccggcgccccccccagagacaccagccagagcgacaaggacctggacgacgccctggacaagctgagcgacagcctgggccagagacagcccgaccccgacgagaacaagcccatggaggacaaggtgaaggagaaggccaaggccgagcacagagacaagctgggcgagagagacgacaccatcccccccgagtacagacacctgctggacgacaacggccaggacaagcccgtgaagccccccaccaagaagagcgaggacagcaagaagcccgccgacgaccaggaccccatcgacgccctgagcggcgacctggacagctgccccagcaccaccgagaccagccagaacaccgccaaggacaagtgcaagaaggccgccagcagcagcaaggcccccaagaacggcggcaaggccaaggacagcgccaagaccaccgaggagaccagcaagcccaaggacgactag

SEQ ID NO: 288135 - protein, 754 aa, Artificial Sequence
  derived and/or modified sequence
MAFASWWYKTHVSEKTSESPSKPGEKKGSDEKKAASLGSSQSSRTYAGGTASATKVSASSGATSKSSSMNPTETKAVKTEPEKKSQSTKLSVVHEKKSQEGKPKEHTEPKSLPKQASDTGSNDAHNKKAVSRSAEQQPSEKSTEPKTKPQDMISAGGESVAGITAISGKPGDKKKEKKSLTPAVPVESKPDKPSGKSGMDAALDDLIDTLGGPEETEEENTTYTGPEVSDPMSSTYIEELGKREVTIPPKYRELLAKKEGITGPPADSSKPIGPDDAIDALSSDFTCGSPTAAGKKTEKEESTEVLKAQSAGTVRSAAPPQEKKRKVEKDTMSDQALEALSASLGTRQAEPELDLRSIKEVDEAKAKEEKLEKCGEDDETIPSEYRLKPATDKDGKPLLPEPEEKPKPRSESELIDELSEDFDRSECKEKPSKPTEKTEESKAAAPAPVSEAVCRTSMCSIQSAPPEPATLKGTVPDDAVEALADSLGKKEADPEDGKPVMDKVKEKAKEEDREKLGEKEETIPPDYRLEEVKDKDGKPLLPKESKEQLPPMSEDFLLDALSEDFSGPQNASSLKFEDAKLAAAISEVVSQTPASTTQAGAPPRDTSQSDKDLDDALDKLSDSLGQRQPDPDENKPMEDKVKEKAKAEHRDKLGERDDTIPPEYRHLLDDNGQDKPVKPPTKKSEDSKKPADDQDPIDALSGDLDSCPSTTETSQNTAKDKCKKAASSSKAPKNGGKAKDSAKTTEETSKPKDD

SEQ ID NO: 288136 - DNA, 2265 bp, Artificial Sequence
  derived and/or modified sequence
atggcattcgccagctggtggtacaagacccacgtgagcgagaaaacgtccgaatccccctctaaacccggtgagaagaaaggctccgacgagaagaaggctgccagcctcgggtcctctcagagctccaggacctatgctggcggaaccgcctcggctaccaaggtgtctgcctctagtggggccacatcgaagagcagttccatgaatccaactgagactaaagccgtgaagacggaaccagagaagaaaagtcagtccaccaagctcagcgtcgtacacgaaaagaagagccaggaagggaagcccaaagagcacactgagccaaagtcccttcctaagcaggccagcgacactggaagtaacgatgctcataataaaaaggctgtttcccggagcgccgaacagcagccatccgagaagtcaacagagcctaagaccaaaccccaggacatgataagcgctgggggcgagtcagtggctggcattaccgctattagcggaaagccaggcgataaaaaaaaggaaaagaagtcactgacacccgccgtacccgttgagagcaagccagataaaccctctgggaagtcagggatggatgccgctctggatgacctgatagacaccctgggaggccccgaagagacagaggaagaaaatacaacttacaccggacccgaggttagtgacccaatgtcctccacctatattgaggagctcggcaagcgggaagtgacaatcccgccgaagtatcgcgagctgttagcaaagaaggaaggcataaccgggccccctgccgatagctctaagcctattggtcctgatgacgccatagacgccctgtcatccgatttcacctgcggttcccccactgccgcaggaaaaaagactgaaaaagaagaaagtaccgaggtgctgaaagcccagtcagccggtactgtgaggtccgccgctcccccccaggagaaaaagcgcaaggttgagaaagataccatgagcgaccaggccctggaggcgctttcagctagcctgggtacccgccaggccgaacctgagctggatctgcgatcaatcaaagaggtggatgaagctaaggctaaagaggagaaactagagaagtgcggcgaggacgacgagactatccccagcgagtatcggttgaagcccgcgaccgacaaagacgggaaaccgctgttacccgaacctgaagagaagccaaaaccacgttccgagtcagagctgattgacgagctgtctgaggacttcgataggtcagagtgcaaggagaagccttccaagccaaccgagaaaaccgaggaatcaaaggccgccgcgcctgcccccgtgtcagaggccgtctgccgtaccagcatgtgtagcatccagtctgcccctcccgaaccagcaacccttaagggaactgtgcctgacgacgcagttgaggccctagctgacagcctggggaagaaagaggctgaccccgaggatggcaagccagtgatggataaggtgaaagagaaggccaaggaagaggaccgagaaaagctcggtgagaaagaggagaccattccacccgactacaggcttgaggaggtcaaggacaaggacgggaaaccacttcttccaaaggagagcaaggagcaactcccaccgatgagtgaagatttccttctcgacgcactgagtgaagacttctctggtccacagaatgcaagctcactgaaattcgaggatgcaaagctggcagcggccatttctgaagtggtctcacaaacccccgcatctaccacacaggccggcgccccacccagagacacctcccagagtgacaaagacctcgatgatgcattggataagctgagcgactcattaggacagcggcagcccgatcctgacgagaacaaacctatggaagataaggtaaaggagaaggccaaggcagaacatcgcgataaactcggcgagcgcgacgacaccataccccccgagtaccgccatctcttagatgacaatgggcaagataaaccggtcaagcctccaactaagaagtctgaggactcaaaaaagcccgccgacgaccaggatcccattgacgccctgtctggagacctcgatagttgtccttccactacggagacctcccagaatactgcaaaggacaaatgcaaaaaggcagcaagtagttctaaagcacccaaaaatggaggtaaggctaaagatagcgcgaagaccaccgaagaaacttctaaaccaaaggacgattag

SEQ ID NO: 288137 - DNA, 2265 bp, Artificial Sequence
  derived and/or modified sequence
atggcctttgcctcctggtggtacaagacccacgtgtctgagaagaccagcgagagccccagcaagccaggagagaagaagggcagtgatgagaagaaggccgccagcctgggcagcagccagagcagcaggacctacgccggcggcacagccagcgccaccaaggtgtctgccagcagcggggccaccagcaagagcagctccatgaaccccacagagaccaaggctgtgaagacagagcctgagaagaagagccagagcaccaagctgtctgtggtgcatgagaagaagagccaggagggcaagcccaaggagcacacagagcccaagagcctgcccaagcaggccagtgacaccggcagcaatgatgcccacaacaagaaggctgtgagccgctctgctgagcagcagcccagcgagaagagcacagagcccaagaccaagccccaggacatgatctctgctggaggagagagcgtggccggcatcacagccatcagcggcaagccaggggacaagaagaaggagaagaagagcctgaccccagctgtgcctgtggagagcaagccagacaagcccagcggcaagagcggcatggatgctgccctggatgacctgattgacaccctgggcggccctgaggagacagaggaggagaacaccacctacacaggccctgaggtgtctgaccccatgagcagcacctacatcgaggagctgggcaagcgggaggtgaccatcccccccaagtaccgggagctgctggccaagaaggagggcatcaccggccccccagctgacagcagcaagcccatcggcccagatgatgccattgatgccctgagcagtgacttcacctgtggcagccccacagctgctgggaagaagacagagaaggaggagagcacagaggtgctgaaggcccagagcgctggcaccgtgcgctctgctgccccaccccaggagaagaagaggaaggtggagaaggacaccatgtctgaccaggccctggaggccctgagcgccagcctgggcacccggcaggccgagcctgagctggacctgcggagcatcaaggaggtggatgaggccaaggccaaggaggagaagctggagaagtgtggggaggatgatgagaccatccccagcgagtaccgcctgaagccagccacagacaaggatggcaagcccctgctgcctgagcctgaggagaagcccaagcccaggtctgagagcgagctgattgatgagctgtctgaggactttgacagaagtgagtgcaaggagaagcccagcaagcccacagagaagacagaggagagcaaggccgccgccccagcccctgtgtctgaggccgtgtgcaggacctccatgtgcagcatccagagcgcccctcctgagcccgccaccctgaagggcaccgtgcctgatgatgctgtggaggccctggccgacagcctgggcaagaaggaggccgaccctgaagatggcaagcctgtgatggacaaggtgaaggagaaggccaaggaggaggaccgggagaagctgggggagaaggaggagaccatccccccagactaccgcctggaggaggtgaaggacaaggatggcaagcccctgctgcccaaggagagcaaggagcagctgccccccatgtctgaggacttcctgctggatgccctgtctgaggacttcagcggcccccagaatgccagcagcctgaagtttgaagatgccaagctggccgccgccatcagcgaggtggtgtcccagaccccagccagcaccacccaggccggggccccaccccgggacaccagccagagcgacaaggacctggatgatgccctggacaagctgagtgacagcctgggccagaggcagcctgaccctgatgagaacaagcccatggaggacaaggtgaaggagaaggccaaggccgagcaccgggacaagctgggggagagagatgacaccatccccccagagtaccgccacctgctggatgacaatggccaggacaagcctgtgaagccacccaccaagaagtctgaggacagcaagaagccagcagatgaccaggaccccattgatgccctgagcggggacctggacagctgccccagcaccacagagaccagccagaacacagccaaggacaagtgcaagaaggccgccagcagcagcaaggcccccaagaatggaggcaaggccaaggacagcgccaagaccacagaggagaccagcaagcccaaggatgactag

SEQ ID NO: 288138 - DNA, 2265 bp, Artificial Sequence
  derived and/or modified sequence
atggccttcgccagctggtggtacaagacccacgtgagcgagaagacgagcgaatccccttccaagcccggcgagaagaaaggctcagatgagaagaaggctgcgagcctcggttcctctcaatcaagccgaacttacgccggcggtacggccagcgctacgaaagtttccgcttccagcggagccacatctaaatcctccagtatgaatcccactgagacaaaggccgtcaaaacagagcctgaaaaaaaaagccagtccacaaaactgagcgtagtgcacgaaaaaaagtcccaagaaggcaagcccaaagaacacacagaacccaaatccctacccaaacaggctagcgacaccgggtcaaatgatgcccataataagaaagcagtttctagatccgctgaacaacaacccagcgagaaatctactgaaccaaagacaaaaccccaagacatgatcagcgccggtggagagtctgtggccggcattactgccattagtgggaaacccggggacaaaaaaaaagagaagaagtctctgaccccggccgtaccagtcgagagcaagcccgacaagcctagtggtaagtccggcatggacgctgcccttgatgatctaatcgatactttgggagggcccgaagaaacggaggaagagaatactacgtatacaggcccagaagtcagcgatcctatgtcttcaacttacatagaagagcttggcaagagagaggtcaccattccccctaaataccgagagctcctggccaaaaaggagggcattaccgggccaccagcagactcctccaaacccatcggccccgatgatgctatcgacgcactctcctccgactttacctgtggtagtcctactgcagctgggaagaagactgagaaggaagagagtaccgaggtgctgaaggcacagagcgcgggtaccgtaagatcggcagcacccccgcaggagaaaaagcggaaagtggagaaagataccatgtccgatcaggcactcgaggctctgtcggcgagtttggggacccgacaagccgaacctgaactcgaccttaggagcatcaaagaagtggatgaggctaaggctaaagaagaaaagttggagaagtgtggagaagatgacgaaaccatacctagtgagtataggctgaagcctgcaaccgataaggatggaaaaccgctcctaccagaaccggaggagaagccaaagccccgatctgagtcggagcttatcgacgaactgtctgaagattttgatcggtccgaatgtaaggaaaagcccagcaagccaaccgagaagactgaggagagcaaggctgccgcacccgcaccagtcagcgaagccgtgtgcaggacttccatgtgttcaatacagtccgcaccgcccgagcccgccaccctgaaagggacagtgcccgatgacgctgttgaggcactggccgatagtctcggaaaaaaagaggccgatcccgaggacggcaagcccgtcatggataaagtaaaggagaaagccaaggaagaagatagggagaaactcggggaaaaggaagaaactattccccccgactatcggctggaggaggtcaaggataaagacgggaagccgctgctccctaaagagagcaaggaacagctcccgcccatgtctgaagactttttgcttgacgctctgtccgaggacttttccggtccccagaacgcttccagtctgaaatttgaagatgctaaactggctgcggcaataagcgaagtggtaagccagacaccagcctctaccacccaagcaggggctcccccccgagacacatcacagagtgacaaagacttggatgacgctttggataaactgtcggatagcctgggccagaggcagccagaccccgacgagaataaacctatggaagacaaggttaaagagaaagcaaaagccgagcatcgcgacaaactgggagagcgggatgacaccattccccctgaatacagacaccttttggacgataatggacaagacaaaccagttaagccgcctaccaagaagagcgaggactccaagaaacccgccgatgaccaagatccgatcgacgctctcagcggagacctggatagttgcccaagcacgactgagacaagccagaacaccgcgaaagacaagtgtaaaaaggcagctagcagctcaaaggctccgaagaacggtgggaaagcaaaagacagcgctaagacaaccgaggagaccagtaagccaaaagatgattag

SEQ ID NO: 288139 - DNA, 2265 bp, Artificial Sequence
  derived and/or modified sequence
atggctttcgcgagctggtggtataagactcatgtgtctgagaagaccagtgagtctcccagcaaacccggtgaaaagaaaggtagcgatgaaaaaaaagccgcttccttgggctcaagccaatcttcccgcacttatgcaggtggcactgcctccgccactaaagtctctgcttcctccggcgcaaccagcaaatcctcatctatgaaccctaccgaaaccaaagccgtcaagaccgagcctgagaagaagtcccagtccacaaagctgtccgtggttcacgaaaagaaatcacaggagggaaagcctaaagagcacacagaaccaaaatccctccctaaacaggcctccgatacgggaagcaatgacgcccataataagaaagcagtatctcgatccgccgaacaacagccgtccgagaaatccacagagcccaaaactaaaccgcaggatatgattagtgcaggcggtgagagcgtcgcgggtattaccgctattagcgggaaaccaggagataagaagaaggagaaaaagtcgctgacacccgcagttcctgtcgaaagtaagcccgacaagcctagcggcaaaagcggcatggatgccgctctcgacgatcttatagacacgttagggggacccgaggagacggaggaggaaaatacaacttacaccgggccagaagtgtccgaccctatgtcatcgacctacatagaggaactcgggaaaagggaagttactatacccccaaagtaccgggaactgcttgcaaaaaaagaggggattaccggcccaccagctgatagctccaaacctatcggacccgatgacgctattgacgctttaagtagtgatttcacttgcggctcaccaaccgctgctggcaaaaaaacggagaaggaggaatcaacagaggttctgaaagctcagtccgccggtacagttaggtcggcagcacctccacaggaaaaaaaacgaaaagttgaaaaggacaccatgtcagatcaggcacttgaggccctttctgcatccctcgggacccgccaggcggagcccgaattggacttgaggagtataaaagaggtggatgaggctaaggccaaggaggaaaagcttgagaagtgcggcgaggatgatgagacaatcccgtcagagtatcgactaaaacctgctacagataaggacgggaagcctttgctgcccgaacccgaagaaaagccaaagcccagaagcgagagcgagttgatcgacgaactgagcgaggatttcgataggtccgagtgcaaagaaaagccttctaagccaactgagaaaaccgaagaatctaaggccgctgcccctgcccctgttagcgaggccgtgtgtagaacaagcatgtgttctatccaatcagcaccaccggagcccgctactctgaaaggcaccgtgcctgatgacgccgtcgaggcacttgccgacagtttgggaaagaaggaggccgatcctgaggacggcaaacccgtgatggacaaagttaaggagaaggcaaaggaagaggatcgggagaaactcggggagaaggaggagactataccacctgactaccgtttggaagaggtgaaagataaggatgggaagccgctcttgcccaaagaatcgaaggaacagcttcctcccatgtccgaagattttcttctcgacgccctgtccgaagatttttccggcccacagaatgcttcatcgctgaagttcgaggacgccaagttggccgcagcgatcagtgaagtggtgtcacagacaccagcgtccactactcaggcaggagctccacctcgggacacatctcagtctgacaaggacctagatgatgcgctagacaagctgagtgactcattggggcagcgccagcctgatcctgatgagaacaaacctatggaggacaaagtgaaagaaaaagcaaaagcagagcaccgcgacaagcttggagaaagggatgatacaattccacccgaataccggcaccttctggacgataacggacaagacaaacccgtgaagccgcctacaaagaaatcagaggacagcaagaagcccgctgatgatcaggatcccattgatgctcttagtggtgatctcgactcttgcccctccactaccgaaaccagtcagaatacagctaaggacaagtgtaagaaagctgccagtagtagtaaggctcccaagaatggcggaaaagctaaggatagcgctaagacaacagaggaaacgtctaaaccgaaggacgattag

SEQ ID NO: 288140 - DNA, 2425 bp, Artificial Sequence
  derived and/or modified sequence
gtgtgagcccggcgcctccaacgcaacaccccgcgccctcgccggctcccccgccgtgcggatcggagccagccggttgttgccatggcattcgccagctggtggtacaagacgcatgtcagtgaaaaaaccagtgaatcgccttccaaaccaggagaaaagaaaggatcagatgagaaaaaagcagcaagcctcggcagcagtcaatcctccagaacctatgctggtggaacagcctcggccaccaaggtgtcagcttcctctggtgcaaccagcaagtcttccagtatgaatcccacagaaaccaaggctgtaaaaacagaacctgagaagaagtcacagtcaaccaagctgtctgtggttcatgagaaaaaatcccaagaaggaaagccaaaagaacacacagagccaaaaagcctacccaagcaggcatcagatacaggaagtaacgatgctcacaataaaaaagcagtttccagatcagctgaacagcagccatcagagaaatcaacagaaccaaagactaaaccacaagacatgatttctgctggtggagagagtgttgctggtatcactgcaatatctggcaagccgggtgacaagaaaaaagaaaagaaatcattaaccccagctgtgccagttgaatctaaaccggataaaccatcgggaaagtcaggcatggatgctgctttggatgacttaatagatactttaggaggacctgaagaaactgaagaagaaaatacaacgtatactggaccagaagtttcagatccaatgagttccacctacatagaggaattgggtaaaagagaagtcacaattcctccaaaatatagggaactattggctaaaaaggaagggatcacagggcctcctgcagactcttcgaaacccatagggccagatgatgctatagacgccttgtcatctgacttcacctgtgggtcgcctacagctgctggaaagaaaactgaaaaagaggaatctacagaagttttaaaagctcagtcagcagggacagtcagaagtgctgctccaccccaagagaagaaaagaaaggtggagaaggatacaatgagtgatcaagcactcgaggctctgtcggcttcactgggcacccggcaagcagaacctgagctcgacctccgctcaattaaggaagtcgatgaggcaaaagctaaagaagaaaaactagagaagtgtggtgaggatgatgaaacaatcccatctgagtacagattaaaaccagccacggataaagatggaaaaccactattgccagagcctgaagaaaaacccaagcctcggagtgaatcagaactcattgatgaactttcagaagattttgaccggtctgaatgtaaagagaaaccatctaagccaactgaaaagacagaagaatctaaggccgctgctccagctcctgtgtcggaggctgtgtgtcggacctccatgtgtagtatacagtcagcaccccctgagccggctaccttgaagggcacagtgccagatgatgctgtagaagccttggctgatagcctggggaaaaaggaagcagatccagaagatggaaaacctgtgatggataaagtcaaggagaaggccaaagaagaagaccgtgaaaagcttggtgaaaaagaagaaacaattcctcctgattatagattagaagaggtcaaggataaagatggaaagccactcctgccaaaagagtctaaggaacagcttccacccatgagtgaagacttccttctggatgctttgtctgaggacttctctggtccacaaaatgcttcatctcttaaatttgaagatgctaaacttgctgctgccatctctgaagtggtttcccaaaccccagcttcaacgacccaagctggagccccaccccgtgatacctcgcagagtgacaaagacctcgatgatgccttggataaactctctgacagtctaggacaaaggcagcctgacccagatgagaacaaaccaatggaagataaagtaaaggaaaaagctaaagctgaacatagagacaagcttggagaaagagatgacactatcccacctgaatacagacatctcctggatgataatggacaggacaaaccagtgaagccacctacaaagaaatcagaggattcaaagaaacctgcagatgaccaagaccccattgatgctctctcaggagatctggacagctgtccctccactacagaaacctcacagaacacagcaaaggataagtgcaagaaggctgcttccagctccaaagcacctaagaatggaggtaaagcgaaggattcagcaaagacaacagaggaaacttccaagccaaaagatgactaaagaaatacaagttaaggtatctggtatctgcatgtaaaatcttcagctggtggatggtgacttttgaagaacaaaa

SEQ ID NO: 288141 - DNA, 2265 bp, Artificial Sequence
  derived and/or modified sequence
atggccttcgccagctggtggtacaagacccacgtgagcgagaagaccagcgagagccccagcaagcccggcgagaagaagggcagcgacgagaagaaggccgccagcctgggcagcagccagagcagcagaacctacgccggcggcaccgccagcgccaccaaggtgagcgccagcagcggcgccaccagcaagagcagcagcatgaaccccaccgagaccaaggccgtgaagaccgagcccgagaagaagagccagagcaccaagctgagcgtggtgcacgagaagaagagccaggagggcaagcccaaggagcacaccgagcccaagagcctgcccaagcaggccagcgacaccggcagcaacgacgcccacaacaagaaggccgtgagcagaagcgccgagcagcagcccagcgagaagagcaccgagcccaagaccaagccccaggacatgatcagcgccggcggcgagagcgtggccggcatcaccgccatcagcggcaagcccggcgacaagaagaaggagaagaagagcctgacccccgccgtgcccgtggagagcaagcccgacaagcccagcggcaagagcggcatggacgccgccctggacgacctgatcgacaccctgggcggccccgaggagaccgaggaggagaacaccacctacaccggccccgaggtgagcgaccccatgagcagcacctacatcgaggagctgggcaagagagaggtgaccatcccccccaagtacagagagctgctggccaagaaggagggcatcaccggcccccccgccgacagcagcaagcccatcggccccgacgacgccatcgacgccctgagcagcgacttcacctgcggcagccccaccgccgccggcaagaagaccgagaaggaggagagcaccgaggtgctgaaggcccagagcgccggcaccgtgagaagcgccgcccccccccaggagaagaagagaaaggtggagaaggacaccatgagcgaccaggccctggaggccctgagcgccagcctgggcaccagacaggccgagcccgagctggacctgagaagcatcaaggaggtggacgaggccaaggccaaggaggagaagctggagaagtgcggcgaggacgacgagaccatccccagcgagtacagactgaagcccgccaccgacaaggacggcaagcccctgctgcccgagcccgaggagaagcccaagcccagaagcgagagcgagctgatcgacgagctgagcgaggacttcgacagaagcgagtgcaaggagaagcccagcaagcccaccgagaagaccgaggagagcaaggccgccgcccccgcccccgtgagcgaggccgtgtgcagaaccagcatgtgcagcatccagagcgccccccccgagcccgccaccctgaagggcaccgtgcccgacgacgccgtggaggccctggccgacagcctgggcaagaaggaggccgaccccgaggacggcaagcccgtgatggacaaggtgaaggagaaggccaaggaggaggacagagagaagctgggcgagaaggaggagaccatcccccccgactacagactggaggaggtgaaggacaaggacggcaagcccctgctgcccaaggagagcaaggagcagctgccccccatgagcgaggacttcctgctggacgccctgagcgaggacttcagcggcccccagaacgccagcagcctgaagttcgaggacgccaagctggccgccgccatcagcgaggtggtgagccagacccccgccagcaccacccaggccggcgccccccccagagacaccagccagagcgacaaggacctggacgacgccctggacaagctgagcgacagcctgggccagagacagcccgaccccgacgagaacaagcccatggaggacaaggtgaaggagaaggccaaggccgagcacagagacaagctgggcgagagagacgacaccatcccccccgagtacagacacctgctggacgacaacggccaggacaagcccgtgaagccccccaccaagaagagcgaggacagcaagaagcccgccgacgaccaggaccccatcgacgccctgagcggcgacctggacagctgccccagcaccaccgagaccagccagaacaccgccaaggacaagtgcaagaaggccgccagcagcagcaaggcccccaagaacggcggcaaggccaaggacagcgccaagaccaccgaggagaccagcaagcccaaggacgactag

SEQ ID NO: 288142 - DNA, 2127 bp, Artificial Sequence
  derived and/or modified sequence
atgaatcccactgagactaaagccatccccgtgtcacagcagatggagggaccgcacctgcccaataaaaaaaaacataaaaaacaggccgtaaagaccgaaccagaaaagaagtcacagtctacgaagctgagcgtggtgcacgagaagaaaagccaggagggcaaaccaaaagagcacaccgaaccaaagagtctacccaagcaggccagcgatactgggagcaacgacgcgcataacaaaaaggcagtgtccagatctgcggagcagcaaccctcggaaaaatccaccgagccaaagaccaagccccaggatatgatttccgctggaggggagtcagtcgccggcatcaccgccatttcgggaaagccaggggataagaagaaagagaaaaaatccttaacgcccgcagtgcccgtggagagcaagcctgacaagccgagcgggaagtcaggaatggatgcagctctggacgacctcattgacacactaggagggcccgaagaaactgaggaagaaaacactacctacactggaccggaggtaagcgaccccatgagttctacctatatagaggaacttggcaagagggaagtgacaataccacctaaatacagggagctgctggcaaagaaagaaggtattactggaccccccgccgatagttcaaagccgattggacccgatgatgctatcgacgcgctttctagtgatttcacctgcggatctcccactgctgcaggcaaaaagacagagaaagaggaatctaccgaagtgctgaaggcacagtccgcggggacagtgcggtctgccgctccaccccaggagaagaaacgcaaggtcgagaaggacacaatgagcgaccaagccctcgaggccttatcagctagcctcgggaccaggcaagcagagcccgagctggacctgcgctctatcaaagaagtggacgaagcaaaagccaaagaggagaaactcgagaagtgtggggaggacgatgaaacaattccttctgaatatagacttaagccagctaccgacaaggatggaaagcccttactgcctgaacccgaagagaaacctaaaccaaggtcagaaagcgagctcatcgacgaactatccgaagacttcgataggagtgagtgcaaggagaagcccagcaaaccaaccgaaaaaactgaggagtccaaggcagccgcccccgctcctgtgtcagaggccgtatgtcggacatctatgtgtagtatccagtctgcccctccagagcccgctaccctcaagggaacagtgcccgacgatgcagtcgaagctctggcggatagcctcggaaagaaggaggccgaccccgaagacggcaagcctgtcatggataaggttaaggaaaaggccaaggaggaggaccgcgagaaattgggagagaaagaggagacaattccaccagactacaggttggaagaagtcaaggataaagatggcaaacccctccttccaaaagagagtaaggaacagctgccaccaatgtctgaagacttccttctcgacgcactatccgaggacttcagcggaccacagaacgcaagctccctgaaatttgaggacgccaaattggcggccgctatcagtgaggtggtgtcccaaacgccggcttccactacccaggcaggggcccccccacgagatacctctcagagcgataaagatcttgacgacgctcttgacaagctctcagattccctgggccaaaggcagcccgaccctgacgagaacaagcccatggaggataaagtgaaagagaaagccaaggccgaacaccgggacaagttgggagaacgcgacgacactattccaccagagtacaggcatctgctcgatgacaacgggcaggacaaaccggttaaaccacctaccaaaaaaagtgaagatagcaagaagcccgctgatgatcaggaccctatagatgccctctcgggcgacctggactcgtgtccaagcaccactgaaacctcccaaaacaccgctaaggacaaatgtaaaaaagcggcatccagtagcaaggctcccaagaatggtggcaaagctaaggatagcgcgaagaccaccgaagagacctccaaaccgaaagacgactag

SEQ ID NO: 288143 - DNA, 1929 bp, Artificial Sequence
  derived and/or modified sequence
atgaacccaactgagaccaaggccatcccagtgagccagcagatggaggggccccacttgccaaacaaaaaaaagcacaagaaacaagccgtgaaaacagaacccgagaaaaaatctcagtcaacaaagctctctgtcgttcatgagaagaagtcacaggaaggcaagcccaaagagcatactgaacctaagtcgttaccgaaacaggcttcagacactggtagcaacgacgctcataacaagaaggctgtcagccggagtgcggagcagcagcctagcgagaagagtactgagcccaaaacaaagccgcaggacatgatttcagcgggtggagagtccgtggccggaattaccgctatctccggcaagccaggcgacaagaagaaagagaagaagtccttgaccccggccgtcccagtggagtcaaaaccagacaagccctcaggaaagtccggaatggacgctgctctcgatgatctcatagatactctgggagggcccgaggagacggaagaagagaacacaacttataccgggcccgaggtctccgatcccatgagttctacatatattgaagagctggggaaacgggaggttaccatccccccaaagtaccgcgagcttctggcaaaaaaggaggggattacaggtcctccagctgactcttcaaagccaattggccctgacgacgccatcgacgcattgagcagtgactttacctgcgggtctcccaccgctgccgggaagaagaccgaaaaagaagaatccacagaagtgcttaaggctcagagtgcaggaacggtgcgctcagccgctccaccacaagaaaaaaagagaaaagtcgagaaagacacaatgagcgatcaggcactggaggccctctccgcctcccttggcacaaggcaggccgaaccggaactggacctgcgatcaatcaaagaagtcgatgaggcaaaggcaaaggaagaaaagctcgaaaagtgcggggaggacgacgagactatcccaagcgagtaccgactcaagcccgccacagataaagacggtaagcctctgctccctgaacctgaggaaaaacctaaacctaggtcagagtcggaactgatcgatgagttatcagaagacttcgacagatctgagtgcaaggagaagccgtccaagccaacagaaaagacagaggagtcaaaagccgccgcccccgctccagtgtctgaagccgtctgtcgcacgtctatgtgctccattcagagcgctccccctgaacctgctaccttaaaaggaacagtgccggatgacgctgttgaggcgttagccgacagcctggggaagaaagaggccgatccggaggacggtaagcccgtgatggataaggtgaaggaaaaggcaaaggaagaggatcgtgaaaaactgggtgaaaaagaggagactattccacctgactaccgtctagaagaagttaaggataaggatggaaagcccctgctccctaaagagagtaaagagcagctgccaccgatgagtgaggacttcctcctagacgctttgagtgaggacttttcaggacctcaaaatgccagctcgttgaagttcgaggatgccaaactggcagccgccatctcagaggttgtttcccagaccccagcgtctacaacccaggcaggggcgcctccacgggatacttcgcagtctgataaagatttggatgatgcgctggacaaattaagtgactcactggggcaacggcaaccagaccctgatgaaaataagccgatggaggataaggtcaaggagaaagcaaaagctgagcacagagacaagctaggagaacgcgacgatacaattccgccggagtataggcacttgctggatgacaatggccaggataagcctgtgaagcctcctaccaagaaatctgaggattccaaatag

SEQ ID NO: 288144 - DNA, 2085 bp, Artificial Sequence
  derived and/or modified sequence
atggaaggaccccatctacccaataagaaaaagcacaaaaaacaggctgtgaagacagagccagaaaaaaaatctcaatccaccaaactgtcagtggttcatgagaaaaagagccaggaaggcaaacccaaggaacacacggaacctaagagtctgcctaaacaggccagcgataccggatcaaacgacgcccataacaaaaaagccgtttctcgatccgctgagcagcaacctagtgagaagtccacggagcccaagacaaaaccccaggacatgatttctgcaggcggggaatcagtcgcaggcatcacagctatcagtgggaaacctggggataaaaaaaaggaaaaaaagagcctcactcctgctgtgcccgtggagtctaagccggacaagccgtcggggaagtctggaatggacgccgctctcgatgatttgatcgataccctggggggccctgaagaaactgaggaagagaataccacttatacagggccagaagtgtccgaccccatgtcgagcacatatatcgaggagctcggcaagagagaggttacgatcccccctaagtaccgcgaactcctcgcaaagaaagagggtataacggggccccccgctgattcttctaaacccatcggacctgacgatgctatcgacgccctgtcctctgacttcacatgcggatcaccaacagcagcaggaaaaaagaccgagaaggaggaaagcactgaagttcttaaggcccaatctgcaggcaccgtgaggtccgctgccccacctcaggaaaagaagcgcaaagtggaaaaagacacaatgtctgaccaggctctggaggcgctctccgcgagtctggggactcgacaggccgaacctgaactggatttgaggtcaataaaagaggtggacgaggcgaaggcaaaagaagagaagcttgagaagtgtggtgaagacgacgagaccatcccttctgaatacagactgaaaccagctacagacaaggatgggaagccactgctgccagagcctgaagaaaaacctaagccccgatctgaatcagagttaatcgatgagttgtcagaagactttgaccggtctgagtgtaaggagaaaccatcaaagccaaccgaaaaaacagaggaaagcaaggcagcagctcctgcccctgtttccgaggcagtctgccggacatctatgtgtagcattcaaagcgccccccccgagccagcgactctgaagggcacagtgcccgacgacgccgttgaggcattagcagatagcctcgggaagaaggaggccgatccagaggacggtaaacccgtcatggacaaggtcaaggagaaggccaaggaggaggacagggagaagctgggcgaaaaagaagagaccatccctccagattatcggctggaggaggtaaaagacaaagacgggaagccccttctcccaaaggagagcaaagagcaactcccacccatgtctgaagattttttgctcgacgctctgtccgaggatttcagcggacctcagaatgcttcatccctgaaattcgaggacgctaagctcgcagcagccatttctgaggtcgtcagccagacacctgcctctacgactcaggctggggcacccccacgcgacacctcgcagagtgacaaggaccttgatgacgccttagacaagttaagcgacagtctgggccagcgtcagccagaccccgatgaaaataagccgatggaggataaggttaaggaaaaggccaaagctgaacaccgcgacaaactgggagagcgcgatgacaccattcccccagaatatagacacttgcttgatgataacggacaagataaacccgtcaagccccctaccaaaaaatcagaggactctaaaaagccagcggatgaccaggatcctatcgacgcactcagcggcgacctggacagctgccctagcacaaccgagacgagccagaacaccgcgaaagacaaatgtaagaaagctgcctccagcagcaaagccccaaaaaacgggggaaaggctaaggacagtgctaagaccacagaggagacctccaaacctaaggacgactag

SEQ ID NO: 288145 - DNA, 2127 bp, Artificial Sequence
  derived and/or modified sequence
atgaaccccacagagaccaaggccatccctgtgtcccagcagatggagggcccccacctgcccaacaagaagaagcacaagaagcaggccgtgaagacagagcctgagaagaagagccagagcaccaagctgtctgtggtgcatgagaagaagagccaggagggcaagcccaaggagcacacagagcccaagagcctgcccaagcaggccagtgacaccggcagcaatgatgcccacaacaagaaggctgtgagccgctctgctgagcagcagcccagcgagaagagcacagagcccaagaccaagccccaggacatgatctctgctggaggagagagcgtggccggcatcacagccatcagcggcaagccaggggacaagaagaaggagaagaagagcctgaccccagctgtgcctgtggagagcaagccagacaagcccagcggcaagagcggcatggatgctgccctggatgacctgattgacaccctgggcggccctgaggagacagaggaggagaacaccacctacacaggccctgaggtgtctgaccccatgagcagcacctacatcgaggagctgggcaagcgggaggtgaccatcccccccaagtaccgggagctgctggccaagaaggagggcatcaccggccccccagctgacagcagcaagcccatcggcccagatgatgccattgatgccctgagcagtgacttcacctgtggcagccccacagctgctgggaagaagacagagaaggaggagagcacagaggtgctgaaggcccagagcgctggcaccgtgcgctctgctgccccaccccaggagaagaagaggaaggtggagaaggacaccatgtctgaccaggccctggaggccctgagcgccagcctgggcacccggcaggccgagcctgagctggacctgcggagcatcaaggaggtggatgaggccaaggccaaggaggagaagctggagaagtgtggggaggatgatgagaccatccccagcgagtaccgcctgaagccagccacagacaaggatggcaagcccctgctgcctgagcctgaggagaagcccaagcccaggtctgagagcgagctgattgatgagctgtctgaggactttgacagaagtgagtgcaaggagaagcccagcaagcccacagagaagacagaggagagcaaggccgccgccccagcccctgtgtctgaggccgtgtgcaggacctccatgtgcagcatccagagcgcccctcctgagcccgccaccctgaagggcaccgtgcctgatgatgctgtggaggccctggccgacagcctgggcaagaaggaggccgaccctgaagatggcaagcctgtgatggacaaggtgaaggagaaggccaaggaggaggaccgggagaagctgggggagaaggaggagaccatccccccagactaccgcctggaggaggtgaaggacaaggatggcaagcccctgctgcccaaggagagcaaggagcagctgccccccatgtctgaggacttcctgctggatgccctgtctgaggacttcagcggcccccagaatgccagcagcctgaagtttgaagatgccaagctggccgccgccatcagcgaggtggtgtcccagaccccagccagcaccacccaggccggggccccaccccgggacaccagccagagcgacaaggacctggatgatgccctggacaagctgagtgacagcctgggccagaggcagcctgaccctgatgagaacaagcccatggaggacaaggtgaaggagaaggccaaggccgagcaccgggacaagctgggggagagagatgacaccatccccccagagtaccgccacctgctggatgacaatggccaggacaagcctgtgaagccacccaccaagaagtctgaggacagcaagaagccagcagatgaccaggaccccattgatgccctgagcggggacctggacagctgccccagcaccacagagaccagccagaacacagccaaggacaagtgcaagaaggccgccagcagcagcaaggcccccaagaatggaggcaaggccaaggacagcgccaagaccacagaggagaccagcaagcccaaggatgactag

SEQ ID NO: 288146 - DNA, 1929 bp, Artificial Sequence
  derived and/or modified sequence
atgaaccccacagagaccaaggccatccctgtgtcccagcagatggagggcccccacctgcccaacaagaagaagcacaagaagcaggccgtgaagacagagcctgagaagaagagccagagcaccaagctgtctgtggtgcatgagaagaagagccaggagggcaagcccaaggagcacacagagcccaagagcctgcccaagcaggccagtgacaccggcagcaatgatgcccacaacaagaaggctgtgagccgctctgctgagcagcagcccagcgagaagagcacagagcccaagaccaagccccaggacatgatctctgctggaggagagagcgtggccggcatcacagccatcagcggcaagccaggggacaagaagaaggagaagaagagcctgaccccagctgtgcctgtggagagcaagccagacaagcccagcggcaagagcggcatggatgctgccctggatgacctgattgacaccctgggcggccctgaggagacagaggaggagaacaccacctacacaggccctgaggtgtctgaccccatgagcagcacctacatcgaggagctgggcaagcgggaggtgaccatcccccccaagtaccgggagctgctggccaagaaggagggcatcaccggccccccagctgacagcagcaagcccatcggcccagatgatgccattgatgccctgagcagtgacttcacctgtggcagccccacagctgctgggaagaagacagagaaggaggagagcacagaggtgctgaaggcccagagcgctggcaccgtgcgctctgctgccccaccccaggagaagaagaggaaggtggagaaggacaccatgtctgaccaggccctggaggccctgagcgccagcctgggcacccggcaggccgagcctgagctggacctgcggagcatcaaggaggtggatgaggccaaggccaaggaggagaagctggagaagtgtggggaggatgatgagaccatccccagcgagtaccgcctgaagccagccacagacaaggatggcaagcccctgctgcctgagcctgaggagaagcccaagcccaggtctgagagcgagctgattgatgagctgtctgaggactttgacagaagtgagtgcaaggagaagcccagcaagcccacagagaagacagaggagagcaaggccgccgccccagcccctgtgtctgaggccgtgtgcaggacctccatgtgcagcatccagagcgcccctcctgagcccgccaccctgaagggcaccgtgcctgatgatgctgtggaggccctggccgacagcctgggcaagaaggaggccgaccctgaagatggcaagcctgtgatggacaaggtgaaggagaaggccaaggaggaggaccgggagaagctgggggagaaggaggagaccatccccccagactaccgcctggaggaggtgaaggacaaggatggcaagcccctgctgcccaaggagagcaaggagcagctgccccccatgtctgaggacttcctgctggatgccctgtctgaggacttcagcggcccccagaatgccagcagcctgaagtttgaagatgccaagctggccgccgccatcagcgaggtggtgtcccagaccccagccagcaccacccaggccggggccccaccccgggacaccagccagagcgacaaggacctggatgatgccctggacaagctgagtgacagcctgggccagaggcagcctgaccctgatgagaacaagcccatggaggacaaggtgaaggagaaggccaaggccgagcaccgggacaagctgggggagagagatgacaccatccccccagagtaccgccacctgctggatgacaatggccaggacaagcctgtgaagccacccaccaagaagtctgaggacagcaagtag

SEQ ID NO: 288147 - DNA, 2085 bp, Artificial Sequence
  derived and/or modified sequence
atggagggcccccacctgcccaacaagaagaagcacaagaagcaggccgtgaagacagagcctgagaagaagagccagagcaccaagctgtctgtggtgcatgagaagaagagccaggagggcaagcccaaggagcacacagagcccaagagcctgcccaagcaggccagtgacaccggcagcaatgatgcccacaacaagaaggctgtgagccgctctgctgagcagcagcccagcgagaagagcacagagcccaagaccaagccccaggacatgatctctgctggaggagagagcgtggccggcatcacagccatcagcggcaagccaggggacaagaagaaggagaagaagagcctgaccccagctgtgcctgtggagagcaagccagacaagcccagcggcaagagcggcatggatgctgccctggatgacctgattgacaccctgggcggccctgaggagacagaggaggagaacaccacctacacaggccctgaggtgtctgaccccatgagcagcacctacatcgaggagctgggcaagcgggaggtgaccatcccccccaagtaccgggagctgctggccaagaaggagggcatcaccggccccccagctgacagcagcaagcccatcggcccagatgatgccattgatgccctgagcagtgacttcacctgtggcagccccacagctgctgggaagaagacagagaaggaggagagcacagaggtgctgaaggcccagagcgctggcaccgtgcgctctgctgccccaccccaggagaagaagaggaaggtggagaaggacaccatgtctgaccaggccctggaggccctgagcgccagcctgggcacccggcaggccgagcctgagctggacctgcggagcatcaaggaggtggatgaggccaaggccaaggaggagaagctggagaagtgtggggaggatgatgagaccatccccagcgagtaccgcctgaagccagccacagacaaggatggcaagcccctgctgcctgagcctgaggagaagcccaagcccaggtctgagagcgagctgattgatgagctgtctgaggactttgacagaagtgagtgcaaggagaagcccagcaagcccacagagaagacagaggagagcaaggccgccgccccagcccctgtgtctgaggccgtgtgcaggacctccatgtgcagcatccagagcgcccctcctgagcccgccaccctgaagggcaccgtgcctgatgatgctgtggaggccctggccgacagcctgggcaagaaggaggccgaccctgaagatggcaagcctgtgatggacaaggtgaaggagaaggccaaggaggaggaccgggagaagctgggggagaaggaggagaccatccccccagactaccgcctggaggaggtgaaggacaaggatggcaagcccctgctgcccaaggagagcaaggagcagctgccccccatgtctgaggacttcctgctggatgccctgtctgaggacttcagcggcccccagaatgccagcagcctgaagtttgaagatgccaagctggccgccgccatcagcgaggtggtgtcccagaccccagccagcaccacccaggccggggccccaccccgggacaccagccagagcgacaaggacctggatgatgccctggacaagctgagtgacagcctgggccagaggcagcctgaccctgatgagaacaagcccatggaggacaaggtgaaggagaaggccaaggccgagcaccgggacaagctgggggagagagatgacaccatccccccagagtaccgccacctgctggatgacaatggccaggacaagcctgtgaagccacccaccaagaagtctgaggacagcaagaagccagcagatgaccaggaccccattgatgccctgagcggggacctggacagctgccccagcaccacagagaccagccagaacacagccaaggacaagtgcaagaaggccgccagcagcagcaaggcccccaagaatggaggcaaggccaaggacagcgccaagaccacagaggagaccagcaagcccaaggatgactag

SEQ ID NO: 288148 - DNA, 2127 bp, Artificial Sequence
  derived and/or modified sequence
atgaaccccaccgagaccaaggccatccccgtgagccagcagatggagggcccacacctgcctaacaagaaaaagcacaagaaacaggctgtgaaaacggagccagagaagaaatctcaatccacaaagctctcagtagtgcacgaaaagaagtcccaggaagggaaaccaaaggagcacaccgaaccaaaatctcttcctaaacaggcttccgacacaggatctaacgatgctcataataagaaggctgtgagccgcagtgccgaacagcagccaagcgaaaaaagtacggaacctaagaccaaacctcaggatatgatatcagccggaggcgaatccgtggcaggcattacggcaatcagcggcaagcctggcgataaaaagaaggaaaagaaatctctgacccccgctgtgccagtggagagtaaaccggacaaacctagcggcaaaagtggaatggacgcagcgctggatgatcttatagatacactgggtgggccagaagagacagaagaggagaacacaacctataccgggcccgaggtgagtgaccccatgtccagcacgtacatagaggagttagggaagcgggaagtgacgattccccccaaatacagagagttgctggcaaagaaggagggtatcacaggtccacctgctgattcttccaaacctatcggtcccgacgatgcgatagacgccctcagcagcgactttacgtgtggcagtcctacggcggccggaaagaaaactgaaaaggaagaatctactgaagtccttaaggcacagtctgctggcaccgttcggtcagccgcacccccccaggagaagaagagaaaagtggaaaaagacactatgagtgatcaagctttagaagcactgtccgcctccctcggcacccgacaggccgagccagagttggacttgcgatctatcaaagaagtggatgaagctaaggcgaaggaagagaaactggagaagtgtggcgaggatgacgaaactattccgtcggagtatcgcctgaaacctgcaaccgacaaagatggcaagcctctcctgcccgagccggaggagaaaccaaaaccaaggtcagagtcagagctgatcgatgagctgtctgaggatttcgacagatctgagtgtaaagagaagccctcaaagcccaccgaaaagacagaagagagtaaggcggcagcccctgcgcctgtgtcagaagctgtgtgccggacatcaatgtgctctatccagtcagctcccccggagcccgccacactaaaaggcactgtgcctgacgatgccgtcgaagctcttgcagactctctgggcaaaaaggaggcagaccctgaagacgggaaaccagtgatggataaagtcaaggagaaggccaaggaggaagaccgagaaaagctcggggaaaaggaagaaaccattccgccagactacaggctggaggaagttaaagacaaagacggcaagcctttgttgccaaaggagtcaaaggaacagcttccacccatgagcgaggacttccttttggatgccttaagcgaggacttctccgggccacagaacgctagctcgctcaagttcgaggatgcaaaactcgcagctgctatctctgaggtggtctcccagacacccgcgtcaactactcaagctggggctcctcctcgggatacctcacagagcgacaaagatctcgacgacgccttagacaaactaagcgactctcttggccaacgacagcctgatcctgacgaaaacaaacccatggaggacaaggtaaaggaaaaggctaaagctgagcacagggacaagctcggagaacgggatgataccatacctcctgagtatcgtcatttgctagacgacaacggtcaagataaacccgtcaagcctcctacaaagaaatccgaagactcaaaaaagcccgccgatgaccaggaccccatagacgcactgtcgggcgatctggactcttgtccttcaactactgagacctctcagaatacagcaaaagataagtgtaaaaaagctgcttcttcctccaaggcaccaaagaacggcggcaaagccaaggattcggcgaaaaccactgaggaaaccagcaagcccaaagatgattag

SEQ ID NO: 288149 - DNA, 1929 bp, Artificial Sequence
  derived and/or modified sequence
atgaaccccaccgagaccaaggccatccccgtgagccagcagatggagggccctcatcttccgaacaagaagaaacacaagaagcaggccgttaagaccgaacctgagaaaaaatcccaaagcactaaacttagcgttgttcacgagaaaaaatctcaggagggaaagcctaaggaacataccgagccaaaatcactccccaaacaggccagcgacaccggctccaatgacgcccacaataagaaggcggtgtcccgtagtgccgaacagcagcctagcgagaaatccactgagccaaaaaccaaacctcaagatatgataagcgcagggggcgagtcagttgccggtatcactgcaatcagcgggaaacccggagataaaaaaaaggagaaaaaaagtctgactcccgccgtgccagttgaatcaaagcccgataagccaagcggaaaaagtggcatggatgcggcactggatgaccttattgacacacttggcggtcctgaagaaacagaagaagaaaacaccacgtacaccggtcccgaggtgtccgaccctatgtcgagtacctatatagaagaactggggaaacgcgaggtcaccattccacctaagtaccgtgaattactcgccaagaaagagggcataaccggtcctcctgctgactcgtcgaaaccaatcgggcccgatgacgcgatcgacgcgctgtcgagcgacttcacatgcggttcaccgacggcagctggaaaaaaaactgagaaggaagagtcaaccgaagtcctcaaagcacagagcgcaggcacagtacgtagcgccgcaccaccacaagagaagaagcgaaaagttgagaaggatacgatgagcgaccaggcgttggaagcactctcagccagcctggggacccgacaggccgagccagagctcgacctgcgctcaatcaaggaagtggacgaggcgaaggccaaggaggaaaaattggaaaagtgcggcgaagacgatgaaactataccctcagaataccggctgaagcctgctaccgataaagatggcaagccattgctccccgagcctgaggaaaaacccaagcctcggtctgaatcggaactgattgatgagctctccgaagattttgacagaagtgaatgcaaggaaaagccttcgaagcccactgaaaaaacagaagagagtaaggccgcagctccggcacctgttagcgaagcagtgtgtagaacaagtatgtgctcaattcagagtgcccctcctgagcccgcgaccctgaagggaactgtacctgacgatgctgtggaagcactcgcagattcgttgggcaagaaggaagccgaccccgaagatggaaaacctgtaatggacaaagtgaaggaaaaggccaaggaggaggatagggaaaagctaggtgagaaggaagagaccatcccacccgattaccgcttagaggaagtgaaagacaaggacggcaagccacttctgccaaaggagtctaaggagcagctgcctcctatgagcgaagacttcttactggatgctctgagcgaggatttcagcgggcctcagaacgcgtcgagccttaaattcgaggatgcaaagctcgcggccgccatttccgaagtagtttctcagactcccgctagcaccacccaggcgggcgcaccccctcgggatacttcacagtccgataaagatttggatgacgcccttgacaagctgtcagactccctgggacaacgccagccggatcctgacgaaaataaaccaatggaggataaggtgaaggaaaaagccaaggctgagcatcgggacaagttgggggagcgcgatgataccattccacctgaatatcggcaccttctggacgataatggacaggacaagcctgtaaagccaccaacaaaaaaatctgaagactccaagtag

SEQ ID NO: 288150 - DNA, 2085 bp, Artificial Sequence
  derived and/or modified sequence
atggagggcccccacctgcccaacaagaagaagcacaagaagcaggcagtgaagactgagccagaaaaaaaaagtcaatctactaaactgtctgtggtgcacgagaaaaagtcccaggaaggaaaacccaaggagcatacagagccgaagtcccttcctaagcaggcgtccgatactggaagtaacgatgcacataacaagaaggcagtatcgagatcagccgaacagcagcccagcgaaaagagcacggaaccgaaaactaaacctcaagatatgatatccgcggggggtgaatctgtggctggaatcaccgccatctctggaaaacctggcgacaaaaaaaaggagaagaaaagtttgactccggccgtacccgtggagtcaaagccagataagccctctggtaaaagcggaatggatgccgccctggatgacctcatcgacaccctgggcggtccggaggagactgaagaagaaaacaccacatacaccggccccgaagtatccgacccaatgagctcaacctatatcgaggaactcggaaagcgcgaagttacaatcccacctaaatacagggagctcttagcaaagaaagagggcataaccggcccacccgcggacagcagtaaacctattggtccggatgatgccatcgacgctttgtcgtccgatttcacctgtggatctccgacagccgccggtaagaagactgagaaggaggagtccactgaagtcctgaaggcccagtcggccgggaccgtcaggagcgccgccccaccacaggaaaagaagcgcaaggtggagaaggacactatgtcagaccaggcccttgaggcattatcggcttccctgggaacccggcaggcagagccggaactggaccttcgctcaattaaagaggtggacgaggcgaaggccaaggaagaaaaactggagaaatgtggagaagacgatgagaccatccccagtgaataccgcctgaagcctgctaccgacaaagatgggaagccactacttcctgagccggaggaaaagcccaagccgcgaagcgaaagtgaactaatcgacgagttaagcgaggactttgaccggtcagaatgtaaagagaagccgtcaaagcccacagaaaaaaccgaagagagtaaggccgcagcccctgctcccgtcagcgaggcggtatgccggaccagtatgtgtagcatacagtccgctcccccagagccggctaccctgaaaggcacagtccctgatgacgccgttgaggccctggccgactcactcggcaaaaaggaggccgaccccgaggatggaaagcccgtgatggacaaggtcaaggagaaggccaaggaggaagatagggaaaaacttggtgagaaagaggagacgattccccccgattaccgactggaagaagttaaagataaggacggcaagccgctgctgccaaaggaatccaaggaacagcttccccccatgtccgaggattttcttctcgatgctctgtccgaagacttttcaggtccacagaatgccagctctctcaaatttgaggatgccaagttagctgcggctatttcagaagtggtgtcccagacgcccgcttctacaactcaggccggggcgcccccccgggacacttcacagtcagacaaggacctggacgatgcattagataaactgagcgactccctcggccagcggcagcccgaccctgatgaaaataagcccatggaggataaggtcaaggaaaaagcgaaggccgaacatcgagacaagctcggagaaagggacgacactataccccccgagtaccggcatctgctggacgacaacggccaagataagccagtgaaaccccccacaaagaaatccgaagacagtaaaaagcccgccgacgaccaggatccaatcgacgcgctctctggcgatctcgacagctgcccttcaaccaccgaaacttcacagaacacagctaaagataaatgtaaaaaggctgcctcctctagcaaggcgccgaaaaacggcggtaaggccaaggatagtgccaaaactaccgaggaaacctctaaacccaaggacgattag

SEQ ID NO: 288151 - DNA, 2127 bp, Artificial Sequence
  derived and/or modified sequence
atgaatccgacagaaacaaaggccatccccgtgagtcagcaaatggaaggaccacatcttcccaacaagaaaaagcacaagaagcaggcggtaaaaacggagcctgaaaagaaaagtcaaagtacaaagctgtccgtcgtccacgaaaaaaaaagccaagaagggaagccgaaagagcatacagaacctaaaagtctgccaaaacaggcctcagacactggaagcaacgacgctcataacaaaaaagccgtctctagatcagcagagcagcagccgagcgagaagtctaccgaaccgaaaaccaagccccaggacatgatcagtgccggtggagaaagcgttgctggaatcaccgcaatctctggaaaaccaggggacaagaagaaggaaaagaaaagcctgacaccggcagtcccggtggagtctaaacccgataaaccaagcggcaagagcgggatggacgcagccctcgacgatctcattgacacattggggggtccggaagaaacagaagaggaaaacaccacttacacggggcctgaggtcagtgacccaatgtcctccacttatattgaggagctcggcaaacgagaagtgactattccgccaaagtaccgggaattgcttgccaaaaaggaaggaatcactggaccacctgccgatagttcaaagcccatcggcccagacgacgccattgacgcactcagcagtgacttcacatgcgggtcacccaccgccgctggcaagaagaccgaaaaagaagagtccacggaggtactgaaagcccagtctgctggaacagtgcgctccgcagcacctccccaggagaaaaagcggaaggttgagaaggacactatgagtgaccaagctctagaagctctctcggcctcccttgggacacgtcaagccgagcccgagctggacctgcgaagtattaaggaggtggatgaagccaaggccaaagaagagaaactcgagaaatgcggcgaagatgacgaaacaattccctcagaataccgcctgaagcccgctacagacaaggatggaaagcccttgttgccagagcctgaggagaaaccaaagccacggagcgagtccgagctgatcgatgaactgagtgaggacttcgaccgatcagagtgtaaggaaaaaccaagtaaacccactgaaaaaactgaagagagtaaggcagctgctcctgcgccagtttctgaagctgtgtgtagaacctccatgtgttcaattcagtccgcccctcccgaaccagcgacactgaaaggaacagtgcccgacgacgcggtagaagccctggccgacagcctgggtaagaaagaggccgatcctgaagacggcaaaccagtgatggataaagtgaaagaaaaagcaaaggaggaggatcgggagaagctcggcgagaaagaagagacaattccccctgattaccgactcgaggaagtgaaggataaggacggtaagcctctgttgccgaaagaatccaaggagcaattgcccccaatgtccgaggatttcctgttagatgccctctccgaagattttagtgggcctcagaatgctagtagcttaaaattcgaagacgctaagctggccgctgccatttctgaggtagtcagccagacgccagccagtacgacccaggccggtgctcctccacgggatacaagtcagtcagataaagacttggacgacgccctcgacaaactgagcgacagtctggggcaaaggcagccggatccagatgagaacaaacctatggaagataaggtgaaggagaaggctaaggccgaacatagggacaaactgggtgaaagagatgacaccattccccctgagtaccgccatctcttggacgataatggccaagataagcctgtcaagccgcctaccaagaagtccgaagactctaagaagcccgcagatgatcaggacccaatcgacgccctgagtggtgatctcgatagttgcccctccactaccgaaaccagtcagaacaccgctaaggacaagtgtaaaaaggctgcttccagcagcaaggctcccaagaacggtggaaaggctaaagactctgcgaagaccactgaggaaacgtccaagccaaaggacgactag

SEQ ID NO: 288152 - DNA, 1929 bp, Artificial Sequence
  derived and/or modified sequence
atgaacccaaccgagacaaaagctatccccgtgagccagcagatggaaggccctcatctccccaacaagaaaaaacacaagaagcaagctgtgaaaactgagccggaaaagaaatcacagagtaccaagctctctgtggtgcacgagaaaaaatcccaggagggcaagcccaaggagcatacagaacccaaatcactccccaaacaggccagcgacacaggcagcaatgatgcccacaacaaaaaggcggtctctaggagtgctgagcagcaaccatctgagaaatcgaccgagcccaaaacaaaacctcaggacatgattagcgccggaggggagagcgtggctggcatcactgcgatctcgggcaaaccgggtgataagaagaaagaaaagaagagcctgacgccagcggtgcccgtagagagcaagcccgataagccatctgggaaaagcggcatggacgccgcactggatgatctgatcgatactcttgggggacctgaggaaaccgaggaggaaaataccacttatactggccctgaagtgtccgatcccatgagctccacgtatattgaagagctgggcaagagggaagttaccattccgccaaagtatcgggaactactggcaaagaaggagggcatcactggtccgccagcagatagtagtaaacccatcggtccagatgacgccattgatgcactctcttccgatttcacttgtggtagtccaacagccgctgggaagaaaacggaaaaagaggaatccaccgaggtcctcaaggcccagtcggcaggaaccgtccgaagtgcagccccacctcaggaaaagaagagaaaggttgagaaggacactatgtctgatcaggctctcgaggctctctccgcctctctgggtactagacaagcagagccggaacttgacctccgatctattaaggaggtggacgaggccaaggctaaagaagaaaagctggagaaatgcggagaggacgacgaaaccatcccgtccgagtaccggttgaagccagctaccgacaaggatggcaagccactactgcccgaacccgaagaaaagcccaaaccacgatcagagtccgaactgattgatgagcttagcgaggatttcgataggtctgaatgtaaggagaagcccagcaaacccaccgagaaaaccgaggaaagcaaagcggcagcccctgcccctgtctcggaggccgtctgcaggacatccatgtgtagtatccagtccgctccccctgagcctgctacactgaagggcaccgtccccgacgacgccgtcgaggctttggccgattcattaggtaagaaggaggccgaccccgaagacggcaagccagtgatggataaggtaaaggagaaggcgaaggaggaggatagggagaaactgggagagaaagaagagacaatcccaccagactaccggctcgaagaagttaaggacaaggacggcaaaccactcctgcccaaggagagcaaagagcaattgccaccaatgtccgaggacttcctcctcgacgctctgagtgaggacttcagtgggccacaaaacgcaagctccctcaagttcgaagacgcgaaattggcagccgctatctcggaagtagtgtcccaaacacccgcatcaaccacccaggccggagcacccccaagagacacttcccagagtgataaggatctggacgacgccctggacaagctgagcgatagcttagggcaacggcagcctgatcctgacgagaataagcctatggaggataaggtgaaagagaaggcaaaagccgagcacagggataagctcggagaaagagatgacactatccccccagagtaccgacatcttctggacgataatggacaagataaacctgtaaagccacctaccaaaaagagtgaggacagcaaatag

SEQ ID NO: 288153 - DNA, 2085 bp, Artificial Sequence
  derived and/or modified sequence
atggaaggtccacatcttcccaacaaaaagaaacacaaaaagcaagccgttaaaaccgagcctgagaagaagtcacagtctaccaaacttagcgtggtccacgaaaagaaatcacaggaaggtaaacctaaagagcacaccgagccaaaatcactgccaaagcaggcgagcgacacaggcagcaatgacgcccataacaagaaagcagtgtcgaggagcgctgagcaacagccttcagagaagtcaaccgagcccaaaaccaagccacaggatatgatttcagctggcggagagagcgtggctgggatcacagcgattagtggaaagcccggtgacaaaaagaaggaaaaaaaaagcctgactccggctgtaccagtggagagcaagcctgacaagccttccggaaaaagcggcatggacgcagcactggacgatcttattgacaccctgggcggaccggaggagacagaagaagaaaacacaacatacaccggaccagaggtctcggaccccatgtctagcacatatattgaggaactgggcaagcgggaggttacaattcctccaaaataccgagaactgctggccaaaaaagagggtataaccggtccccctgcggactctagcaagccgatcggcccagatgacgcgatcgacgctctatcttcggactttacatgtggttcacccacagcagccggtaaaaaaactgaaaaagaagaatctaccgaggtacttaaagctcaaagcgcagggaccgttagatcggccgcacctccccaagaaaaaaaacgcaaagtcgagaaagacacgatgagcgaccaggccctggaagcactgagtgcaagcttaggaactagacaggctgaacctgagctcgacctgagaagtatcaaggaagtcgacgaagcaaaggccaaagaagaaaaattggaaaaatgcggggaagacgacgaaactatcccaagtgagtatcgcctgaaaccggcaactgacaaggatggaaaacctttgctgcctgagccagaggagaagccaaagcctcgttctgagagcgaactcatcgatgaactcagcgaggatttcgacaggagcgagtgcaaagagaagccttccaagcctacagagaaaaccgaggagagcaaggccgctgccccagctcccgtgtcagaggcagtgtgtcgtacctccatgtgcagcatacagagcgcaccgcctgagccagccactctgaagggaacggtgcctgatgatgccgttgaagctttggccgatagcctcggcaagaaagaagccgacccagaggacggcaaaccagtgatggacaaagtcaaagagaaggccaaggaggaagacagggaaaagctgggtgaaaaagaagaaactattccaccggactaccgcctggaggaagttaaagacaaagacggtaagcccctgcttccgaaagagagcaaagagcagttgccaccaatgtcagaagactttctcttggacgcactgtctgaggatttcagcggaccacagaacgcttctagcctgaaatttgaggatgctaaattggccgcagccatttccgaagtggtgtctcagactcccgcaagcacaactcaagctggggcaccgccaagggatacttcccagtccgacaaagatctggacgacgccctagataagctgagtgactctttaggtcagagacagcccgacccagacgaaaacaaacctatggaagacaaggtgaaggagaaggctaaagccgagcacagagacaaattgggcgagagagacgacacaattcctccagaatatcgacatctactcgacgataatgggcaggataagcccgtaaagcctcctacaaagaagtcggaggactctaagaagcctgccgacgatcaggacccaattgacgccctctcaggtgacctggatagctgtccctctaccactgagacttcccagaatacagcgaaggataagtgtaaaaaggcagcttcatctagtaaagcacccaaaaacgggggtaaggcaaaggactccgctaaaactaccgaggagacttcgaagcccaaggacgattag

SEQ ID NO: 288154 - DNA, 2079 bp, Artificial Sequence
  derived and/or modified sequence
actcagagagctgggctggagctccaagcggaaaccgcgggagccgagcccagctaggaatgcagacctcctgaaaaccaagccgaggactgcggggtccggtgtccacgcagagtgtcagcttcctctggtgcaaccagcaagtcttccagtatgaatcccacagaaaccaaggccattccagtcagccaacagatggaaggaccacatcttcctaacaagaaaaaacacaaaaaacaggctgtaaaaacagaacctgagaagaagtcacagtcaaccaagctgtctgtggttcatgagaaaaaatcccaagaaggaaagccaaaagaacacacagagccaaaaagcctacccaagcaggcatcagatacaggaagtaacgatgctcacaataaaaaagcagtttccagatcagctgaacagcagccatcagagaaatcaacagaaccaaagactaaaccacaagacatgatttctgctggtggagagagtgttgctggtatcactgcaatatctggcaagccgggtgacaagaaaaaagaaaagaaatcattaaccccagctgtgccagttgaatctaaaccggataaaccatcgggaaagtcaggcatggatgctgctttggatgacttaatagatactttaggaggacctgaagaaactgaagaagaaaatacaacgtatactggaccagaagtttcagatccaatgagttccacctacatagaggaattgggtaaaagagaagtcacaattcctccaaaatatagggaactattggctaaaaaggaagggatcacagggcctcctgcagactcttcgaaacccatagggccagatgatgctatagacgccttgtcatctgacttcacctgtgggtcgcctacagctgctggaaagaaaactgaaaaagaggaatctacagaagttttaaaagctcagtcagcagggacagtcagaagtgctgctccaccccaagagaagaaaagaaaggtggagaaggatacaatgagtgatcaagcactcgaggctctgtcggcttcactgggcacccggcaagcagaacctgagctcgacctccgctcaattaaggaagtcgatgaggcaaaagctaaagaagaaaaactagagaagtgtggtgaggatgatgaaacaatcccatctgagtacagattaaaaccagccacggataaagatggaaaaccactattgccagagcctgaagaaaaacccaagcctcggagtgaatcagaactcattgatgaactttcagaagattttgaccggtctgaatgtaaagagaaaccatctaagccaactgaaaagacagaagaatctaaggccgctgctccagctcctgtgtcggaggctgtgtgtcggacctccatgtgtagtatacagtcagcaccccctgagccggctaccttgaagggcacagtgccagatgatgctgtagaagccttggctgatagcctggggaaaaaggaagcagatccagaagatggaaaacctgtgatggataaagtcaaggagaaggccaaagaagaagaccgtgaaaagcttggtgaaaaagaagaaacaattcctcctgattatagattagaagaggtcaaggataaagatggaaagccactcctgccaaaagagtctaaggaacagcttccacccatgagtgaagacttccttctggatgctttgtctgaggacttctctggtccacaaaatgcttcatctcttaaatttgaagatgctaaacttgctgctgccatctctgaagtggtttcccaaaccccagcttcaacgacccaagctggagccccaccccgtgatacctcgcagagtgacaaagacctcgatgatgccttggataaactctctgacagtctaggacaaaggcagcctgacccagatgagaacaaaccaatggaagataaagtaaaggaaaaagctaaagctgaacatagagacaagcttggagaaagagatgacactatcccacctgaatacagacatctcctggatgataatggacaggacaaaccagtgaagccacctacaaagaaatcagaggattcaaag

SEQ ID NO: 288155 - DNA, 2466 bp, Artificial Sequence
  derived and/or modified sequence
agagagctgggctggagctccaagcggaaaccgcgggagccgagcccagctaggaatgcagacctcctgaaaaccaagccgaggactgcggggtccggtgtccacgcagagtgtcagcttcctctggtgcaaccagcaagtcttccagtatgaatcccacagaaaccaaggtatgaagaatgctaattgagccattccagtcagccaacagatggaaggaccacatcttcctaacaagaaaaaacacaaaaaacaggctgtaaaaacagaacctgagaagaagtcacagtcaaccaagctgtctgtggttcatgagaaaaaatcccaagaaggaaagccaaaagaacacacagagccaaaaagcctacccaagcaggcatcagatacaggaagtaacgatgctcacaataaaaaagcagtttccagatcagctgaacagcagccatcagagaaatcaacagaaccaaagactaaaccacaagacatgatttctgctggtggagagagtgttgctggtatcactgcaatatctggcaagccgggtgacaagaaaaaagaaaagaaatcattaaccccagctgtgccagttgaatctaaaccggataaaccatcgggaaagtcaggcatggatgctgctttggatgacttaatagatactttaggaggacctgaagaaactgaagaagaaaatacaacgtatactggaccagaagtttcagatccaatgagttccacctacatagaggaattgggtaaaagagaagtcacaattcctccaaaatatagggaactattggctaaaaaggaagggatcacagggcctcctgcagactcttcgaaacccatagggccagatgatgctatagacgccttgtcatctgacttcacctgtgggtcgcctacagctgctggaaagaaaactgaaaaagaggaatctacagaagttttaaaagctcagtcagcagggacagtcagaagtgctgctccaccccaagagaagaaaagaaaggtggagaaggatacaatgagtgatcaagcactcgaggctctgtcggcttcactgggcacccggcaagcagaacctgagctcgacctccgctcaattaaggaagtcgatgaggcaaaagctaaagaagaaaaactagagaagtgtggtgaggatgatgaaacaatcccatctgagtacagattaaaaccagccacggataaagatggaaaaccactattgccagagcctgaagaaaaacccaagcctcggagtgaatcagaactcattgatgaactttcagaagattttgaccggtctgaatgtaaagagaaaccatctaagccaactgaaaagacagaagaatctaaggccgctgctccagctcctgtgtcggaggctgtgtgtcggacctccatgtgtagtatacagtcagcaccccctgagccggctaccttgaagggcacagtgccagatgatgctgtagaagccttggctgatagcctggggaaaaaggaagcagatccagaagatggaaaacctgtgatggataaagtcaaggagaaggccaaagaagaagaccgtgaaaagcttggtgaaaaagaagaaacaattcctcctgattatagattagaagaggtcaaggataaagatggaaagccactcctgccaaaagagtctaaggaacagcttccacccatgagtgaagacttccttctggatgctttgtctgaggacttctctggtccacaaaatgcttcatctcttaaatttgaagatgctaaacttgctgctgccatctctgaagtggtttcccaaaccccagcttcaacgacccaagctggagccccaccccgtgatacctcgcagagtgacaaagacctcgatgatgccttggataaactctctgacagtctaggacaaaggcagcctgacccagatgagaacaaaccaatggaagataaagtaaaggaaaaagctaaagctgaacatagagacaagcttggagaaagagatgacactatcccacctgaatacagacatctcctggatgataatggacaggacaaaccagtgaagccacctacaaagaaatcagaggattcaaagaaacctgcagatgaccaagaccccattgatgctctctcaggagatctggacagctgtccctccactacagaaacctcacagaacacagcaaaggataagtgcaagaaggctgcttccagctccaaagcacctaagaatggaggtaaagcgaaggattcagcaaagacaacagaggaaacttccaagccaaaagatgactaaagaaatacaagttaaggtatctggtatctgcatgtaaaatcttcagctggtggatggtgacttttgaagaacaaaaggctttggcaacagaaaacaattgttctgggtgatttctagaatggtttttgttgagtctctgaacatcctaaatattggtttgttattctttt

SEQ ID NO: 288156 - DNA, 2127 bp, Artificial Sequence
  derived and/or modified sequence
atgaaccccaccgagaccaaggccatccccgtgagccagcagatggagggcccccacctgcccaacaagaagaagcacaagaagcaggccgtgaagaccgagcccgagaagaagagccagagcaccaagctgagcgtggtgcacgagaagaagagccaggagggcaagcccaaggagcacaccgagcccaagagcctgcccaagcaggccagcgacaccggcagcaacgacgcccacaacaagaaggccgtgagcagaagcgccgagcagcagcccagcgagaagagcaccgagcccaagaccaagccccaggacatgatcagcgccggcggcgagagcgtggccggcatcaccgccatcagcggcaagcccggcgacaagaagaaggagaagaagagcctgacccccgccgtgcccgtggagagcaagcccgacaagcccagcggcaagagcggcatggacgccgccctggacgacctgatcgacaccctgggcggccccgaggagaccgaggaggagaacaccacctacaccggccccgaggtgagcgaccccatgagcagcacctacatcgaggagctgggcaagagagaggtgaccatcccccccaagtacagagagctgctggccaagaaggagggcatcaccggcccccccgccgacagcagcaagcccatcggccccgacgacgccatcgacgccctgagcagcgacttcacctgcggcagccccaccgccgccggcaagaagaccgagaaggaggagagcaccgaggtgctgaaggcccagagcgccggcaccgtgagaagcgccgcccccccccaggagaagaagagaaaggtggagaaggacaccatgagcgaccaggccctggaggccctgagcgccagcctgggcaccagacaggccgagcccgagctggacctgagaagcatcaaggaggtggacgaggccaaggccaaggaggagaagctggagaagtgcggcgaggacgacgagaccatccccagcgagtacagactgaagcccgccaccgacaaggacggcaagcccctgctgcccgagcccgaggagaagcccaagcccagaagcgagagcgagctgatcgacgagctgagcgaggacttcgacagaagcgagtgcaaggagaagcccagcaagcccaccgagaagaccgaggagagcaaggccgccgcccccgcccccgtgagcgaggccgtgtgcagaaccagcatgtgcagcatccagagcgccccccccgagcccgccaccctgaagggcaccgtgcccgacgacgccgtggaggccctggccgacagcctgggcaagaaggaggccgaccccgaggacggcaagcccgtgatggacaaggtgaaggagaaggccaaggaggaggacagagagaagctgggcgagaaggaggagaccatcccccccgactacagactggaggaggtgaaggacaaggacggcaagcccctgctgcccaaggagagcaaggagcagctgccccccatgagcgaggacttcctgctggacgccctgagcgaggacttcagcggcccccagaacgccagcagcctgaagttcgaggacgccaagctggccgccgccatcagcgaggtggtgagccagacccccgccagcaccacccaggccggcgccccccccagagacaccagccagagcgacaaggacctggacgacgccctggacaagctgagcgacagcctgggccagagacagcccgaccccgacgagaacaagcccatggaggacaaggtgaaggagaaggccaaggccgagcacagagacaagctgggcgagagagacgacaccatcccccccgagtacagacacctgctggacgacaacggccaggacaagcccgtgaagccccccaccaagaagagcgaggacagcaagaagcccgccgacgaccaggaccccatcgacgccctgagcggcgacctggacagctgccccagcaccaccgagaccagccagaacaccgccaaggacaagtgcaagaaggccgccagcagcagcaaggcccccaagaacggcggcaaggccaaggacagcgccaagaccaccgaggagaccagcaagcccaaggacgactag

SEQ ID NO: 288157 - DNA, 1929 bp, Artificial Sequence
  derived and/or modified sequence
atgaaccccaccgagaccaaggccatccccgtgagccagcagatggagggcccccacctgcccaacaagaagaagcacaagaagcaggccgtgaagaccgagcccgagaagaagagccagagcaccaagctgagcgtggtgcacgagaagaagagccaggagggcaagcccaaggagcacaccgagcccaagagcctgcccaagcaggccagcgacaccggcagcaacgacgcccacaacaagaaggccgtgagcagaagcgccgagcagcagcccagcgagaagagcaccgagcccaagaccaagccccaggacatgatcagcgccggcggcgagagcgtggccggcatcaccgccatcagcggcaagcccggcgacaagaagaaggagaagaagagcctgacccccgccgtgcccgtggagagcaagcccgacaagcccagcggcaagagcggcatggacgccgccctggacgacctgatcgacaccctgggcggccccgaggagaccgaggaggagaacaccacctacaccggccccgaggtgagcgaccccatgagcagcacctacatcgaggagctgggcaagagagaggtgaccatcccccccaagtacagagagctgctggccaagaaggagggcatcaccggcccccccgccgacagcagcaagcccatcggccccgacgacgccatcgacgccctgagcagcgacttcacctgcggcagccccaccgccgccggcaagaagaccgagaaggaggagagcaccgaggtgctgaaggcccagagcgccggcaccgtgagaagcgccgcccccccccaggagaagaagagaaaggtggagaaggacaccatgagcgaccaggccctggaggccctgagcgccagcctgggcaccagacaggccgagcccgagctggacctgagaagcatcaaggaggtggacgaggccaaggccaaggaggagaagctggagaagtgcggcgaggacgacgagaccatccccagcgagtacagactgaagcccgccaccgacaaggacggcaagcccctgctgcccgagcccgaggagaagcccaagcccagaagcgagagcgagctgatcgacgagctgagcgaggacttcgacagaagcgagtgcaaggagaagcccagcaagcccaccgagaagaccgaggagagcaaggccgccgcccccgcccccgtgagcgaggccgtgtgcagaaccagcatgtgcagcatccagagcgccccccccgagcccgccaccctgaagggcaccgtgcccgacgacgccgtggaggccctggccgacagcctgggcaagaaggaggccgaccccgaggacggcaagcccgtgatggacaaggtgaaggagaaggccaaggaggaggacagagagaagctgggcgagaaggaggagaccatcccccccgactacagactggaggaggtgaaggacaaggacggcaagcccctgctgcccaaggagagcaaggagcagctgccccccatgagcgaggacttcctgctggacgccctgagcgaggacttcagcggcccccagaacgccagcagcctgaagttcgaggacgccaagctggccgccgccatcagcgaggtggtgagccagacccccgccagcaccacccaggccggcgccccccccagagacaccagccagagcgacaaggacctggacgacgccctggacaagctgagcgacagcctgggccagagacagcccgaccccgacgagaacaagcccatggaggacaaggtgaaggagaaggccaaggccgagcacagagacaagctgggcgagagagacgacaccatcccccccgagtacagacacctgctggacgacaacggccaggacaagcccgtgaagccccccaccaagaagagcgaggacagcaagtag

SEQ ID NO: 288158 - DNA, 2085 bp, Artificial Sequence
  derived and/or modified sequence
atggagggcccccacctgcccaacaagaagaagcacaagaagcaggccgtgaagaccgagcccgagaagaagagccagagcaccaagctgagcgtggtgcacgagaagaagagccaggagggcaagcccaaggagcacaccgagcccaagagcctgcccaagcaggccagcgacaccggcagcaacgacgcccacaacaagaaggccgtgagcagaagcgccgagcagcagcccagcgagaagagcaccgagcccaagaccaagccccaggacatgatcagcgccggcggcgagagcgtggccggcatcaccgccatcagcggcaagcccggcgacaagaagaaggagaagaagagcctgacccccgccgtgcccgtggagagcaagcccgacaagcccagcggcaagagcggcatggacgccgccctggacgacctgatcgacaccctgggcggccccgaggagaccgaggaggagaacaccacctacaccggccccgaggtgagcgaccccatgagcagcacctacatcgaggagctgggcaagagagaggtgaccatcccccccaagtacagagagctgctggccaagaaggagggcatcaccggcccccccgccgacagcagcaagcccatcggccccgacgacgccatcgacgccctgagcagcgacttcacctgcggcagccccaccgccgccggcaagaagaccgagaaggaggagagcaccgaggtgctgaaggcccagagcgccggcaccgtgagaagcgccgcccccccccaggagaagaagagaaaggtggagaaggacaccatgagcgaccaggccctggaggccctgagcgccagcctgggcaccagacaggccgagcccgagctggacctgagaagcatcaaggaggtggacgaggccaaggccaaggaggagaagctggagaagtgcggcgaggacgacgagaccatccccagcgagtacagactgaagcccgccaccgacaaggacggcaagcccctgctgcccgagcccgaggagaagcccaagcccagaagcgagagcgagctgatcgacgagctgagcgaggacttcgacagaagcgagtgcaaggagaagcccagcaagcccaccgagaagaccgaggagagcaaggccgccgcccccgcccccgtgagcgaggccgtgtgcagaaccagcatgtgcagcatccagagcgccccccccgagcccgccaccctgaagggcaccgtgcccgacgacgccgtggaggccctggccgacagcctgggcaagaaggaggccgaccccgaggacggcaagcccgtgatggacaaggtgaaggagaaggccaaggaggaggacagagagaagctgggcgagaaggaggagaccatcccccccgactacagactggaggaggtgaaggacaaggacggcaagcccctgctgcccaaggagagcaaggagcagctgccccccatgagcgaggacttcctgctggacgccctgagcgaggacttcagcggcccccagaacgccagcagcctgaagttcgaggacgccaagctggccgccgccatcagcgaggtggtgagccagacccccgccagcaccacccaggccggcgccccccccagagacaccagccagagcgacaaggacctggacgacgccctggacaagctgagcgacagcctgggccagagacagcccgaccccgacgagaacaagcccatggaggacaaggtgaaggagaaggccaaggccgagcacagagacaagctgggcgagagagacgacaccatcccccccgagtacagacacctgctggacgacaacggccaggacaagcccgtgaagccccccaccaagaagagcgaggacagcaagaagcccgccgacgaccaggaccccatcgacgccctgagcggcgacctggacagctgccccagcaccaccgagaccagccagaacaccgccaaggacaagtgcaagaaggccgccagcagcagcaaggcccccaagaacggcggcaaggccaaggacagcgccaagaccaccgaggagaccagcaagcccaaggacgactag

SEQ ID NO: 288159 - DNA, 411 bp, Artificial Sequence
  derived and/or modified sequence
cggtcccggactggacctgtgtctctgcaaggggatcccaagcaggcgccatggagctcttcccagtccaatagtagcaggaagaccctgtttctttcgctgtgcccaccttttccaacccagccccagattcatcttcacttcacagagcatcgtgcatcttctcaccaggggggaccgttcaagctgcagatatgcctctcttccctatacagcaacttgctactgcactgtcactatagggaagtgcatcacatgtccggccaccggactgagagcgcaggtggtcacctttttctcccacaagatctccgctggaagtcacccggtttaggtgtctttgccgtgcagtctgtgtacgaactagcgagaagacacaatgtgagtccgttttatagtggtccaccctag

SEQ ID NO: 288160 - protein, 533 aa, Artificial Sequence
  derived and/or modified sequence
MKLWVSALLMAWFGVLSCVQAEFFTSIGHMTDLIYAEKELVQSLKEYILVEEAKLSKIKSWANKMEALTSKSAADAEGYLAHPVNAYKLVKRLNTDWPALEDLVLQDSAAGFIANLSVQRQFFPTDEDEIGAAKALMRLQDTYRLDPGTISRGELPGTKYQAMLSVDDCFGMGRSAYNEGDYYHTVLWMEQVLKQLDAGEEATTTKSQVLDYLSYAVFQLGDLHRALELTRRLLSLDPSHERAGGNLRYFEQLLEEEREKTLTNQTEAELATPEGIYERPVDYLPERDVYESLCRGEGVKLTPRRQKRLFCRYHHGNRAPQLLIAPFKEEDEWDSPHIVRYYDVMSDEEIERIKEIAKPKLARATVRDPKTGVLTVASYRVSKSSWLEEDDDPVVARVNRRMQHITGLTVKTAELLQVANYGVGGQYEPHFDFSRRPFDSGLKTEGNRLATFLNYMSDVEAGGATVFPDLGAAIWPKKGTAVFWYNLLRSGEGDYRTRHAACPVLVGCKWVSNKWFHERGQEFLRPCGSTEVD

SEQ ID NO: 288161 - DNA, 1602 bp, Artificial Sequence
  derived and/or modified sequence
atgaagctgtgggtgtctgctctcctcatggcctggtttggagtgctgtcctgcgttcaggctgagttctttacatctatcggtcacatgaccgacctaatatacgctgagaaggagctggttcagtcactcaaggagtacattctcgtggaggaagcaaaactgtcaaaaatcaaaagttgggccaataaaatggaggccctgacttcgaagtccgctgcggatgccgagggctacctcgctcaccctgttaacgcatataaactcgtgaagcgtttgaatacagattggcctgccttggaagacctggtgctgcaagattccgctgcaggattcatcgcgaatctcagcgtacaaagacagttctttcctaccgatgaagacgagattggcgcagccaaggctcttatgcgtttacaggacacctaccgcttggacccggggactatcagcagaggtgaactccccgggaccaagtaccaggctatgctgagcgtcgatgattgcttcggtatgggccgatccgcatacaacgagggtgactactatcacaccgtgttgtggatggagcaggtgttgaaacaactagatgccggcgaggaggcaacgaccactaagtcacaagtgctcgactatctgagttacgctgtgttccagttgggagatctccatagggcattggaactgacacggaggctgctgtctcttgatccaagccacgaaagggcggggggcaatctccgttattttgagcagctactggaggaggaaagggagaaaaccctcacaaatcagaccgaagcggaactcgcaaccccggaggggatttatgaaaggcccgtggactatctcccagagcgcgacgtctacgagagcctgtgtcggggagaaggtgtgaagctgaccccaaggaggcagaaacgactgttttgccggtaccaccatgggaatcgagcgccccagctgttgatcgctcctttcaaagaagaggatgaatgggactctccgcacatcgttaggtattacgacgttatgtcggacgaagagattgagcgaattaaagagattgccaaacccaagctcgcgcgcgccactgtgcgggaccctaaaacgggggtactgacggtggcctcttaccgcgtgagcaagagttcatggttagaagaagacgatgatcccgtggtggctcgggtgaatcgccggatgcagcatatcaccgggctgaccgtcaaaaccgcagaactgttgcaggtggccaactatggcgtggggggccagtatgagccccatttcgacttctcacgacgcccatttgattccggcttaaagaccgagggaaatcgactggctacatttttaaattacatgagcgacgtcgaagcaggcggagctactgtcttccccgacctcggcgccgcgatttggcctaaaaaaggcacagcagttttctggtataacttgctccgatccggcgagggtgattataggacacgccacgctgcttgccccgtgctcgtaggatgcaaatgggtctctaataagtggttccacgaacgagggcaagagtttctacggccatgtgggtcaacagaggtggactag

SEQ ID NO: 288162 - DNA, 1602 bp, Artificial Sequence
  derived and/or modified sequence
atgaagctgtgggtgtctgccctgctgatggcatggttcggtgtgctttcatgtgtgcaggccgaattttttacctcaatcggacatatgacagatctgatctacgcagaaaaagagctggttcagtctctgaaggaatacatcctggtggaggaagccaagctcagcaagatcaagagctgggcaaacaagatggaggcccttacaagtaaaagtgcagccgacgcagagggatatctggctcaccctgtgaatgcctacaaacttgtaaagagattgaatacggactggcctgctctcgaggacctagttttgcaggactcagcagcaggtttcattgctaacctgtccgtgcagcgccagttctttcctaccgacgaggacgagattggtgctgcaaaagctctgatgcggctccaggatacatatagacttgacccaggaactataagccgcggggagctacctggtacaaagtatcaggctatgttaagtgtggatgattgttttgggatgggccgatccgcttacaatgagggcgactactaccacactgtgctgtggatggagcaagtcctgaagcagctcgacgctggcgaagaggcaactaccaccaaatcgcaggtactggattatctgagctatgctgtgttccagctgggtgacctccaccgggcattagagctgacacgccgtcttctgagtttggatcccagccatgagcgagcgggtggcaatctgagatactttgaacagctcctggaggaagagagggaaaagaccctgacaaatcagaccgaagccgagcttgccacccccgagggcatatacgaacgccctgtcgactatctgccggagcgggatgtctacgagtcactgtgccggggggagggcgttaaactgacccccaggagacagaaaaggctgttctgtaggtaccaccatggtaacagggccccacagcttttaattgcaccctttaaagaagaagacgaatgggacagtccacacattgtccgctattacgatgtgatgagcgacgaagagatcgagcgaataaaagagatcgccaaacctaagctagcaagagccacagtccgggatcccaaaaccggcgtgttgacagtggcaagctacagagtgagtaagagtagctggttagaggaggacgatgatcctgtcgtggcccgagtgaaccgccgaatgcaacacatcactggtctgacagtgaaaacggccgaacttcttcaggtggctaattatggagttggtggccagtatgaaccccatttcgatttttcacggaggccctttgatagcggcctgaagacagaaggcaatcgcctggccaccttcctgaactacatgtcagacgttgaggctggcggtgccacagtctttcctgacctcggggccgccatctggcccaagaaagggaccgccgttttttggtacaacctactgcggtcaggagaaggggactaccgaacgcggcatgctgcctgccccgttttggtgggttgtaagtgggtctcaaataaatggtttcatgaaaggggccaggagttcctgaggccatgcggcagtacagaggtagattag

SEQ ID NO: 288163 - DNA, 1602 bp, Artificial Sequence
  derived and/or modified sequence
atgaagctctgggttagtgccttgcttatggcctggttcggtgtattatcttgtgttcaggccgagttcttcacgtcaatcgggcatatgacggacctgatatacgctgagaaggaactggtacaaagcttgaaagagtatatattggtggaagaagccaagctcagcaagatcaaaagctgggccaacaaaatggaggcgctgacatccaaatccgcagccgatgccgaggggtacctagcacaccccgtgaacgcatataagctggttaagaggctgaataccgattggcctgctcttgaagacctggtgctccaggactccgcagctggatttatcgctaatctcagtgtccagaggcagtttttcccaaccgatgaagacgagatcggagctgcaaaagccctaatgagactccaggacacttatcgcctcgacccagggacaattagcaggggagagctgcctgggacaaaataccaggcgatgttatccgttgacgactgtttcggaatgggtcggagcgcctacaacgaaggggattactaccataccgtgctctggatggaacaggtgttgaaacagctggacgctggcgaagaagctacaactaccaagagccaggtcttagactacctgtcttatgctgtctttcagctaggcgatcttcaccgtgcgcttgagttgacacgtcgactcttatcactggaccccagccacgaacgtgctggagggaatctgaggtacttcgaacagctgctggaagaagaacgtgaaaagacactcaccaatcaaacagaagctgagctggctacacccgagggcatctatgaaaggcccgtggactacctccctgagagggacgtgtatgaatctctatgtcgcggagagggggtgaagttgacaccccgcagacagaaaaggcttttttgcagatatcaccacggaaatcgggccccccagctgttgatagctccttttaaagaggaggacgagtgggattctcctcatattgttcgctattatgacgtgatgtccgacgaggaaatcgagcgtatcaaagaaatcgcaaaaccaaagctggccagagctacagtacgggaccctaagacaggggtcctgacggtggccagttatcgggtaagcaagtcctcgtggctggaagaggatgatgacccagttgtggcacgcgtgaaccggcgaatgcagcatattactggactgaccgtcaaaaccgcagagctgcttcaggttgccaattatggagtgggcggtcaatacgagcctcacttcgacttttcacggagaccattcgattctgggctgaaaacagaaggcaaccggctggccacatttctgaattatatgtctgacgtagaagcaggcggggctacagtgttcccagacttgggcgccgcaatttggcctaagaagggcacagccgtcttttggtacaacctcctgcggagcggggagggagactataggacacgacacgccgcctgtccagttctcgttggctgtaaatgggttagcaacaagtggtttcatgaaaggggccaggagttcctgagaccatgcggttctactgaggtggattag

SEQ ID NO: 288164 - DNA, 1602 bp, Artificial Sequence
  derived and/or modified sequence
atgaagctgtgggtgtctgccctgctgatggcctggtttggagtgctgagctgtgtgcaggccgagttcttcaccagcatcggccacatgacagacctgatctatgcagagaaggagctggtgcagagcctgaaggagtacatcctggtggaggaggccaagctgagcaagatcaagtcctgggccaacaagatggaggccctgaccagcaagtctgctgctgatgctgagggctacctggcccaccctgtgaatgcctacaagctggtgaagaggctgaacacagactggccagccctggaggacctggtgctgcaggacagcgctgctggcttcatcgccaacctgtctgtgcagaggcagttcttccccacagatgaagatgagatcggggccgccaaggccctgatgaggctgcaggacacctaccgcctggaccccggcaccatcagcagaggagagctgcccggcaccaagtaccaggccatgctgtctgtggatgactgcttcggcatgggccgcagcgcctacaatgaaggagactactaccacacagtgctgtggatggagcaggtgctgaagcagctggatgctggggaggaggccaccaccaccaagagccaggtgctggactacctgtcctatgctgtgttccagctgggggacctgcaccgggccctggagctgacccggcggctgctgagcctggaccccagccatgaaagagctgggggcaacctgcgctactttgagcagctgctggaggaggagcgggagaagaccctgaccaaccagacagaggccgagctggccaccccagagggcatctatgaaagacctgtggactacctgcctgagagagatgtgtatgagagcctgtgccgcggggagggcgtgaagctgaccccccggcggcagaagaggctcttctgccgctaccaccacggcaacagagccccccagctgctgattgcccccttcaaggaggaggatgagtgggacagcccccacatcgtgcgctactatgatgtgatgtctgatgaggagattgaaagaatcaaggagatcgccaagcccaagctggcccgggccaccgtgcgggaccccaagacaggagtgctgactgtggccagctacagagtgtccaagagctcctggctggaggaggatgatgatcctgtggtggcccgggtgaacagaaggatgcagcacatcaccggcctgactgtgaagacagctgagctgctgcaggtggccaactatggagtgggcggccagtatgagccccactttgacttcagcagaagaccatttgacagcggcctgaagacagagggcaaccggctggccaccttcctgaactacatgtctgatgtggaggccggcggggccaccgtcttcccagacctgggcgccgccatctggcccaagaagggcacagctgtgttctggtacaacctgctgcggagcggggagggggactaccgcaccaggcatgctgcctgccctgtgctggtgggctgcaagtgggtgagcaacaagtggttccacgagcggggccaggagttcctgcggccctgtggcagcacagaggtggactag

SEQ ID NO: 288165 - DNA, 1602 bp, Artificial Sequence
  derived and/or modified sequence
atgaagctgtgggtgagcgccctgctgatggcctggttcggcgtgctcagctgcgtgcaggcggaattctttaccagtattggacacatgaccgacttgatatacgcagagaaagaattggtgcaaagtctgaaagaatatattttggtagaggaggcaaagctctccaaaattaagagttgggcaaataagatggaggcacttaccagtaaaagcgcggccgatgccgagggctacctcgcccaccccgtaaacgcgtacaaactggtaaagcgcctgaatactgactggccagccctggaggacctggtgcttcaagacagcgccgctggatttattgcaaacctgtccgtgcaacggcaattctttcccaccgacgaggacgagatcggcgccgctaaggctctgatgaggttacaagacacttacaggttagacccgggcactatttccagaggcgagctgcctgggacgaaatatcaggctatgctttccgtcgacgattgctttggcatgggtaggagcgcctataatgaaggtgattattaccacaccgtgctgtggatggaacaggtgctgaaacagctggatgcgggggaggaggctacaaccaccaaatctcaagttctggattacttatcctacgctgtttttcagctgggcgatcttcacagagcattggaactgacccgcaggctgctctctcttgacccctcacacgaacgcgccgggggaaacctgcgttattttgaacagttactggaggaggagcgggaaaagacactcaccaatcagaccgaggctgaacttgcgacacccgaaggaatctacgagcgacccgtcgactatctgccggagcgggatgtctacgaaagcctttgcagaggagagggagtgaaactcacccctcgccggcagaagcgactgttctgtaggtaccatcacggaaatcgagccccccagttgctgatcgctccgttcaaagaggaagacgaatgggattctccacatatcgttaggtattatgatgtgatgagtgacgaagagatcgaacgaatcaaagagatagcaaaacctaagcttgcgcgggcaactgtgcgcgaccccaagacgggagtacttacggttgcgtcatatcgggtgagcaagagtagctggctggaagaagatgacgatcccgttgtggctagggtgaacagaagaatgcagcacatcacaggtctgacggttaaaactgccgagctgctccaagtcgccaattatggggtgggtggtcaatatgagccacacttcgacttctctcggaggcccttcgacagcgggctgaagactgaggggaatagattagccacctttcttaactacatgtctgacgtggaggccggtggcgctactgtatttccggacttaggcgcagccatctggccgaaaaaaggcaccgctgtcttctggtacaacctgcttagatctggcgagggggactaccggaccagacacgccgcatgccccgtccttgtcgggtgtaaatgggtgagcaacaagtggttccacgagaggggtcaggaattcctcaggccatgtggttctactgaggtcgactag

SEQ ID NO: 288166 - DNA, 1602 bp, Artificial Sequence
  derived and/or modified sequence
atgaagctgtgggtgagcgccctgctgatggcctggttcggcgtgctgagctgtgtgcaggcagagtttttcacgagtattgggcacatgactgacctgatctatgccgaaaaggaactggttcaatctttgaaagaatacatcttggtggaagaggccaaactctcaaagattaagagctgggctaacaagatggaggccctgaccagcaagagcgcggccgatgcagaaggatatctagctcaccctgtcaatgcttacaaattggtaaaacgtctcaacacagactggccagccctcgaagacctggtgctgcaggactcagccgcaggattcatcgcaaatcttagcgttcagagacagttcttccctacagacgaggacgagataggggcagctaaggcgctgatgcgcctgcaagacacatatcgactggatcccggcaccatctcccgcggggagttgcccggcacgaagtatcaggccatgctttctgtcgacgactgcttcggcatggggcggtccgcctataacgagggagattattaccataccgtgctgtggatggagcaggtcttgaaacaacttgatgccggcgaggaggccacaacaacaaaatcacaggtgcttgattacttaagttatgcagtgttccagttaggcgatttacatagagcgcttgaattgacccgccgcctgctgtctcttgatcctagccacgagagggccggagggaatcttcgatacttcgaacagttattggaggaggaaagggaaaagactctcactaaccagacagaagctgagttggctacccccgagggtatttacgaacggcccgtggactacctgcccgagagggacgtgtacgagagcttgtgtaggggcgagggggtgaaattgactcccaggcggcagaagcgtctcttctgccgttaccatcatggtaaccgtgcgccacagctcttgattgcaccatttaaggaggaagatgagtgggatagcccacacatcgtgcggtattacgatgtcatgtcagacgaggaaatagagcgcatcaaggagattgctaaaccaaaacttgctagggccacagtgcgggacccaaagacaggcgtgctgaccgtagcttcctacagagtgagtaagtcaagctggcttgaagaagacgatgatccagtcgtggccagggtgaatcgtagaatgcagcacatcacagggctgacagtgaaaaccgcagagctgctgcaggtggctaattatggcgtgggagggcagtacgagcctcacttcgattttagcagacggccgtttgactccggcctcaagacggagggaaacaggctggctacttttttgaattatatgtcagacgtggaggctggcggagctaccgtcttcccagacctcggcgccgctatatggccaaaaaaagggactgccgtcttctggtacaacctgcttagatccggggaaggtgattaccggacaaggcacgcagcatgtcctgttttagtcggatgtaagtgggtgtcaaacaagtggttccacgaaaggggccaggagttcctccgaccttgtggaagtaccgaagtagactag

SEQ ID NO: 288167 - DNA, 1602 bp, Artificial Sequence
  derived and/or modified sequence
atgaagctgtgggtgagcgccctgctgatggcctggttcggcgtgctctcatgtgtgcaggcagagtttttcacctcaatcggacacatgacggaccttatctatgcggagaaagagctcgtccagtccttgaaggagtacatactggtggaggaggcaaaacttagtaagataaagtcgtgggctaataaaatggaggccttaacaagtaagtccgcagccgatgctgagggctacctggctcacccagtcaacgcgtataaactggtgaagaggttaaatacggactggccagctcttgaggatctggtccttcaggatagcgccgctgggttcattgctaatctctccgtgcaaagacagttctttcccacagacgaggatgaaatcggcgcagcaaaagccctgatgcggcttcaagatacctataggcttgacccaggtacgattagcaggggggagctgccaggaaccaaataccaggccatgctgtccgtagatgattgttttggaatggggcgttccgcctacaacgagggggattactatcatacggtcctctggatggaacaagtgcttaaacaactggacgctggcgaagaggccacgactaccaaatctcaagtgctggactacctgagctacgcggttttccagctgggggatcttcatcgggctctggaattaacccggcgtctgctgtctttagatccctcgcatgagcgcgccggaggaaacctgcgctacttcgagcagcttctggaagaggaacgggagaagaccttgacaaatcagaccgaggccgagctggctacccctgaagggatctacgaacggcctgtggattacctgccggagcgtgatgtctacgagtcactgtgtaggggcgaaggagttaagctcacaccacgccgtcagaaacggcttttctgccgctaccatcacgggaacagagcccctcaactgctgatagctccctttaaagaggaggacgaatgggattctccccatatcgtacggtactatgacgtgatgtccgatgaggaaatcgaaaggatcaaagaaatcgccaaaccgaagctggccagggcgactgttcgggatccaaaaactggggtgctaaccgtggccagctacagagtttcgaaaagctcttggctggaggaggacgacgacccagtcgtggcccgcgtcaacaggaggatgcagcacataacagggttaactgtcaagaccgcagaattgcttcaggttgcgaattacggtgtcggcggccagtacgaaccccattttgatttcagcaggcggccttttgatagtgggctgaagacagaaggcaacaggctggctacattcctcaactacatgtctgatgttgaggccgggggggcaaccgtgtttccagatctcggagccgctatttggcccaaaaagggaacagcagtcttttggtacaatttattacgcagcggggagggcgactatcggactcgccacgctgcctgccccgtgctggtgggatgtaagtgggtctctaataaatggtttcacgagagaggtcaggagttcctgaggccttgcggcagcaccgaggtggattag

SEQ ID NO: 288168 - DNA, 1602 bp, Artificial Sequence
  derived and/or modified sequence
atgaaattgtgggtgagcgcactcttgatggcttggtttggagtgctaagttgtgtccaagcggagttttttacatccattggacacatgaccgatctgatttacgcagaaaaggaattagtgcaaagcctaaaggagtatatccttgtagaggaagctaagttaagcaaaatcaaatcttgggccaataagatggaagctttgactagtaagagcgcagctgacgccgaggggtacttggcgcatcccgtcaatgcctataagctcgtgaaaagactgaatactgactggccggctttagaggatctggttcttcaggactcagccgctggcttcattgccaacctctctgtgcagcgtcagtttttcccaacggacgaagacgagatcggcgctgccaaagccttgatgagactccaggatacctaccggctggatccaggaacaattagcagaggggagcttccaggcacgaaatatcaagccatgctgtccgttgatgattgtttcggaatgggcaggagcgcctacaacgagggtgattattaccataccgtgttgtggatggaacaagttctaaaacaacttgatgctggggaggaggccaccacgacaaaaagccaagtccttgactatctaagctatgcggtgttccagttaggcgatctgcatagggctctggagctcaccagaagactgttgtcgttagatcccagtcatgaaagggcaggagggaaccttcgctacttcgaacagctgttggaagaagagagggagaagactttaaccaatcagaccgaagctgaactggctacacccgagggcatatacgaaaggcccgtggactacttgcccgagcgcgacgtgtatgagagcctgtgcagaggggaaggagtaaagcttacaccccgtcggcagaagaggcttttttgccgctaccatcacggaaaccgggctccacagcttttgatcgcaccgttcaaagaagaggatgaatgggactcgcctcatatcgttagatattatgatgtcatgtccgacgaagaaatcgaaaggatcaaggagatcgctaagcccaagctcgcacgagccaccgtcagagaccctaaaactggcgtccttacagtggcttcttacagagtgagcaagagtagctggctggaggaggatgatgatcctgtggttgcgcgagtgaaccgccgtatgcaacatattaccggacttaccgtaaagaccgcagaacttttgcaggtggcaaattatggggttggaggacagtacgagcctcactttgacttttcacgacgccctttcgatagcggcttgaagacagaagggaacagactcgccacgtttctgaactatatgtccgacgtggaagccggtggtgccacagtcttccctgatctaggagccgctatctggccaaaaaagggtactgctgtgttctggtataatcttctcaggagtggcgagggggattatcgcacccggcacgccgcttgtcctgtgcttgtaggatgcaaatgggtatcaaacaagtggtttcatgaacggggacaagagtttctgaggccttgcgggtccacagaggttgactag

SEQ ID NO: 288169 - DNA, 1602 bp, Artificial Sequence
  derived and/or modified sequence
atgaaactgtgggtgagcgccctcctgatggcctggttcggggtattgtcctgcgtccaggcggaattttttacctccataggacatatgaccgatttgatatatgccgaaaaggaactcgttcagagcctgaaggagtacatcctggtggaggaggcgaaactgtccaagatcaagagttgggcgaacaaaatggaagccttgacatccaaaagtgccgcagacgctgaaggctacctcgctcaccccgtcaatgcttacaagcttgtcaagcggttgaataccgactggccagcgcttgaagacctggtcctgcaggactccgcagcgggatttattgccaacctgagcgtgcagcgccagttcttccccaccgatgaggatgagattggcgcagctaaagcgctgatgcgactacaggacacgtatcgactcgacccaggcacaatcagccggggtgagctccccggaacgaaatatcaagccatgttgagcgtcgacgattgttttgggatgggtcgatctgcctacaacgagggagactactaccacaccgtgctttggatggagcaggtcctgaagcagttagatgcgggtgaggaggccacaaccactaagagccaggtccttgactatctaagctacgccgtttttcaactgggagatctccatagagccctggagctgacacggagactgttaagtctggacccctcacacgagcgggcaggaggtaacctgcgttatttcgagcagcttttggaagaggaacgggagaagactctgaccaatcaaacagaggcagagctggccactccagaggggatctacgagcggccagtcgattacctcccagagcgcgacgtctacgagtctctgtgccggggagagggcgtgaaactgaccccccgaaggcagaaaaggctattttgtagatatcatcacggtaatagagcgccacagttacttattgcgccttttaaagaagaagacgaatgggatagtccccacatagtccggtactatgacgtcatgtctgacgaggaaattgaaaggataaaggaaatcgccaagccaaagctggcccgtgccaccgtgagggatcccaagactggtgtgctgaccgtcgcgtcatacagagtgtctaagtccagttggttagaagaagatgacgatcccgtggtggcgagggttaatcgacggatgcagcacatcacaggactgaccgtgaagacagcagagctgctgcaggtggcaaactatggtgtgggtggccagtacgagccccactttgatttcagccgcagacctttcgacagcgggttgaagacagaaggtaatcggctggccacattcctcaattatatgagcgacgtggaggccggaggtgctacggttttcccggacctcggagcggctatctggcctaagaaggggactgccgtcttttggtataacctgttgcggtccggagaaggtgactacaggacccggcatgcagcatgccccgtactggtggggtgcaagtgggtgtccaataaatggtttcatgaacgtggccaggagttcctgagaccatgcggaagcacagaggttgactag

SEQ ID NO: 288170 - DNA, 1602 bp, Artificial Sequence
  derived and/or modified sequence
atgaagctgtgggtgtcagctctgcttatggcatggttcggagtgttatcatgcgtccaagccgagttttttaccagcatcggacacatgacagatctcatttacgcagaaaaggaattagtccagtccctgaaagaatacattttggtggaagaggccaaactttcaaagataaagtcctgggcaaacaagatggaggccctaacatcgaagtccgcggcagacgctgaagggtatctggcccatcctgtgaacgcttacaaacttgtgaagcgactgaatactgactggccggcactggaagacctcgtgcttcaggactcggccgcagggtttatcgccaaccttagcgtgcagcgacaattcttccccactgacgaggatgagatcggcgctgccaaagctttgatgaggctgcaagacacttatagactggatccaggcaccattagccgcggagaactgccgggaactaagtatcaggccatgctgagcgttgacgattgctttggcatgggaaggtcagcctataacgagggcgattattaccacacagttctatggatggaacaggtcttgaaacagctggatgcaggcgaagaggctacaaccaccaaatcccaggtgctcgactatctttcctacgccgtattccagctcggcgacctgcatcgggctctggaactcacacggaggctactgagcctcgatccaagtcatgagcgagccggtgggaacctgcgatattttgagcaactcctggaagaagaacgggagaagacccttactaatcagaccgaagcggaactggctacccccgaaggaatctacgagcggccagtggattacttacccgaaagagacgtatatgaaagcctgtgtaggggagaaggagttaaattgacccccaggaggcagaaacgcctgttttgcaggtaccaccatggaaacagagcaccacagctcctgatcgccccatttaaggaagaggacgaatgggactctccacacattgtgaggtactatgatgttatgagtgatgaggagattgaaaggatcaaggaaatagcaaaacctaagctagcacgggcaactgtgcgcgaccccaagactggcgtgctcaccgtcgcatcttaccgcgtgagcaagagctcttggctggaagaggacgacgatcccgtagtcgcaagggtaaacaggcgaatgcagcacatcaccggcctgacagtgaaaacagccgaactcttacaggtcgcaaactacggcgttgggggtcagtatgaaccacatttcgacttcagccgtcggccattcgattccgggctaaaaaccgagggcaatcggttggccacttttctgaactatatgagtgatgtggaagcaggcggtgccactgtatttcctgacctcggagccgcaatctggccaaagaaaggcaccgccgtcttctggtataacctactccgctccggtgaaggagattaccggacccgtcacgccgcttgccccgttctcgtggggtgcaaatgggtttctaataagtggttccacgaaagaggccaggagtttcttagaccctgcggatccacagaagtagattag

SEQ ID NO: 288171 - DNA, 2313 bp, Artificial Sequence
  derived and/or modified sequence
atgaagggcgcgggcggccagctccggctccggctccggctccggctcccgcgaggccgggtagcctgggcgttcccaggggtcgcagaggacggcgaaccccggcggagccaccggagctggggaccaggacgcaggcaggcgtgtggagcgtgaggtggggacgtggcggcggctcaagtgggcggagccccggcagcggcccgaggcggagtcgccaagggaggaggcgccgagctgaccgggcgacgccgcgggaggttctggaaacgccgggagctgcgagtgtccagacacttccctctgtgaccatgaaactctgggtgtctgcattgctgatggcctggtttggtgtcctgagctgtgtgcaggccgaattcttcacctctattgggcacatgactgacctgatttatgcagagaaagagctggtgcagtctctgaaagagtacatccttgtggaggaagccaagctttccaagattaagagctgggccaacaaaatggaagccttgactagcaagtcagctgctgatgctgagggctacctggctcaccctgtgaatgcctacaaactggtgaagcggctaaacacagactggcctgcgctggaggaccttgtcctgcaggactcagctgcaggttttatcgccaacctctctgtgcagcggcagttcttccccactgatgaggacgagataggagctgccaaagccctgatgagacttcaggacacatacaggctggacccaggcacaatttccagaggggaacttccaggaaccaagtaccaggcaatgctgagtgtggatgactgctttgggatgggccgctcggcctacaatgaaggggactattatcatacggtgttgtggatggagcaggtgctaaagcagcttgatgccggggaggaggccaccacaaccaagtcacaggtgctggactacctcagctatgctgtcttccagttgggtgatctgcaccgtgccctggagctcacccgccgcctgctctcccttgacccaagccacgaacgagctggagggaatctgcggtactttgagcagttattggaggaagagagagaaaaaacgttaacaaatcagacagaagctgagctagcaaccccagaaggcatctatgagaggcctgtggactacctgcctgagagggatgtttacgagagcctctgtcgtggggagggtgtcaaactgacaccccgtagacagaagaggcttttctgtaggtaccaccatggcaacagggccccacagctgctcattgcccccttcaaagaggaggacgagtgggacagcccgcacatcgtcaggtactacgatgtcatgtctgatgaggaaatcgagaggatcaaggagatcgcaaaacctaaacttgcacgagccaccgttcgtgatcccaagacaggagtcctcactgtcgccagctaccgggtttccaaaagctcctggctagaggaagatgatgaccctgttgtggcccgagtaaatcgtcggatgcagcatatcacagggttaacagtaaagactgcagaattgttacaggttgcaaattatggagtgggaggacagtatgaaccgcacttcgacttctctaggcgaccttttgacagcggcctcaaaacagaggggaataggttagcgacgtttcttaactacatgagtgatgtagaagctggtggtgccaccgtcttccctgatctgggggctgcaatttggcctaagaagggtacagctgtgttctggtacaacctcttgcggagcggggaaggtgactaccgaacaagacatgctgcctgccctgtgcttgtgggctgcaagtgggtctccaataagtggttccatgaacgaggacaggagttcttgagaccttgtggatcaacagaagttgactgacatccttttctgtccttccccttcctggtccttcagcccatgtcaacgtgacagacacctttgtatgttcctttgtatgttcctatcaggctgatttttggagaaatgaatgtttgtctggagcagagggagaccatactagggcgactcctgtgtgactgaagtcccagcccttccattcagcctgtgccatccctggccccaaggctaggatcaaagtggctgcagcagagttagctgtctagcgcctagcaaggtgcctttgtacctcaggtgttttaggtgtgagatgtttcagtgaaccaaagttctgataccttgtttacatgtttgtttttatggcatttctatctattgtggctttaccaaaaaataaaatgtccctaccagaagccttaaa

SEQ ID NO: 288172 - DNA, 2223 bp, Artificial Sequence
  derived and/or modified sequence
ctggaaacgccgggagctgcgagtgtccagacatccttgtggaaccagcgttgtttttccttggcagctgcggagacccgtgataattcgttaactaattcaacaaacgggacccttctgtgtgccagaaaccgcaagcagttgctaacccagtgggacaggcggattggaagagcgggaaggtcctggcccagagcagtgtgacacttccctctgtgaccatgaaactctgggtgtctgcattgctgatggcctggtttggtgtcctgagctgtgtgcaggccgaattcttcacctctattgggcacatgactgacctgatttatgcagagaaagagctggtgcagtctctgaaagagtacatccttgtggaggaagccaagctttccaagattaagagctgggccaacaaaatggaagccttgactagcaagtcagctgctgatgctgagggctacctggctcaccctgtgaatgcctacaaactggtgaagcggctaaacacagactggcctgcgctggaggaccttgtcctgcaggactcagctgcaggttttatcgccaacctctctgtgcagcggcagttcttccccactgatgaggacgagataggagctgccaaagccctgatgagacttcaggacacatacaggctggacccaggcacaatttccagaggggaacttccaggaaccaagtaccaggcaatgctgagtgtggatgactgctttgggatgggccgctcggcctacaatgaaggggactattatcatacggtgttgtggatggagcaggtgctaaagcagcttgatgccggggaggaggccaccacaaccaagtcacaggtgctggactacctcagctatgctgtcttccagttgggtgatctgcaccgtgccctggagctcacccgccgcctgctctcccttgacccaagccacgaacgagctggagggaatctgcggtactttgagcagttattggaggaagagagagaaaaaacgttaacaaatcagacagaagctgagctagcaaccccagaaggcatctatgagaggcctgtggactacctgcctgagagggatgtttacgagagcctctgtcgtggggagggtgtcaaactgacaccccgtagacagaagaggcttttctgtaggtaccaccatggcaacagggccccacagctgctcattgcccccttcaaagaggaggacgagtgggacagcccgcacatcgtcaggtactacgatgtcatgtctgatgaggaaatcgagaggatcaaggagatcgcaaaacctaaacttgcacgagccaccgttcgtgatcccaagacaggagtcctcactgtcgccagctaccgggtttccaaaagctcctggctagaggaagatgatgaccctgttgtggcccgagtaaatcgtcggatgcagcatatcacagggttaacagtaaagactgcagaattgttacaggttgcaaattatggagtgggaggacagtatgaaccgcacttcgacttctctaggcgaccttttgacagcggcctcaaaacagaggggaataggttagcgacgtttcttaactacatgagtgatgtagaagctggtggtgccaccgtcttccctgatctgggggctgcaatttggcctaagaagggtacagctgtgttctggtacaacctcttgcggagcggggaaggtgactaccgaacaagacatgctgcctgccctgtgcttgtgggctgcaagtgggtctccaataagtggttccatgaacgaggacaggagttcttgagaccttgtggatcaacagaagttgactgacatccttttctgtccttccccttcctggtccttcagcccatgtcaacgtgacagacacctttgtatgttcctttgtatgttcctatcaggctgatttttggagaaatgaatgtttgtctggagcagagggagaccatactagggcgactcctgtgtgactgaagtcccagcccttccattcagcctgtgccatccctggccccaaggctaggatcaaagtggctgcagcagagttagctgtctagcgcctagcaaggtgcctttgtacctcaggtgttttaggtgtgagatgtttcagtgaaccaaagttctgataccttgtttacatgtttgtttttatggcatttctatctattgtggctttaccaaaaaataaaatgtccctaccagaagccttaaa

SEQ ID NO: 288173 - DNA, 2563 bp, Artificial Sequence
  derived and/or modified sequence
agcgttgtttttccttggcagctgcggagacccgtgataattcgttaactaattcaacaaacgggacccttctgtgtgccagaaaccgcaagcagttgctaacccagtgggacaggcggattggaagagcgggaaggtcctggcccagagcagtgtggtgagcgctgtgctggaagggaatgcgggcagtgggtacttggtagagcactgactgcctccggccagaggacttcccggaggaggtgacccatgagctggagtggtcagaggaaggctggcaaaagggcatcgtggacagaggaacagcctatgtgagtgggagcagagaccttggccaatgccattccttatggccttgtagtggaagcaaggtgatggggaaggaacactgtaggggatagctgtccacggacgctgtctacaagaccctggagtgagataacgtgcctggtactgtgccctgcatgtgtaagatgcccagttgaccttcgcagcaggagcctggatcagggcacttcctgcctcaggtattgctggacagcccagacacttccctctgtgaccatgaaactctgggtgtctgcattgctgatggcctggtttggtgtcctgagctgtgtgcaggccgaattcttcacctctattgggcacatgactgacctgatttatgcagagaaagagctggtgcagtctctgaaagagtacatccttgtggaggaagccaagctttccaagattaagagctgggccaacaaaatggaagccttgactagcaagtcagctgctgatgctgagggctacctggctcaccctgtgaatgcctacaaactggtgaagcggctaaacacagactggcctgcgctggaggaccttgtcctgcaggactcagctgcaggttttatcgccaacctctctgtgcagcggcagttcttccccactgatgaggacgagataggagctgccaaagccctgatgagacttcaggacacatacaggctggacccaggcacaatttccagaggggaacttccaggaaccaagtaccaggcaatgctgagtgtggatgactgctttgggatgggccgctcggcctacaatgaaggggactattatcatacggtgttgtggatggagcaggtgctaaagcagcttgatgccggggaggaggccaccacaaccaagtcacaggtgctggactacctcagctatgctgtcttccagttgggtgatctgcaccgtgccctggagctcacccgccgcctgctctcccttgacccaagccacgaacgagctggagggaatctgcggtactttgagcagttattggaggaagagagagaaaaaacgttaacaaatcagacagaagctgagctagcaaccccagaaggcatctatgagaggcctgtggactacctgcctgagagggatgtttacgagagcctctgtcgtggggagggtgtcaaactgacaccccgtagacagaagaggcttttctgtaggtaccaccatggcaacagggccccacagctgctcattgcccccttcaaagaggaggacgagtgggacagcccgcacatcgtcaggtactacgatgtcatgtctgatgaggaaatcgagaggatcaaggagatcgcaaaacctaaacttgcacgagccaccgttcgtgatcccaagacaggagtcctcactgtcgccagctaccgggtttccaaaagctcctggctagaggaagatgatgaccctgttgtggcccgagtaaatcgtcggatgcagcatatcacagggttaacagtaaagactgcagaattgttacaggttgcaaattatggagtgggaggacagtatgaaccgcacttcgacttctctaggcgaccttttgacagcggcctcaaaacagaggggaataggttagcgacgtttcttaactacatgagtgatgtagaagctggtggtgccaccgtcttccctgatctgggggctgcaatttggcctaagaagggtacagctgtgttctggtacaacctcttgcggagcggggaaggtgactaccgaacaagacatgctgcctgccctgtgcttgtgggctgcaagtgggtctccaataagtggttccatgaacgaggacaggagttcttgagaccttgtggatcaacagaagttgactgacatccttttctgtccttccccttcctggtccttcagcccatgtcaacgtgacagacacctttgtatgttcctttgtatgttcctatcaggctgatttttggagaaatgaatgtttgtctggagcagagggagaccatactagggcgactcctgtgtgactgaagtcccagcccttccattcagcctgtgccatccctggccccaaggctaggatcaaagtggctgcagcagagttagctgtctagcgcctagcaaggtgcctttgtacctcaggtgttttaggtgtgagatgtttcagtgaaccaaagttctgataccttgtttacatgtttgtttttatggcatttctatctattgtggctttaccaaaaaataaaatgtccctaccagaagcctt

SEQ ID NO: 288174 - DNA, 1602 bp, Artificial Sequence
  derived and/or modified sequence
atgaagctgtgggtgagcgccctgctgatggcctggttcggcgtgctgagctgcgtgcaggccgagttcttcaccagcatcggccacatgaccgacctgatctacgccgagaaggagctggtgcagagcctgaaggagtacatcctggtggaggaggccaagctgagcaagatcaagagctgggccaacaagatggaggccctgaccagcaagagcgccgccgacgccgagggctacctggcccaccccgtgaacgcctacaagctggtgaagagactgaacaccgactggcccgccctggaggacctggtgctgcaggacagcgccgccggcttcatcgccaacctgagcgtgcagagacagttcttccccaccgacgaggacgagatcggcgccgccaaggccctgatgagactgcaggacacctacagactggaccccggcaccatcagcagaggcgagctgcccggcaccaagtaccaggccatgctgagcgtggacgactgcttcggcatgggcagaagcgcctacaacgagggcgactactaccacaccgtgctgtggatggagcaggtgctgaagcagctggacgccggcgaggaggccaccaccaccaagagccaggtgctggactacctgagctacgccgtgttccagctgggcgacctgcacagagccctggagctgaccagaagactgctgagcctggaccccagccacgagagagccggcggcaacctgagatacttcgagcagctgctggaggaggagagagagaagaccctgaccaaccagaccgaggccgagctggccacccccgagggcatctacgagagacccgtggactacctgcccgagagagacgtgtacgagagcctgtgcagaggcgagggcgtgaagctgacccccagaagacagaagagactgttctgcagataccaccacggcaacagagccccccagctgctgatcgcccccttcaaggaggaggacgagtgggacagcccccacatcgtgagatactacgacgtgatgagcgacgaggagatcgagagaatcaaggagatcgccaagcccaagctggccagagccaccgtgagagaccccaagaccggcgtgctgaccgtggccagctacagagtgagcaagagcagctggctggaggaggacgacgaccccgtggtggccagagtgaacagaagaatgcagcacatcaccggcctgaccgtgaagaccgccgagctgctgcaggtggccaactacggcgtgggcggccagtacgagccccacttcgacttcagcagaagacccttcgacagcggcctgaagaccgagggcaacagactggccaccttcctgaactacatgagcgacgtggaggccggcggcgccaccgtgttccccgacctgggcgccgccatctggcccaagaagggcaccgccgtgttctggtacaacctgctgagaagcggcgagggcgactacagaaccagacacgccgcctgccccgtgctggtgggctgcaagtgggtgagcaacaagtggttccacgagagaggccaggagttcctgagaccctgcggcagcaccgaggtggactag

SEQ ID NO: 288175 - DNA, 2013 bp, Artificial Sequence
  derived and/or modified sequence
ctccctcccccaatcccccctccccccccaatctgtctttctagcatgttgccctttttcaaccacatttgtgtttcaggtgtagagaggagagagagtgaacagggagcggggcttttgtctgttggtctccctggactgaagagagggagaatagaagcccaagactaagattctcaaaatggtttattacccagaactctttgtctgggtcagtcaagaaccatttccaaacaaggacatggagggaaggcttcctaagggaagacttcctgtcccaaaggaagtgaaccgcaagaagaacgatgagacaaacgctgcctccctgactccactgggcagcagtgaactccgctccccaagaatcagttacctccactttttttaatcgtaacacctccatttgtattacatatggtgtatgggtattgatgaggtcatggtatcatatatgggatttttttctgtgtaaatcatcaagtataagaagaaactatgggactctgagccttgctttagagaatttacagtggacaaataggtgtcatcaaaccagtttttaatcattctgactcaagtgaaaacgctcagaatttcacactgtgaatccacgtttacaacccttacaggtgggccttcaggcctggttcgctacaacaatgtcttccacaactcaaactcccaccgcgctcacacaaccggtccactcctgccttttcactcacacagctcccgactgcttcttgcagaggctgagagtcccccccccaccttttttttcatttagatgtaacaaacctagtagtttatgttcatcaattgtctgtatatctctatattttatccatgtactcttttgatgtatagaagtagtttgaaactcattgtttccttgtggtaagtgaccgagatgctgccacaggacctgagacactgatgaatggtgctattttggactttcaacatgctccttggcgaggtagctctgatggagttattttttatttccatgttctaagaaggtgttggtactctgtttccctgaatgttgttctctagactggattgacttgttttccttgtgtcttcagtgtggctttcttcctcagtgttgtaggttgagcgaatgctaccagagtgtgagagaccattgtctcgttggctggcgctcacggacatgcagtcacggtagcgggagcaatcacaaaactgtaatttacttaccaaatctcttcctttccgtagcctcgcctgcctgacttagagaaagaaaagcaataattttacaggcattttgaggtgtctctttgggttctttctgtttgaaaggatatttgtcgaaaaaaagagcaaaaccgttttaaataaactccccctggaaaaaaacccaaaacactggcatctgagtgggaatatgaaaatgacaccttttccaaatattaaattggaaaacaaggtctacaaaatcatgatacttttttaaaaggcagagcattcttttttcggcaattttgataagcaaggtgtagatttacatttttgtccttgctcccaacgaaatggataaacaaaaataaattaccatctactcatggaatgttgttgtgttagccagtctgaaagcccaccttaatttttatataactgtctttagctcttcttttgacagggcaggccttgttctgaactgtttcgcttctgactgttaaacaccgatgacgcatgcactgcacttcttcgttttcttcttgctcccccattggcctgagtttcttgtgcattactcctctccctccttcgttagaataggtatatcagctgtgtaaatagagcaagaaaacagtattctgcatctgtggcatttatgtagagttgcagttgtgtactgctgaaaatgcaggcttttgtaacagtgtgatctttactgatgcactcatgacaagtacccaatgtattttagctattttagtagtatttgttcaataaatacgcaagctgtaaggtaactgtctg

SEQ ID NO: 288176 - DNA, 311 bp, Artificial Sequence
  derived and/or modified sequence
gcaggcaccattttctgcttcgctcaggacaggcacataaaaggaaggcggctgccgcccgtcgccgtcctcttttcctcagatgccctctgctgcaggtgtagagaggagagagagtgaacagggagcggggcttttgtctaaaatggttattcgtctgtaacctctaaagaggcatttttcgtttgctgacctgtggtgaggcgatgtgtctactgtatttaaacatattttgcaggttggtctccctggactgaagagagggagaatagaagcccaagactaagattctcaaaatggtttattaccca

SEQ ID NO: 288177 - protein, 308 aa, Artificial Sequence
  derived and/or modified sequence
MVMEKPSPLLVGREFVRQYYTLLNQAPDMLHRFYGKNSSYVHGGLDSNGKPADAVYGQKEVEEPEERQQTPEVVPDDSGTFYDQAVVSNDMEEHLEEPVAEPEPDPEPEPEQEPVSEIQEEKPPRPESKPESQIPPQRPQRDQRVREQRINIPPQRGPRPIREAGEQGDIEPRRMVRHPDSHQLFIGNLPHEVDKSELKDFFQSYGNVVELRINSGGKLPNFGFVVFDDSEPVQKVLSNRPIMFRGEVRLNVEEKKTRAAREGDRRDNRLRGPGGPRGGLGGGMRGPPRGGMVQKPGFGVGRGLAPRQ

SEQ ID NO: 288178 - protein, 466 aa, Artificial Sequence
  derived and/or modified sequence
MVMEKPSPLLVGREFVRQYYTLLNQAPDMLHRFYGKNSSYVHGGLDSNGKPADAVYGQKEIHRKVMSQNFTNCHTKIRHVDAHATLNDGVVVQVMGLLSNNNQALRRFMQTFVLAPEGSVANKFYVHNDIFRYQDEVFGGFVTEPQEESEEEVEEPEERQQTPEVVPDDSGTFYDQAVVSNDMEEHLEEPVAEPEPDPEPEPEQEPVSEIQEEKPEPVLEETAPEDAQKSSSPAPADIAQTVQEDLRTFSWASVTSKNLPPSGAVPVTGIPPHVVKVPASQPRPESKPESQIPPQRPQRDQRVREQRINIPPQRGPRPIREAGEQGDIEPRRMVRHPDSHQLFIGNLPHEVDKSELKDFFQSYGNVVELRINSGGKLPNFGFVVFDDSEPVQKVLSNRPIMFRGEVRLNVEEKKTRAAREGDRRDNRLRGPGGPRGGLGGGMRGPPRGGMVQKPGFGVGRGLAPRQ

SEQ ID NO: 288179 - protein, 105 aa, Artificial Sequence
  derived and/or modified sequence
MVMEKPSPLLVGREFVRQYYTLLNQAPDMLHRFYGKNSSYVHGGLDSNGKPADAVYGQKEIHRKVMSQNFTNCHTKIRHVDAHATLNDGVVVQVMGLLSNNNQAL

SEQ ID NO: 288180 - protein, 122 aa, Artificial Sequence
  derived and/or modified sequence
MVMEKPSPLLVGREFVRQYYTLLNQAPDMLHRFYGKNSSYVHGGLDSNGKPADAVYGQKEIHRKVMSQNFTNCHTKIRHVDAHATLNDGVVVQVMGLLSNNNQALRRFMQTFVLAPESLKKK

SEQ ID NO: 288181 - protein, 117 aa, Artificial Sequence
  derived and/or modified sequence
MVMEKPSPLLVGREFVRQYYTLLNQAPDMLHRFYGKNSSYVHGGLDSNGKPADAVYGQKEIHRKVMSQNFTNCHTKIRHVDAHATLNDGVVVQVMGLLSNNNQALRRFMQTFVLAPE

SEQ ID NO: 288182 - protein, 106 aa, Artificial Sequence
  derived and/or modified sequence
MVMEKPSPLLVGREFVRQYYTLLNQAPDMLHRFYGKNSSYVHGGLDSNGKPADAVYGQKEIHRKVMSQNFTNCHTKIRHVDAHATLNDGVVVQVMGLLSNNNQALR

SEQ ID NO: 288183 - protein, 284 aa, Artificial Sequence [sequence omitted]

SEQ ID NO: 288184 - DNA, 927 bp, Artificial Sequence
  derived and/or modified sequence
atggtcatggagaagcctagccctctcctggtggggcgcgaattcgtcagacagtactataccttgttgaatcaggcacccgatatgttgcaccgcttttacggtaagaatagctcgtatgttcacgggggtctggacagcaatgggaagccagccgacgctgtgtatggccaaaaggaggttgaagagcccgaagagcgtcagcaaacacccgaagtggtccctgatgattcggggaccttttacgatcaggctgtggttagcaatgatatggaggagcatctggaagagccggtggccgaaccagagcctgaccccgaaccagaaccggagcaggagcctgtgagcgagatacaggaggagaagccaccgagaccagaatctaaacctgagagccaaattcccccccagaggccacagcgcgaccagcgtgtaagagagcagcggattaatatccctccacagaggggaccacgtccaatccgggaagctggagaacagggcgatattgaaccgcggaggatggtgcgtcacccagatagtcaccagctgttcataggcaatctgccccatgaagtggataagagcgagttaaaggatttctttcagagttacggcaacgtggttgagttacggattaactccggaggcaagctccccaatttcggattcgtggtctttgacgatagcgaacctgtgcagaaagtgttgagcaatcgcccgataatgttccgcggcgaggtccggctgaacgtcgaagaaaaaaaaaccagggcggctcgcgagggagaccggagagataaccgtctccggggaccgggcgggccccgaggaggcttagggggtggcatgaggggccctccgcgtgggggaatggttcagaagcctgggtttggagtgggccgcggcctcgctccgagacagtag

SEQ ID NO: 288185 - DNA, 1401 bp, Artificial Sequence
  derived and/or modified sequence
atggtcatggagaagccgagccccttactggttgggcgtgagtttgtgcgccaatactacacactgcttaaccaggcccccgacatgttgcacaggttctacgggaagaactcctcctatgtgcacggaggcttagattccaatggcaagcctgcagatgctgtgtacggtcagaaggagatacatcgaaaagttatgtcccagaacttcaccaattgccataccaagatccgtcatgttgacgctcacgccactctgaacgatggcgtggtggtacaggtcatgggactcctatcaaataacaatcaggcgctcagacgcttcatgcagacattcgtgctcgcgcccgagggatcagtggctaacaagttctatgtccataacgacatctttcgctatcaggatgaggtttttgggggattcgttacagaaccccaggaggagtcggaggaagaagtcgaggaaccggaggagcggcaacaaacacctgaggtggtaccagatgatagcgggactttttatgatcaggcagttgtttctaacgatatggaagaacatctggaggagcccgtggcggagcccgagcctgaccccgagcctgaaccagagcaagaaccggtgagtgagatacaggaagaaaagccagaacctgtgttagaagagaccgctcccgaggatgcacagaaaagttccagcccagcccccgctgacatcgcccagactgtgcaggaggacttgaggacattcagctgggcatccgtgacctctaaaaatctgcctcctagtggggcagttcccgtgaccggaatccccccacacgttgtgaaggtgccggcctctcagccaaggcccgaaagcaaaccagagtcccagattccaccccaacgtcctcagcgagaccagcgtgttagggaacagaggatcaacatacctccgcagcgcggacctcggcctatcagagaagctggggaacaaggcgacattgagcccagaagaatggtgcggcatccagactctcaccagttgtttatcggcaacctgcctcacgaagttgataaaagcgagctcaaggacttctttcagtcatatggtaatgtggtcgaactgagaattaactctggggggaaactgccaaatttcgggttcgtggtttttgacgattcggagccggttcaaaaagtgctgagtaacaggcctatcatgttccgaggagaggtgagactgaatgtggaagagaaaaagactagggctgctagggaaggcgacagacgggataatcgcttgcggggacctggcggtcccaggggagggcttggcggcggaatgagaggacccccccggggtggtatggtgcagaaaccagggtttggagtgggtagagggctggccccgcgccaatag

SEQ ID NO: 288186 - DNA, 1401 bp, Artificial Sequence
  derived and/or modified sequence
atggtgatggaaaagccaagcccactactcgtgggccgtgaattcgtacgacaatattatactctgttaaatcaggcaccagacatgctgcaccgcttttacggcaagaatagcagctacgtccatgggggattggatagtaatggtaaacccgcagacgccgtgtatggccagaaagagatccaccggaaagttatgtcacagaacttcaccaattgtcacaccaagattaggcacgtcgacgcccatgctaccctgaacgacggagtagtggtgcaggtgatgggcctgctgagcaacaacaaccaggcactgaggcggttcatgcagacctttgtgctggctcctgaagggtccgttgccaacaagttttacgtgcataacgacatttttaggtatcaagatgaagtgttcggaggtttcgtgacagaaccacaggaagagagcgaggaggaagtcgaagagccagaagaaaggcaacagacacccgaggtggtaccggacgattctgggactttctacgaccaggctgtggtgagtaacgatatggaggaacaccttgaggagcccgtcgccgaacccgagcctgacccagaacccgagccggaacaggaacctgtgtcagagatccaagaggaaaagccagagcctgtcctcgaagagaccgcacctgaggacgcacagaaaagtagctcgccagctcctgcggacattgcccagaccgttcaagaagatctgaggaccttcagctgggccagtgtgacaagcaagaacctcccaccctccggagcggtgccggttactggcatcccaccgcacgttgttaaggtgcccgcctcacagccccggcccgaatcgaagccggaatcgcagatcccccctcaaagaccgcagcgcgaccagagggttcgggaacaaaggatcaacatccccccacagagagggccaagaccaattcgagaggcaggggaacagggagatattgaaccaaggcgcatggttcggcacccagattcccatcagttattcatcgggaatctccctcacgaagttgacaagtctgaacttaaagacttcttccagagttacgggaatgtggttgagctgcgaatcaatagtggaggcaagctgcccaattttggctttgtggttttcgacgattctgaacccgtccagaaggtgttgtctaaccggcccattatgtttcgcggtgaagtccggctcaatgtcgaagaaaagaaaacaagagctgcaagagagggcgatcggagagacaaccgactgcgcggccccggagggcctcgtggcgggctcggcggtggtatgcgcggcccacccagagggggcatggtgcaaaaacccggctttggagtcggtagggggctggccccgcgccaatag

SEQ ID NO: 288187 - DNA, 318 bp, Artificial Sequence
  derived and/or modified sequence
atggtcatggaaaaacctagtcccctattggttggtagggagtttgtgcggcagtattatacccttctcaatcaggcccctgatatgttgcatcgattttatggtaagaactcatcatacgtgcatggaggtcttgactctaatggaaagccagcagatgcagtgtacggccagaaagagattcacagaaaagtgatgagccagaatttcactaactgtcacaccaaaattaggcacgtggatgcgcatgcgactctgaacgacggtgtagtcgtgcaggtaatgggcttattgagtaataataatcaggctttatag

SEQ ID NO: 288188 - DNA, 369 bp, Artificial Sequence
  derived and/or modified sequence
atggtaatggagaaacctagtcccctcctggtcggtagagagttcgtgagacagtactacaccctgctgaaccaggcacctgatatgcttcacagattctacggcaagaacagcagttatgtgcacggaggactagattcaaacggtaagcccgcagatgccgtctacggacagaaagagattcaccggaaggtaatgtctcagaacttcactaattgtcacacaaagattaggcatgtggacgcccacgccaccctgaacgacggggtagtggtgcaggtgatgggcttgttatccaataacaaccaggccctgcgtaggttcatgcagacatttgtcctcgctcctgagtccctcaaaaaaaagtag

SEQ ID NO: 288189 - DNA, 354 bp, Artificial Sequence
  derived and/or modified sequence
atggtgatggagaagccatcccctctgttggtcggtagggaattcgtccgtcaatattacacccttttaaatcaagccccagatatgctgcacagattttatggaaagaactcatcttacgtgcacggcggtcttgattccaacggaaaacctgcagacgccgtttacggacagaaagaaattcaccgaaaagtgatgtcacagaatttcacaaactgtcataccaagatcaggcatgtggatgcacatgcaaccctgaatgacggggtggttgttcaagtcatgggtcttctttctaacaacaaccaggcactccggagatttatgcagacgttcgtacttgcccccgagtag

SEQ ID NO: 288190 - DNA, 369 bp, Artificial Sequence
  derived and/or modified sequence
atggtgatggagaagcctagtccgttgctggtgggccgcgaattcgtgaggcagtattacacactgctgaaccaggctcccgatatgcttcaccgattctatggcaagaactccagctacgtccacggagggctggactcaaatggaaaacccgctgatgccgtgtacggccaaaaggaaatccacaggaaagttatgtctcaaaacttcacaaactgccatacgaaaattagacacgtcgatgcccacgccaccctcaatgacggggtggtggtgcaggtgatgggactcctaagtaataataaccaggcattgcgccggtttatgcagacctttgtgctggcgcccgagtctctcaagaagaaatag

SEQ ID NO: 288191 - DNA, 321 bp, Artificial Sequence
  derived and/or modified sequence
atggtgatggagaaacccagcccgctactggtaggacgggagttcgttagacagtattatacccttctcaatcaggcccctgacatgcttcacaggttttacggcaagaacagtagctacgtgcacggagggctcgacagcaatggaaagccagccgacgccgtgtacggacagaaagaaatacatcggaaagtgatgtctcaaaacttcactaactgtcatactaaaatcaggcacgtcgatgctcatgcgacactgaatgacggggtcgtggtgcaagtcatggggttgctatctaacaataaccaagccctgcggtag

SEQ ID NO: 288192 - DNA, 855 bp, Artificial Sequence
  derived and/or modified sequence
atggaagaacacctggaagagcccgtagctgagcctgagcctgatcctgaaccggaaccagaacaggagcctgtttccgaaatccaagaggaaaaacctgagcctgtactcgaagagactgctccagaagacgctcaaaaaagctcctctcctgctccagccgacattgcacagaccgtgcaggaggatttgcggaccttctcttgggcttccgtgacatccaaaaatctgcctccttcgggtgctgttccagtgactggcattccaccccatgtagttaaggttccagcctcacagccaaggccagagtcaaaacccgaatctcagatcccaccacagcggccccaaagggaccaaagggtcagagaacagaggatcaacattcctccccagagggggccccgcccaatccgcgaagctggcgaacagggcgacatagagccacgtcgcatggtgaggcaccctgactcacatcaacttttcatcggaaaccttccacacgaggtggacaaatcagagctgaaggattttttccagtcctacggcaacgttgtggaactgcggatcaacagcggcgggaaacttccaaacttcggctttgtcgtgttcgatgattctgaacctgtacaaaaggtgctgtcaaataggcccatcatgttccgaggcgaggtcaggttgaacgtggaggagaaaaagacccgagcagctcgagaaggcgacagacgagacaaccgcctcaggggacccggcggcccacgcggcggtctggggggcgggatgagggggcccccccgtggagggatggtgcagaagcccggtttcggggtgggcaggggactggcccccagacagtag

SEQ ID NO: 288193 - DNA, 2310 bp, Artificial Sequence
  derived and/or modified sequence
gtgcggacgcagttgcgtgaggggtttgtactatcctcggtgctgtggtgcagagctagttcctctccagctcagccgcgtaggtttggacatatttgactcttttccccccaggttgaattgaccaaagcaatggtgatggagaagcctagtcccctgctggtcgggcgggaatttgtgagacagtattacacactgctgaaccaggccccagacatgctgcatagattttatggaaagaactcttcttatgtccatgggggattggattcaaatggaaagccagcagatgcagtctacggacagaaagaagtagaggaacctgaagaaagacagcaaacacctgaggtggtacctgatgattctggaactttctatgatcaggcagttgtcagtaatgacatggaagaacatttagaggagcctgttgctgaaccagagcctgatcctgaaccagaaccagaacaagaacctgtatctgaaatccaagaggaaaagcctccccgtccagagtctaagcctgaatctcagattccaccacaaagacctcagcgggatcaaagagtgcgagaacaacgaataaatattcctccccaaaggggacccagaccaatccgtgaggctggtgagcaaggtgacattgaaccccgaagaatggtgagacaccctgacagtcaccaactcttcattggcaacctgcctcatgaagtggacaaatcagagcttaaagatttctttcaaagttatggaaacgtggtggagttgcgcattaacagtggtgggaaattacccaattttggttttgttgtgtttgatgattctgagcctgttcagaaagtccttagcaacaggcccatcatgttcagaggtgaggtccgtctgaatgtcgaagagaagaagactcgagctgccagggaaggcgaccgacgagataatcgccttcggggacctggaggccctcgaggtgggctgggtggtggaatgagaggccctccccgtggaggcatggtgcagaaaccaggatttggagtgggaagggggcttgcgccacggcagtgaatcttcatggatcttcatgcagccatacaaaccctggttccaacagaatggtgaattttcgacagcctttggtatcttggagtatgaccccagtctgttataaactgcttaagtttgtataattttactttttttgtgtgttaatggtgtgtgctccctctccctctcttccctttcctgacctttagtctttcacttccaattttgtggaatgatattttaggaataacggacttttaaagaagcaaaaaaaaagactgaatttccttgcttactttgcatatacagactggattttttttttttttttacagccatttccccaaaggaatgtcttgcatattactgacatttggtatgtttcattcattggaatatttcttattttctacgtgtttgaaaagcctgtaagaaatacaggatttgataatattttgaaggcaggaaaaacccaaattgtttcttctttgagagtcatgactaccttctggtgtggagaaattgccattggaaaatttgacaattttgattctcactggtatgtttaaaaactgaataaaaggaatagaatttttttttgataaaggatcacaaaacaattctaaaacctaactgtttttaccattgaaatttaaattgtgataataggttttaaatgtctagaatgcaactgataggcttttcttgaactgttagtttttttgaagtagttttttcatgtttaatttgtatttgtaaaaaaacaaaaagcaaaaaaattcccaaaacccagataacaaccagagcaaaactgttgtgccttctatttatctttgatttcagtcttggcaattgtttaaaaaaaaaatctagatttgttttattaggttcagagtatgtggggaattatagaatccctctttcatcactttgtgtatgtcttttgttaacatatttgttatgccttattctaaaattgagtctcaaactggaatgcctttgaagacagatgcttctatagaggttctttgacctaaatagttcagcatttgtatttttattctggtatctaatcagattcctaatcatagcccgtaagaaggaatgttactttaatattggactttgctcatgtgctcgtgtccgcatttttttttttcttaaaatcatagccatatggtaaattttctattttgttatggttctcttttattgatgggcatgcagtgggtgttacttggaaatggccaatttttattaaaatatttctgg

SEQ ID NO: 288194 - DNA, 2803 bp, Artificial Sequence
  derived and/or modified sequence
agcacgcgtgtgtgcggacgcagttgcgtgaggggtttgtactatcctcggtgctgtggtgcagagctagttcctctccagctcagccgcgtaggtttggacatatttgactcttttccccccaggttgaattgaccaaagcaatggtgatggagaagcctagtcccctgctggtcgggcgggaatttgtgagacagtattacacactgctgaaccaggccccagacatgctgcatagattttatggaaagaactcttcttatgtccatgggggattggattcaaatggaaagccagcagatgcagtctacggacagaaagaaatccacaggaaagtgatgtcacaaaacttcaccaactgccacaccaagattcgccatgttgatgctcatgccacgctaaatgatggtgtggtagtccaggtgatggggcttctctctaacaacaaccaggctttgaggagattcatgcaaacgtttgtccttgctcctgaggggtctgttgcaaataaattctatgttcacaatgatatcttcagataccaagatgaggtctttggtgggtttgtcactgagcctcaggaggagtctgaagaagaagtagaggaacctgaagaaagacagcaaacacctgaggtggtacctgatgattctggaactttctatgatcaggcagttgtcagtaatgacatggaagaacatttagaggagcctgttgctgaaccagagcctgatcctgaaccagaaccagaacaagaacctgtatctgaaatccaagaggaaaagcctgagccagtattagaagaaactgcccctgaggatgctcagaagagttcttctccagcacctgcagacatagctcagacagtacaggaagacttgaggacattttcttgggcatctgtgaccagtaagaatcttccacccagtggagctgttccagttactgggataccacctcatgttgttaaagtaccagcttcacagccccgtccagagtctaagcctgaatctcagattccaccacaaagacctcagcgggatcaaagagtgcgagaacaacgaataaatattcctccccaaaggggacccagaccaatccgtgaggctggtgagcaaggtgacattgaaccccgaagaatggtgagacaccctgacagtcaccaactcttcattggcaacctgcctcatgaagtggacaaatcagagcttaaagatttctttcaaagttatggaaacgtggtggagttgcgcattaacagtggtgggaaattacccaattttggttttgttgtgtttgatgattctgagcctgttcagaaagtccttagcaacaggcccatcatgttcagaggtgaggtccgtctgaatgtcgaagagaagaagactcgagctgccagggaaggcgaccgacgagataatcgccttcggggacctggaggccctcgaggtgggctgggtggtggaatgagaggccctccccgtggaggcatggtgcagaaaccaggatttggagtgggaagggggcttgcgccacggcagtgaatcttcatggatcttcatgcagccatacaaaccctggttccaacagaatggtgaattttcgacagcctttggtatcttggagtatgaccccagtctgttataaactgcttaagtttgtataattttactttttttgtgtgttaatggtgtgtgctccctctccctctcttccctttcctgacctttagtctttcacttccaattttgtggaatgatattttaggaataacggacttttaaagaagcaaaaaaaaagactgaatttccttgcttactttgcatatacagactggattttttttttttttttacagccatttccccaaaggaatgtcttgcatattactgacatttggtatgtttcattcattggaatatttcttattttctacgtgtttgaaaagcctgtaagaaatacaggatttgataatattttgaaggcaggaaaaacccaaattgtttcttctttgagagtcatgactaccttctggtgtggagaaattgccattggaaaatttgacaattttgattctcactggtatgtttaaaaactgaataaaaggaatagaatttttttttgataaaggatcacaaaacaattctaaaacctaactgtttttaccattgaaatttaaattgtgataataggttttaaatgtctagaatgcaactgataggcttttcttgaactgttagtttttttgaagtagttttttcatgtttaatttgtatttgtaaaaaaacaaaaagcaaaaaaattcccaaaacccagataacaaccagagcaaaactgttgtgccttctatttatctttgatttcagtcttggcaattgtttaaaaaaaaaatctagatttgttttattaggttcagagtatgtggggaattatagaatccctctttcatcactttgtgtatgtcttttgttaacatatttgttatgccttattctaaaattgagtctcaaactggaatgcctttgaagacagatgcttctatagaggttctttgacctaaatagttcagcatttgtatttttattctggtatctaatcagattcctaatcatagcccgtaagaaggaatgttactttaatattggactttgctcatgtgctcgtgtccgcatttttttttttcttaaaatcatagccatatggtaaattttctattttgttatggttctcttttattgatgggcatgcagtgggtgttacttggaaatggccaatttttattaaaatatttctggaagaaaat

SEQ ID NO: 288195 - DNA, 10240 bp, Artificial Sequence
  derived and/or modified sequence
agggtgagtggcagttatatagaccggcggcggagcacgcgtgtgtgcggacgcagttgcgtgaggggtttgtactatcctcggtgctgtggtgcagagctagttcctctccagctcagccgcgtaggttgaattgaccaaagcaatggtgatggagaagcctagtcccctgctggtcgggcgggaatttgtgagacagtattacacactgctgaaccaggccccagacatgctgcatagattttatggaaagaactcttcttatgtccatgggggattggattcaaatggaaagccagcagatgcagtctacggacagaaagaaatccacaggaaagtgatgtcacaaaacttcaccaactgccacaccaagattcgccatgttgatgctcatgccacgctaaatgatggtgtggtagtccaggtgatggggcttctctctaacaacaaccaggctttgaggagattcatgcaaacgtttgtccttgctcctgaggggtctgttgcaaataaattctatgttcacaatgatatcttcagataccaagatgaggtctttggtgggtttgtcactgagcctcaggaggagtctgaagaagaagtagaggaacctgaagaaagacagcaaacacctgaggtggtacctgatgattctggaactttctatgatcaggcagttgtcagtaatgacatggaagaacatttagaggagcctgttgctgaaccagagcctgatcctgaaccagaaccagaacaagaacctgtatctgaaatccaagaggaaaagcctgagccagtattagaagaaactgcccctgaggatgctcagaagagttcttctccagcacctgcagacatagctcagacagtacaggaagacttgaggacattttcttgggcatctgtgaccagtaagaatcttccacccagtggagctgttccagttactgggataccacctcatgttgttaaagtaccagcttcacagccccgtccagagtctaagcctgaatctcagattccaccacaaagacctcagcgggatcaaagagtgcgagaacaacgaataaatattcctccccaaaggggacccagaccaatccgtgaggctggtgagcaaggtgacattgaaccccgaagaatggtgagacaccctgacagtcaccaactcttcattggcaacctgcctcatgaagtggacaaatcagagcttaaagatttctttcaaagttatggaaacgtggtggagttgcgcattaacagtggtgggaaattacccaattttggttttgttgtgtttgatgattctgagcctgttcagaaagtccttagcaacaggcccatcatgttcagaggtgaggtccgtctgaatgtcgaagagaagaagactcgagctgccagggaaggcgaccgacgagataatcgccttcggggacctggaggccctcgaggtgggctgggtggtggaatgagaggccctccccgtggaggcatggtgcagaaaccaggatttggagtgggaagggggcttgcgccacggcagtgaatcttcatggatcttcatgcagccatacaaaccctggttccaacagaatggtgaattttcgacagcctttggtatcttggagtatgaccccagtctgttataaactgcttaagtttgtataattttactttttttgtgtgttaatggtgtgtgctccctctccctctcttccctttcctgacctttagtctttcacttccaattttgtggaatgatattttaggaataacggacttttaaagaagcaaaaaaaaagactgaatttccttgcttactttgcatatacagactggattttttttttttttttacagccatttccccaaaggaatgtcttgcatattactgacatttggtatgtttcattcattggaatatttcttattttctacgtgtttgaaaagcctgtaagaaatacaggatttgataatattttgaaggcaggaaaaacccaaattgtttcttctttgagagtcatgactaccttctggtgtggagaaattgccattggaaaatttgacaattttgattctcactggtatgtttaaaaactgaataaaaggaatagaatttttttttgataaaggatcacaaaacaattctaaaacctaactgtttttaccattgaaatttaaattgtgataataggttttaaatgtctagaatgcaactgataggcttttcttgaactgttagtttttttgaagtagttttttcatgtttaatttgtatttgtaaaaaaacaaaaagcaaaaaaattcccaaaacccagataacaaccagagcaaaactgttgtgccttctatttatctttgatttcagtcttggcaattgtttaaaaaaaaaatctagatttgttttattaggttcagagtatgtggggaattatagaatccctctttcatcactttgtgtatgtcttttgttaacatatttgttatgccttattctaaaattgagtctcaaactggaatgcctttgaagacagatgcttctatagaggttctttgacctaaatagttcagcatttgtatttttattctggtatctaatcagattcctaatcatagcccgtaagaaggaatgttactttaatattggactttgctcatgtgctcgtgtccgcatttttttttttcttaaaatcatagccatatggtaaattttctattttgttatggttctcttttattgatgggcatgcagtgggtgttacttggaaatggccaatttttattaaaatatttctggaagaaaatttaatctggcaatatagactaatactcgtttcacatatgtgttatttgttgagtgctgtgtgtgagatgggtgaaggttttgtttacacgtgtgaaacaaacttttgtgtgattgtcattactaattgaagggcaaccaggttgtaaaattcagcgtatttattttcttaacagtattcatctttaggactgtcgtttgaggatagcataggaatatttggtttgcattactgagaaactctaggtttgctgtgatggttaagaccacagtgaagttggtattaccagtttggttccagttcctcaaatatttgaaaattggcagcatctcctttacataaacttaatgtaactgaatcacatggcttttttgtagggttaaagtaactttggtaaccacttttggcccagatcactgataataggaagaaatacaacttatacttttgtagcttatattaagcatgtggtgggtggaaagaaaagtttagtctgagtcactttggaaaaaaaaattactttgtggtaacttcaaggtcataaattatggatagcctagaaattatccttcatgagtgaatactaaattatacatttcaaaacagaagttcttcctacttggagacttaagggcattaactagatgcagcaatcctcagcttggtgttatcacatactagaggacatttggaaatgtgtgaaatttggaagggttgttggagagacatgcatctggcatttattgggtggggtctaaggataccaaatgttgtgtaaaaatgaagcaaccccattgagaacactgatagtccctattcctgtgggtgggtggagctgtgggattaggaaaactggaatgaagactcattcttttgaaactcagcctcagataaataacaaactaggaaatggaaatctgtttcaagaattgcagtaacatctactctaaggaattagtaatttcactttttattatttgtaccaaatgtatgtgtgtgttgtgtatgttggtgtaaatgtggagaggtggtagcaatacatactgatgctgcttgtaatttgttgcagggaattactgcacaatctcagaaaatagaaagcttccccagtgctttctgtcatcagagttgggatgattgtgaggttttgaatgatagtattggacctaagaaataggattagcatcatgatcagaactgttgagaatccttgtacaattatgtacattattgcatgtagagtaaacctgagagcttagagatgtatacgtttccactgctggaaaatcattataagttagggcaacattttctataggtggcagcagtaggagctcatcacattgaacattttcagattttaaaatgaaaattttcatccgtaggaatggcccaatgtatagttattagctactgagcttagaactcttgacccatgagattttttttttaaatttttatttttatagaggcaaggtcttgctatgttgtcaggctggtctcaagctcctggcctcatcagttctcctgccttccaagtagccggaactacaggtgtgcaccattgcacctggcctcatgagtattttagttagataagatttgtttggttcagtgggtcttagttttttaagacctgttaatttgtaattagacatcttgggccttaaactgtatttttgttttagtggtgaggttgggttttactttgtgtattccagcgttctcaactttgtcagatattgctagggaccagtgagatagataatccaaaaataataatttgactttggttgagtatgtcattaccacagtgttagttgaattgcactttaggttagaaaagttaattttcacatctgtgctgcgggttaggtgatattgtcctcagcacaatagatgaggaagaaactgaatcagaacagttaaatgacaggcttccaagtcatccatgtagcaaggagcacatttgcctcccaaactgatgctttttctctagaaccataatgcccccctaattacatttcagtagcatagaccgcaatgaacttcctactgtagggagacttgagtctggaatacattcagaacaaggttaacattacagttcttaatttcctttagggcaaacaagataattaaacttgggttttgtgagtctttttttgatttgcagattatatatggtaacacaataatggtggtttgtttttaagttttttctcatcaggtttgataatttaatgcaaacttcaaatctggatgtgaataataatatttttattatagtataatccaggtgagtttatagaatttgtgttttgtgcttataaactgtcaccttctgatacttttcttcatccctctatttgaaaaacccttgtagaatttaacgatttaatggaaaatgttgcactttatagaaggccattttagaacttacaggtaacctttttgaagagcttagatttgtagaccactgtttatgctgagtgacatttcttttaaatggttgcatttgtcaaatctataaagatgttttttatattgcagttttctttttgtgctacttaaaggaatctttgcaatgctgcatatagataattgttgacctttttagttcagcagtttttaaacttgaagtaacatcagcatttatttgaatatcaggttttagctaactgcctaatgtaccaaaaaaaaattagcaatgtcttatgtgggatgaggggttaagttaaagttgctgatcaagtaatggccgtgtggcacaagatgataactaagaatttctggttctaaggtagtaatgccttttgggatttatatttgtttaatgttgagattctggggaccataggtgggcctgtcaactcttaacagactatagtaaaggagagatggtggcacatgtgagataaaacttgtttatatttacattcttattagtggatagatatcacctcagtacaacactgaaattaaactgccttgttcatgctttcatgtctcaaatcaaggcctaaatgagtaaaaagatgattacagattacctaaaacccttaaccagttttggtttttgattatgcatatgtgttggcttgcaattaggtttttagtttctgtttatgtgacttgtttgaaaacattggattcgtcttctctccacagtttctacttgaacctagtagcttattttaattccctgtaagaggaaaataatatagggaatctgttcaactattcctttaataaatcatgtgacttggccaattacagaaattcctaagtgtagtattttgaaatgtggccagtgtcccagatttgtaaggtacagtgtgcatacagtgtgtcttaggatttttttaagtaaattaaggatgtttaccagaaattattgatttactgaaccaagtatttattttcagaagcccacttttggggaaggttgcctatatttttgatagtaattagatggaagattaaatcctgtttaacctggatagaaacagttttaactattgctgaagttaaaatcactttggggtggggtggggtggctcatgcctgtaatcccagtgctgtgggaggctgaggccagaggattgctcgaggccaggaatttgagaccagcttgggcaacatagcaagaccctgtctctacagataattgaaaagtgagccagatgtggtggcgcattcctatagtctccgtctctcaggaggctgaggcaggagattgcttgagcccaggagttggaggctgcagtgagttatgatcataccactgcactctaacctgggtgacagagtgagaccctgtctctaaaaaacaaaaaattagaaaacaacaaaaaccacttcggttactcactgtcctcatgctttgatgtcagttgttctcctaaattttaaaattttgttatgaagattggatgtacactgatttggccctttaaatgacattataccaagaagttggtataagggagtaggagatgagaaaactttttgaaaaatcatttggtgcatgctaaggtagcttgtaggacatgtggttttaaaaaattcatggattttgaagaaggatagggtggaagtaaaatttagctgatagcatagggatcatttgtgatttatatagaaaataattatatttttgagtgagaagcatcagacttaaatttttttcttctattttggttattaccaaaaggaacagagaaactctcagaattctttgaatcatagaatgttagtgctggaaaggactaggaagtgacttgtacaaccccttcattttacaaaggatcagagagaattggttagtagagtcccaaatctgcttttagaagtaatatggtgatcatcagtttagattcactgtaggaagggcagccctgttaaagtttgtcaggagaaaaagggaaggtatcactttttgtatgttcacccagttgcttctgtagttttcatacccctgttttctcaattttcttagaactgtctttaatggcccagctctaccagggcttgttgtctaaggacattaacttgtgctcccctcagggatgggtttactactagctgtcagaaagctattgggtatcctaatgtgttaatagctgaaactcagctgtaatttctcctaaatacttcagcattttgcattctgtacattgtggtgctttttccaccttgtattgttgtaactgtaagctcctagggggcagcaatttggtcttaggcgtgtaccctgtttagtgcctggcaatgccatgtttatatcaaggtcttaatattacttttgagttatttctcccactcttcatggaagtgatgctccagccttgctaaaacactgagggtcctcccgataagccaggcattgtgattccttggcttcaagtgccttctgtcttccccgaaggtccactgagatctacaatcccccctttcctctgatctcttgccatgtaagtaattttttaaaagatcagtacaagagctatattttttcctaagaaaaaatttcaacaggaatggggagtagccccgttttggggctgatctgtccagaatttggagtgaggaacaaatccattctcatctactttccacattttccctcttgtttgaggtcctgttccaaccttcatttctgaaactgttctagagcactttgtctttctcgtagttcataacttaccccttcagtctagaattagaattacattatctgttttactactttactagactgtaagctcctagaagataaggactagggagttcatctctgtattccaccagaaggtacagtgactcataactagagtctttagatgaaacttactgagttgaataacttaatatatttctgttttcattcccaagggaggccatgtctggagatagaccttgaatttaataaattttaggcactataccatttcagtggagaaaattgttgggaaatttggggggatggatatataagggggaggaagtcactggccagtttgaggtgcttccattggtctgggtaactagccatttcttcctgattgtgcctagtatatcccagacagtttgtttctatgcagaagaattttatatgaaattttcatttctttgcaaaaacttgttccttctttcagttcatgacatcatccatgctaaagtctgagtcatctgcttccatttttgttattccccacatccagtcttcagctaagtcctgtcagttctacctcaagtctttcccgtctttcttcctcacctatgtaatttcagtagtctctcagcttcacttaacctcttactccagcctactttatacacaatgttagattcatcttactgaaacatagttctgaccatgtattccatgtatgtgttctctctcccctattagactgtaagctccttatgggcaggatctgtgtctgagtcatctttgtatcttgcctagcacctatcaataaatacttcttgaatgaacaaatgaattctcatttctcgacataaagccttgtctaaagtgagatgttttccaggtcatacataggtttctccctggggtaattggaagttcttgcatataaagttggttaaatagtaataattatgagttaaccacagaaaatttcagaaaactttaatttttttccattggaatcagcatggatatgtgtatatggatggttcaataaatatacttttatatacatgtttcacagaaattttacattccatcttcaaactgcagaaatagattttttttttttacaagccaaaaaataactgccataacttttgtgacttcatgcaaaaaaaggggggaagagtaaggggcaaaagggaattagttgttcaaggttgagtgtccagtaagaagtaaaaatgttacattaaggaagcgattgcttaacacgctgcttaaggtggtagccagacaaatccttaactgcagcattaaggccataccaagtttatacatatatacaaagaaatttccatataaaagacatactatcacattttcttcttcataaggatgaggaactttgtaattctgacctgattttccaggccaattaattaaaatgtccccaggctgctttttagaagtatcttctactttggctagctgtcagagttgccgctatgtgagcttgtgacttctggtctggcgtgaaagtatgaatcatcttgaacctcttccatcatagcactatgttgctgagctaattcatgctgcccagctaagcacattttctacatccccaaagtatttggaatcacagcattgtaacttgtgattgtcttacctgtaacagactccacagtcatgctggcattgtgacctgaagaattacacagtgcccttcttagattctttggggttaaggtaacttcttgaataatgtactaatgaacgatagtgtttcaggaaacatgccctagctattggaagttcgtatctaacttttaccccttgtgtgtcatgatacatttaagttggtagctacatttttggaataaaggaaatgtaaaattatttgcagaataataacctgggatttgctcttctgcctaaacatcgaactagggaactttaaagacaaagggtgcatcttttgtgcaagtatctaagcgggcaaaatggggaaaacatgaagggcaagtcctttggggatgacttctaattaatgcagaagtcatttgctttggccaggttgggtgggactctgagattgcacactcttgccctgttggcagaaactagcccatcttaagttagtcaatgaatcctgagtcaaaatgaaaggttgctaaatctaagatcgagtgtataaataaaataaccccttcctccagtgactgtgcatttattttgtaataaactcattttggaatgttttagcaatgaa

SEQ ID NO: 288196 - DNA, 754 bp, Artificial Sequence
  derived and/or modified sequence
aacggcctcgcggggcaggagtaagccgcggccgccgcctgggccccagggcggtctctggggccaggggtcccgcgcccagcgtttcccgcccgccaccctctccgccacgcgcccgcggcaccttttcctcccctggccaagggatccagtcggttcggaccagaaggaggctttcgtttagggtgggggcagcactaaagtctgattggagtcttgcggtccgcgcgtcgcagaagcgccttcggttttgcagagagcaaagagggagcagcgagtgcacggagtggtagtaacaaccaatgttctttccacgccctcactgtgtgtccggcactgtgcggagccacttttctgcctttcatttgattcttgcagtgagctggcgaggtttggacatatttgactcttttccccccaggttgaattgaccaaagcaatggtgatggagaagcctagtcccctgctggtcgggcgggaatttgtgagacagtattacacactgctgaaccaggccccagacatgctgcatagattttatggaaagaactcttcttatgtccatgggggattggattcaaatggaaagccagcagatgcagtctacggacagaaagaaatccacaggaaagtgatgtcacaaaacttcaccaactgccacaccaagattcgccatgttgatgctcatgccacgctaaatgatggtgtggtagtccaggtgatggggcttctctctaacaacaaccaggctttg

SEQ ID NO: 288197 - DNA, 2700 bp, Artificial Sequence
  derived and/or modified sequence
gtgcggacgcagttgcgtgaggggtttgtactatcctcggtgctgtggtgcagagctagttcctctccagctcagccgcgtaggtttggacatatttgactcttttccccccaggttgaattgaccaaagcaatggtgatggagaagcctagtcccctgctggtcgggcgggaatttgtgagacagtattacacactgctgaaccaggccccagacatgctgcatagattttatggaaagaactcttcttatgtccatgggggattggattcaaatggaaagccagcagatgcagtctacggacagaaagaaatccacaggaaagtgatgtcacaaaacttcaccaactgccacaccaagattcgccatgttgatgctcatgccacgctaaatgatggtgtggtagtccaggtgatggggcttctctctaacaacaaccaggctttgaggagattcatgcaaacgtttgtccttgctcctgagagtctgaagaagaagtagaggaacctgaagaaagacagcaaacacctgaggtggtacctgatgattctggaactttctatgatcaggcagttgtcagtaatgacatggaagaacatttagaggagcctgttgctgaaccagagcctgatcctgaaccagaaccagaacaagaacctgtatctgaaatccaagaggaaaagcctgagccagtattagaagaaactgcccctgaggatgctcagaagagttcttctccagcacctgcagacatagctcagacagtacaggaagacttgaggacattttcttgggcatctgtgaccagtaagaatcttccacccagtggagctgttccagttactgggataccacctcatgttgttaaagtaccagcttcacagccccgtccagagtctaagcctgaatctcagattccaccacaaagacctcagcgggatcaaagagtgcgagaacaacgaataaatattcctccccaaaggggacccagaccaatccgtgaggctggtgagcaaggtgacattgaaccccgaagaatggtgagacaccctgacagtcaccaactcttcattggcaacctgcctcatgaagtggacaaatcagagcttaaagatttctttcaaagttatggaaacgtggtggagttgcgcattaacagtggtgggaaattacccaattttggttttgttgtgtttgatgattctgagcctgttcagaaagtccttagcaacaggcccatcatgttcagaggtgaggtccgtctgaatgtcgaagagaagaagactcgagctgccagggaaggcgaccgacgagataatcgccttcggggacctggaggccctcgaggtgggctgggtggtggaatgagaggccctccccgtggaggcatggtgcagaaaccaggatttggagtgggaagggggcttgcgccacggcagtgaatcttcatggatcttcatgcagccatacaaaccctggttccaacagaatggtgaattttcgacagcctttggtatcttggagtatgaccccagtctgttataaactgcttaagtttgtataattttactttttttgtgtgttaatggtgtgtgctccctctccctctcttccctttcctgacctttagtctttcacttccaattttgtggaatgatattttaggaataacggacttttaaagaagcaaaaaaaaagactgaatttccttgcttactttgcatatacagactggattttttttttttttttacagccatttccccaaaggaatgtcttgcatattactgacatttggtatgtttcattcattggaatatttcttattttctacgtgtttgaaaagcctgtaagaaatacaggatttgataatattttgaaggcaggaaaaacccaaattgtttcttctttgagagtcatgactaccttctggtgtggagaaattgccattggaaaatttgacaattttgattctcactggtatgtttaaaaactgaataaaaggaatagaatttttttttgataaaggatcacaaaacaattctaaaacctaactgtttttaccattgaaatttaaattgtgataataggttttaaatgtctagaatgcaactgataggcttttcttgaactgttagtttttttgaagtagttttttcatgtttaatttgtatttgtaaaaaaacaaaaagcaaaaaaattcccaaaacccagataacaaccagagcaaaactgttgtgccttctatttatctttgatttcagtcttggcaattgtttaaaaaaaaaatctagatttgttttattaggttcagagtatgtggggaattatagaatccctctttcatcactttgtgtatgtcttttgttaacatatttgttatgccttattctaaaattgagtctcaaactggaatgcctttgaagacagatgcttctatagaggttctttgacctaaatagttcagcatttgtatttttattctggtatctaatcagattcctaatcatagcccgtaagaaggaatgttactttaatattggactttgctcatgtgctcgtgtccgcatttttttttttcttaaaatcatagccatatggtaaattttctattttgttatggttctcttttattgatgggcatgcagtgggtgttacttggaaatggccaatttttattaaaatatttctggaagaaaa

SEQ ID NO: 288198 - DNA, 530 bp, Artificial Sequence
  derived and/or modified sequence
gcgcccgccaagaagcgcctggcggaagggcgcactctcaggccttccaccggcgaccttccggcgggagcctgcgggcggcgcaggaacgaccctccttcctctgccccgcagcagtgctgagtaatggtgagagcagcaaggcccttggccgccgcacgttgaattgaccaaagcaatggtgatggagaagcctagtcccctgctggtcgggcgggaatttgtgagacagtattacacactgctgaaccaggccccagacatgctgcatagattttatggaaagaactcttcttatgtccatgggggattggattcaaatggaaagccagcagatgcagtctacggacagaaagaaatccacaggaaagtgatgtcacaaaacttcaccaactgccacaccaagattcgccatgttgatgctcatgccacgctaaatgatggtgtggtagtccaggtgatggggcttctctctaacaacaaccaggctttgaggagattcatgcaaacgtttgtccttgctcctgagg

SEQ ID NO: 288199 - DNA, 580 bp, Artificial Sequence
  derived and/or modified sequence
gtgcggacgcagttgcgtgaggggtttgtactatcctcggtgctgtggtgcagagctagttcctctccagctcagccgcgtaggtttggacatatttgactcttttccccccaggttgaattgaccaaagcaatggtgatggagaagcctagtcccctgctggtcgggcgggaatttgtgagacagtattacacactgctgaaccaggccccagacatgctgcatagattttatggaaagaactcttcttatgtccatgggggattggattcaaatggaaagccagcagatgcagtctacggacagaaagaaatccacaggaaagtgatgtcacaaaacttcaccaactgccacaccaagattcgccatgttgatgctcatgccacgctaaatgatggtgtggtagtccaggtgatggggcttctctctaacaacaaccaggctttgaggagattcatgcaaacgtttgtccttgctcctgagagtctgaagaagaagtagaggaacctgaagaaagacagcaaacacctgaggtggtacctgatgattctggaactttctatgatcaggcagttgtcag

SEQ ID NO: 288200 - DNA, 535 bp, Artificial Sequence
  derived and/or modified sequence
acaaagggagcctcgccacacgcccgcggccgcctcgcagcgcccgccaagaagcgcctggcggaagggcgcactctcaggccttccaccggcgaccttccggcgggagcctgcgggcggcgcaggaacgaccctccttcctctgccccgcagcagtgctgagtaatggtttggacatatttgactcttttccccccaggttgaattgaccaaagcaatggtgatggagaagcctagtcccctgctggtcgggcgggaatttgtgagacagtattacacactgctgaaccaggccccagacatgctgcatagattttatggaaagaactcttcttatgtccatgggggattggattcaaatggaaagccagcagatgcagtctacggacagaaagaaatccacaggaaagtgatgtcacaaaacttcaccaactgccacaccaagattcgccatgttgatgctcatgccacgctaaatgatggtgtggtagtccaggtgatggggcttctctctaacaacaaccaggctttgagg

SEQ ID NO: 288201 - DNA, 1763 bp, Artificial Sequence
  derived and/or modified sequence
ttatatagaccggcggcggagcacgcgtgtgtgcggacgcagttgcgtgaggggtttgtactatcctcggtgctgtggtgcagagctagttcctctccagctcagccgcgtaggtttggacatatttgactcttttccccccaggttgaattgaccaaagcaatggtgatggagaagcctagtcccctgctggtcgggcgggaatttgtgagacagtattacacactgctgaaccaggccccagacatgctgcatagattttatggaaagaactcttcttatgtccatgggggattggattcaaatggaaagccagcagatgcagtctacggacagaaagaaatccacaggaaagtgatgtcacaaaacttcaccaactgccacaccaagattcgccatgttgatgctcatgccacgctaaatgatggtgtggtagtccaggtgatggggcttctctctaacaacaaccaggctttgaggagattcatgcaaacgtttgtccttgctcctgaggttcatcttgcactgttcctggcccagtccctattcttgaatcagctgttccttcaaggaggcctggttctttttagttatacttatgaaaggacgacaagtttatgttgaatgattgcatttgtgttttcttccggattggtctagactgaacaagagtctgaagaagaagtagaggaacctgaagaaagacagcaaacacctgaggtggtacctgatgattctggaactttctatgatcaggcagttgtcagtaatgacatggaagaacatttagaggagcctgttgctgaaccagagcctgatcctgaaccagaaccagaacaagaacctgtatctgaaatccaagaggaaaagcctgagccagtattagaagaaactgcccctgaggatgctcagaagagttcttctccagcacctgcagacatagctcagacagtacaggaagacttgaggacattttcttgggcatctgtgaccagtaagaatcttccacccagtggagctgttccagttactgggataccacctcatgttgttaaagtaccagcttcacagccccgtccagagtctaagcctgaatctcagattccaccacaaagacctcagcgggatcaaagagtgcgagaacaacgaataaatattcctccccaaaggggacccagaccaatccgtgaggctggtgagcaaggtgacattgaaccccgaagaatggtgagacaccctgacagtcaccaactcttcattggcaacctgcctcatgaagtggacaaatcagagcttaaagatttctttcaaagttatggaaacgtggtggagttgcgcattaacagtggtgggaaattacccaattttggttttgttgtgtttgatgattctgagcctgttcagaaagtccttagcaacaggcccatcatgttcagaggtgaggtccgtctgaatgtcgaagagaagaagactcgagctgccagggaaggcgaccgacgagataatcgccttcggggacctggaggccctcgaggtgggctgggtggtggaatgagaggccctccccgtggaggcatggtgcagaaaccaggatttggagtgggaagggggcttgcgccacggcagtgaatcttcatggatcttcatgcagccatacaaaccctggttccaacagaatggtgaattttcgacagcctttggtatcttggagtatgaccccagtctgttataaactgcttaagtttgtataattttactttttt

SEQ ID NO: 288202 - DNA, 927 bp, Artificial Sequence
  derived and/or modified sequence
atggtgatggagaagcccagccccctgctggtgggccgggagtttgtgcggcagtactacaccctgctgaaccaggccccagacatgctgcaccgcttctacggcaagaacagcagctatgtgcacggcggcctggacagcaatggcaagccagcagatgctgtgtatggccagaaggaggtggaggagcctgaggagcggcagcagaccccagaggtggtgcctgatgacagcggcaccttctatgaccaggccgtggtgtccaatgacatggaggagcacctggaggagcctgtggccgagcctgagccagaccctgagcctgagcctgagcaggagcctgtgtctgagatccaggaggagaagccacccaggcctgagagcaagccagagagccagatccccccccagaggccccagagggaccagagggtgcgggagcagaggatcaacatccccccccagaggggcccccggcccatccgggaggccggggagcagggcgacatcgagcccaggaggatggtgcgccacccagacagccaccagctgttcatcggcaacctgccccatgaggtggacaagtctgagctgaaggacttcttccagagctatggaaatgtggtggagctgcgcatcaacagcggcggcaagctgcccaactttggatttgtggtgtttgatgacagcgagcctgtgcagaaggtgctgagcaaccggcccatcatgttccggggggaggtgcggctgaatgtggaggagaagaagaccagggctgcccgggagggggacagaagagacaaccggctgcggggccctgggggcccccggggcggcctgggcggcggcatgaggggccccccccggggcggcatggtgcagaagccaggcttcggcgtgggccggggcctggccccccggcagtag

SEQ ID NO: 288203 - DNA, 1401 bp, Artificial Sequence
  derived and/or modified sequence
atggtgatggagaagcccagccccctgctggtgggccgggagtttgtgcggcagtactacaccctgctgaaccaggccccagacatgctgcaccgcttctacggcaagaacagcagctatgtgcacggcggcctggacagcaatggcaagccagcagatgctgtgtatggccagaaggagatccacaggaaggtgatgagccagaacttcaccaactgccacaccaagatcagacatgtggatgcccacgccaccctgaatgatggagtggtggtgcaggtgatgggcctgctgagcaacaacaaccaggccctgcggcgcttcatgcagacctttgtgctggcccctgagggctctgtggccaacaagttctacgtgcacaatgacatcttccgctaccaggatgaggtgtttggaggctttgtgacagagccccaggaggagagcgaggaggaggtggaggagcctgaggagcggcagcagaccccagaggtggtgcctgatgacagcggcaccttctatgaccaggccgtggtgtccaatgacatggaggagcacctggaggagcctgtggccgagcctgagccagaccctgagcctgagcctgagcaggagcctgtgtctgagatccaggaggagaagccagagcctgtgctggaggagacagccccagaagatgcccagaagagcagcagccctgccccagctgacatcgcccagacagtgcaggaggacctgcggaccttctcctgggcctctgtgaccagcaagaacctgccccccagcggggctgtgcctgtgacaggcatcccccctcatgtggtgaaggtgcctgccagccagcccaggcctgagagcaagccagagagccagatccccccccagaggccccagagggaccagagggtgcgggagcagaggatcaacatccccccccagaggggcccccggcccatccgggaggccggggagcagggcgacatcgagcccaggaggatggtgcgccacccagacagccaccagctgttcatcggcaacctgccccatgaggtggacaagtctgagctgaaggacttcttccagagctatggaaatgtggtggagctgcgcatcaacagcggcggcaagctgcccaactttggatttgtggtgtttgatgacagcgagcctgtgcagaaggtgctgagcaaccggcccatcatgttccggggggaggtgcggctgaatgtggaggagaagaagaccagggctgcccgggagggggacagaagagacaaccggctgcggggccctgggggcccccggggcggcctgggcggcggcatgaggggccccccccggggcggcatggtgcagaagccaggcttcggcgtgggccggggcctggccccccggcagtag

SEQ ID NO: 288204 - DNA, 318 bp, Artificial Sequence
  derived and/or modified sequence
atggtgatggagaagcccagccccctgctggtgggccgggagtttgtgcggcagtactacaccctgctgaaccaggccccagacatgctgcaccgcttctacggcaagaacagcagctatgtgcacggcggcctggacagcaatggcaagccagcagatgctgtgtatggccagaaggagatccacaggaaggtgatgagccagaacttcaccaactgccacaccaagatcagacatgtggatgcccacgccaccctgaatgatggagtggtggtgcaggtgatgggcctgctgagcaacaacaaccaggccctgtag

SEQ ID NO: 288205 - DNA, 369 bp, Artificial Sequence
  derived and/or modified sequence
atggtgatggagaagcccagccccctgctggtgggccgggagtttgtgcggcagtactacaccctgctgaaccaggccccagacatgctgcaccgcttctacggcaagaacagcagctatgtgcacggcggcctggacagcaatggcaagccagcagatgctgtgtatggccagaaggagatccacaggaaggtgatgagccagaacttcaccaactgccacaccaagatcagacatgtggatgcccacgccaccctgaatgatggagtggtggtgcaggtgatgggcctgctgagcaacaacaaccaggccctgcggcgcttcatgcagacctttgtgctggcccctgagagcctgaagaagaagtag

SEQ ID NO: 288206 - DNA, 354 bp, Artificial Sequence
  derived and/or modified sequence
atggtgatggagaagcccagccccctgctggtgggccgggagtttgtgcggcagtactacaccctgctgaaccaggccccagacatgctgcaccgcttctacggcaagaacagcagctatgtgcacggcggcctggacagcaatggcaagccagcagatgctgtgtatggccagaaggagatccacaggaaggtgatgagccagaacttcaccaactgccacaccaagatcagacatgtggatgcccacgccaccctgaatgatggagtggtggtgcaggtgatgggcctgctgagcaacaacaaccaggccctgcggcgcttcatgcagacctttgtgctggcccctgagtag

SEQ ID NO: 288207 - DNA, 321 bp, Artificial Sequence
  derived and/or modified sequence
atggtgatggagaagcccagccccctgctggtgggccgggagtttgtgcggcagtactacaccctgctgaaccaggccccagacatgctgcaccgcttctacggcaagaacagcagctatgtgcacggcggcctggacagcaatggcaagccagcagatgctgtgtatggccagaaggagatccacaggaaggtgatgagccagaacttcaccaactgccacaccaagatcagacatgtggatgcccacgccaccctgaatgatggagtggtggtgcaggtgatgggcctgctgagcaacaacaaccaggccctgaggtag

SEQ ID NO: 288208 - DNA, 855 bp, Artificial Sequence
  derived and/or modified sequence
atggaggagcacctggaggagcctgtggccgagcctgagccagaccctgagcctgagcctgagcaggagcctgtgtctgagatccaggaggagaagccagagcctgtgctggaggagacagccccagaagatgcccagaagagcagcagccctgccccagctgacatcgcccagacagtgcaggaggacctgcggaccttctcctgggcctctgtgaccagcaagaacctgccccccagcggggctgtgcctgtgacaggcatcccccctcatgtggtgaaggtgcctgccagccagcccaggcctgagagcaagccagagagccagatccccccccagaggccccagagggaccagagggtgcgggagcagaggatcaacatccccccccagaggggcccccggcccatccgggaggccggggagcagggcgacatcgagcccaggaggatggtgcgccacccagacagccaccagctgttcatcggcaacctgccccatgaggtggacaagtctgagctgaaggacttcttccagagctatggaaatgtggtggagctgcgcatcaacagcggcggcaagctgcccaactttggatttgtggtgtttgatgacagcgagcctgtgcagaaggtgctgagcaaccggcccatcatgttccggggggaggtgcggctgaatgtggaggagaagaagaccagggctgcccgggagggggacagaagagacaaccggctgcggggccctgggggcccccggggcggcctgggcggcggcatgaggggccccccccggggcggcatggtgcagaagccaggcttcggcgtgggccggggcctggccccccggcagtag

SEQ ID NO: 288209 - DNA, 927 bp, Artificial Sequence
  derived and/or modified sequence
atggtgatggagaagcccagccccctgctggtgggccgggagttcgtccgacaatactacacactgctcaaccaagcccccgacatgctgcaccgattctatggaaagaattcatcttacgttcatgggggactggacagtaatggcaagcctgcggacgcggtatatggtcagaaagaggtggaggaacctgaggaaaggcagcagacacctgaggtcgtgccggacgattccggcaccttttacgatcaagccgttgtttctaacgacatggaggagcaccttgaggaaccagtcgcagagccagaaccagaccctgaaccggagccggagcaggaaccagtcagcgagattcaagaggaaaagccccccagacccgaatccaaacccgagtcccagatacctccacagcgaccccagcgggaccaaagggtgcgcgaacagagaatcaatatccccccacaacggggccccagacctataagggaggcaggggaacaaggagatattgagccccggcgaatggtcaggcacccagactctcatcagttgtttattgggaacctgccgcatgaggtggataaatccgaactgaaggacttctttcaatcttacggcaacgtggtggaactccgcattaattccggtggcaaactgccgaactttggcttcgttgtttttgacgactccgaaccagtgcagaaagtactcagcaatcgaccaattatgttccggggtgaggttcgcttgaacgttgaggagaagaaaaccagagccgcacgcgagggcgacaggcgtgataaccgactgaggggacccggaggaccacggggtggactcggagggggcatgagggggccaccacgagggggcatggtacagaagccagggtttggcgttggaagaggactcgcccctcgtcagtag

SEQ ID NO: 288210 - DNA, 1401 bp, Artificial Sequence
  derived and/or modified sequence
atggtgatggagaagcccagccccctgctggtgggccgggagttcgtgcgtcaatactatactctgctgaatcaggctccagacatgctgcatagattttatggcaagaactcctcttacgtgcacggaggactggattctaatggcaagccggcagatgcagtgtacggccagaaagaaatacacaggaaggtaatgtcccagaattttactaactgccataccaagattcgacatgtagatgctcatgctacactgaacgatggggtggtagtacaagtcatgggcctgctatcaaacaacaatcaggccctgagaagattcatgcagacatttgtacttgcacctgaaggttccgtggcgaataaattttatgttcacaatgacatctttaggtatcaggatgaagtgttcgggggcttcgtgacagagccccaagaggaaagtgaggaagaagtcgaagagcccgaagagagacaacagaccccagaggtggtacctgatgattcaggaacattctacgatcaagccgtggtgtctaacgatatggaggagcacctggaagagccagtggccgagccggaaccagaccccgagcctgagccggagcaggaacctgtatctgaaatacaagaagaaaaacccgagccagtgctggaagaaaccgcaccagaagacgctcagaagtcaagcagtcccgcgccagccgatattgctcagacagtgcaggaggatctgcgcactttttcttgggcgtctgtgacctcaaagaacctgcctccatccggcgcagtgcctgtaaccggcattcctcctcatgtggtcaaagtgcctgcttcacagccacggcccgaatcgaaaccggagtcccagattccaccacagcgtccgcagagagaccagcgggtgagagaacagagaatcaatattccaccccaacgtgggccgcgacccattcgggaggccggggagcagggcgacatagagccacggcgcatggtgcgccaccccgactcccaccagctgttcatcggtaatctgcctcacgaggtggataagtcggaattgaaggatttcttccagtcctatggaaatgtggtggagctccgcatcaacagtggaggaaaacttcctaatttcggtttcgttgtgttcgatgactcagaaccagtgcagaaggtgctatcaaatagacctatcatgttccgcggagaagtgcgcctgaatgtggaggaaaaaaagacaagggcagcccgggagggtgaccgtcgtgacaataggctccgtggcccaggcggtccccgcgggggtttgggagggggaatgcggggccccccgagaggaggtatggtgcagaaacctggtttcggggtgggacggggcttggctccaaggcaatag

SEQ ID NO: 288211 - DNA, 1401 bp, Artificial Sequence
  derived and/or modified sequence
atggtgatggagaagcccagccccctgctggtgggccgggagttcgtgcgccagtactacacactgctgaaccaggctccggacatgctgcatcgtttctatggtaagaatagtagctatgttcacggggggctggactccaacggcaagccagcagatgcagtttacggccagaaagaaattcaccgaaaggtcatgagtcaaaattttacgaattgtcatactaaaatcagacatgtggacgcccacgcgactcttaacgacggcgtggtcgttcaggtcatgggactgctctcgaacaacaaccaggctctgcgtagatttatgcagacctttgtgctcgcgcctgaaggttccgtggctaacaagttctacgtccataatgatatctttcgatatcaagatgaagtgttcggcgggtttgtcaccgagcctcaggaagagagtgaggaggaagtcgaagagccagaggaacggcagcaaacccccgaggtagtacccgacgacagcgggacattctatgatcaggcggtggtcagcaacgacatggaggagcacctcgaagaacccgtggctgaacccgagccagacccggagccggaaccggagcaggaacccgttagcgagatccaggaagagaaacccgagcctgtactggaggaaactgcacctgaagacgcccagaaaagctcgagcccagccccggcggacattgctcaaaccgtacaagaagacctaaggactttttcttgggctagcgtgaccagcaagaacctgcctcccagcggggcggtccccgtgaccggcattcccccccacgttgtgaaggtcccagcatcgcagcctcggcccgagagcaagcccgagtcacagattccccctcaacgtccccaaagggatcagcgcgtgagggaacagcggattaacatccctcctcagcgtggccctcgtcctattagagaggcgggagagcagggcgacatcgagccaagaaggatggttaggcatcctgacagccaccagctgtttatcggcaatctgccgcacgaggtagataagagcgaacttaaggatttcttccagtcttatggtaatgtcgtggagctacgcatcaactcgggcggcaaattgcctaattttgggtttgtggtcttcgatgattctgagcctgtgcagaaggtgctgtctaacaggccgatcatgtttcgaggagaggtccgactgaacgtggaggaaaagaaaacccgcgcagctcgcgagggagacagaagagataataggctacgtgggcctggggggccacggggcggactcggcggtgggatgcgagggccaccccggggcggaatggtccagaaacccggcttcggggttgggaggggactagctccacggcagtag

SEQ ID NO: 288212 - DNA, 318 bp, Artificial Sequence
  derived and/or modified sequence
atggtgatggagaagcccagccccctgctggtgggccgggagttcgttagacagtattatacattgctcaaccaggcacctgacatgctgcacagattttacgggaaaaattcatcctatgtacatgggggtctggacagtaatgggaaaccagctgatgcagtgtatggccagaaagagattcataggaaggtgatgtcccagaattttacaaattgccacacaaagattcgacacgttgatgcacatgccaccctaaacgacggtgtggtggtccaggttatggggctcctttccaacaataaccaggctctctag

SEQ ID NO: 288213 - DNA, 369 bp, Artificial Sequence
  derived and/or modified sequence
atggtgatggagaagcccagccccctgctggtgggccgggagttcgtcagacagtattatactttactgaatcaagcccccgatatgctgcaccggttttacgggaagaatagtagttacgtgcacgggggcctagactcgaacggcaagccagcagatgctgtttacgggcagaaggaaattcacaggaaagtgatgtcccaaaatttcactaattgtcatacgaagatccgacacgtggatgcccacgcaactctgaatgatggagtggtggtccaggtgatgggattgctgtctaataataatcaggcgcttagacgattcatgcaaacttttgttcttgcccctgagtcccttaagaaaaaatag

SEQ ID NO: 288214 - DNA, 354 bp, Artificial Sequence
  derived and/or modified sequence
atggtgatggagaagcccagccccctgctggtgggccgggagttcgtgcggcagtattataccttgcttaatcaggccccggacatgctccaccggttctacggaaagaatagttcttacgtgcacggcggtctggatagtaatggaaagccggcagatgccgtctacggacaaaaagaaatccacaggaaggtgatgtcgcaaaattttaccaattgtcatacaaagatcagacacgtggacgcacacgccaccctgaatgacggcgttgtggttcaagtgatggggcttctgagcaacaacaaccaggctctgagacgattcatgcaaacttttgtgcttgctcccgagtag

SEQ ID NO: 288215 - DNA, 369 bp, Artificial Sequence
  derived and/or modified sequence
atggtgatggagaagcccagccccctgctggtgggccgggagttcgtcaggcaatattataccctcctgaaccaagctcctgacatgctacaccgcttctatggaaaaaatagctcctatgtgcatggaggcctcgactccaatggcaagcctgccgatgcggtgtacgggcagaaagaaattcacagaaaagtaatgtcccaaaactttaccaactgtcacaccaaaatacggcatgtggacgcccacgccacattgaatgacggcgtggtggtgcaggttatgggcctgctctccaacaacaatcaggcactgaggcgcttcatgcagaccttcgtcctcgcacctgaaagtctgaaaaaaaagtag

SEQ ID NO: 288216 - DNA, 321 bp, Artificial Sequence
  derived and/or modified sequence
atggtgatggagaagcccagccccctgctggtgggccgggagttcgtaaggcagtactacaccttactgaaccaggcacccgacatgttgcatcggttttacggtaaaaatagcagttatgttcatggtggcctcgactccaacggcaaacctgctgatgctgtgtatggccagaaggagatccaccggaaggtgatgagccagaactttacgaactgccacactaagatcaggcatgtggatgcccacgccactctcaacgatggggtggtcgtgcaggtgatgggtctgctgtcaaacaacaaccaagcacttcgatag

SEQ ID NO: 288217 - DNA, 855 bp, Artificial Sequence
  derived and/or modified sequence
atggaggagcacctggaggagcccgtggccgagcccgagcccgacccagagccagaaccagagcaagaaccggtcagcgagattcaggaagagaagccagagcctgtgcttgaagaaacagcgccagaggacgcccagaagtcctcctccccggcgcccgctgatatcgcccagacggtgcaggaggacctgaggacgtttagttgggcctccgttacatccaagaaccttccacctagcggagcagtgcctgttaccgggattcctccgcacgtggtgaaggttcccgccagccagccacgtcctgagtctaaaccagagagccagatcccacctcagcgcccccagcgagaccagcgggtcagagagcaaagaattaatattcccccccaaagaggcccccggcccatccgtgaagccggcgaacagggcgacattgagccaagacgaatggtcaggcaccccgactcacatcagcttttcatcggcaatctgcctcacgaagtcgataaatctgagcttaaagacttctttcaatcttacggtaatgttgtggaattaagaattaacagtggggggaagctcccgaacttcggatttgtggtgtttgacgattccgagccggttcagaaggtgctgtctaaccgccccataatgttcagaggtgaagtccggctgaatgtagaagaaaagaagaccagggctgcaagagagggagaccgacgggacaacagactgcgggggccgggcggcccacgaggtgggctgggcggcggcatgcgtggccccccgagaggcggtatggtccagaagccgggctttggcgtgggcaggggacttgcccctcgtcagtag

SEQ ID NO: 288218 - DNA, 927 bp, Artificial Sequence
  derived and/or modified sequence
atggttatggaaaagcccagcccacttctggttggccgagagttcgttcggcagtactacacacttctgaatcaggcccctgatatgctgcatcgcttttacgggaagaatagttcctatgtgcatggaggactggatagcaacggaaaacccgctgacgctgtctatggccagaaagaggttgaagaacccgaggagaggcaacagacccctgaggtagtaccagatgactccggaacattctacgaccaggctgtagtgagcaatgacatggaagagcatctcgaggagccagtggctgaaccggagcctgaccctgagcccgagcccgagcaggagccagtatctgaaatccaggaggaaaaaccgccacggccagaatcaaagcctgaaagccagattccgccacaacggcctcagcgcgatcagcgcgtgcgcgaacagcggatcaatattccccctcagcggggaccacggcctattcgagaagcgggagagcagggggatatcgaacctcggaggatggttcgtcatccagattcacatcagctgttcattggtaatctcccgcacgaagtggataagtccgagctgaaagacttcttccagagttacggtaatgtggttgagcttagaatcaactcagggggaaagctgcctaattttgggttcgtggtgttcgacgattcggagcccgtgcagaaggtgctttcgaatcgcccaattatgttccgtggtgaggtgaggttgaacgttgaggagaagaaaacacgtgccgcaagagaaggcgataggcgggataatcgcctccgcggtcctggcggtcctagaggcggtcttggcggtgggatgcgaggccctcccagaggaggcatggtgcagaaaccgggtttcggggtgggacggggactggcgccacggcagtag

SEQ ID NO: 288219 - DNA, 1401 bp, Artificial Sequence
  derived and/or modified sequence
atggttatggagaaaccgtctcctttgctggtcggacgagagttcgtccgtcagtactacaccctgttaaaccaggccccagatatgctgcatagattctatgggaagaactctagctatgttcacgggggtttggatagcaacggaaaacctgccgacgcagtctacggacaaaaagaaatacacaggaaggtgatgtcccagaacttcactaactgtcacacaaaaataagacacgtggatgctcacgccaccttaaacgacggcgtggtggtgcaggtgatgggcttgctgagcaacaacaaccaggcactgagaaggttcatgcagacctttgtgctggcccctgaaggttctgtggctaacaagttttatgtgcataacgatatcttcagataccaagacgaagtcttcggcggatttgtgactgagccccaagaggagtccgaggaggaggtggaagaacccgaagaacgccagcagaccccggaggtagtccccgacgacagtggaaccttttacgatcaggcagtggtgagtaacgacatggaagaacacctggaggaacccgttgctgagcctgagcctgacccggagcctgaaccagaacaggagccggtctctgagatacaggaagaaaagcccgaacccgttttggaggaaaccgcaccagaggacgcccaaaaatccagtagtccggcacccgctgatatcgcacagacggttcaggaagatcttcggaccttctcgtgggccagtgtgacgagtaagaacttacctccaagcggtgctgttccagtgacgggcatcccacctcacgttgtgaaagtccctgcctcgcaaccaaggccagagtcaaagccagagtcccagattccccctcagcgcccacaaagagatcagagggtccgggagcaaagaatcaacattccccctcagcgaggcccaaggccaattagagaagcaggggagcagggcgatatcgagccgagacgcatggtgcgccatccagatagccaccaattgttcataggaaatctgcctcatgaggtcgacaagagcgaactgaaagacttcttccagagttacggcaacgtggtggagctacgcatcaacagcgggggaaaactgccaaactttggcttcgtggtctttgacgacagcgagccagtacagaaggtgcttagtaaccgtcccattatgttccggggtgaggtcaggcttaacgtggaggaaaaaaagacaagggcagcacgtgaaggcgatcggcgagataatcggctaagaggacccggtggacccagagggggacttggaggcggaatgcgaggccctcctcgaggcggtatggtgcagaaacctggctttggagtcgggagaggcttggcgcctcgccaatag

SEQ ID NO: 288220 - DNA, 1401 bp, Artificial Sequence
  derived and/or modified sequence
atggtgatggaaaagccaagcccattactagtcggcagggagtttgtcaggcagtactacaccctgctcaatcaggcccctgacatgctccacagattttacggtaagaattcctcttatgtgcatggtggtctcgactcaaatggtaaaccagcggatgccgtttacggccagaaggagattcaccgaaaggtgatgagccaaaacttcacgaattgccataccaaaatccggcatgttgatgcacatgcaacactgaatgatggcgtcgttgtgcaggtcatgggcctgctatccaataacaaccaagccctccgccgtttcatgcaaacctttgtactggcacctgaagggtccgttgccaacaaattttatgtgcacaatgacattttcagataccaggatgaggtctttggtgggtttgtgactgaaccacaggaggaatcggaagaagaggtcgaagagcccgaagagcgccagcaaactcctgaggttgtgcccgatgacagtggaacgttttacgaccaagccgtggtctcaaatgatatggaggaacacctcgaagagcccgtcgccgaacctgaaccagacccggagccagagcctgagcaggagcctgtgagcgagatccaagaagagaaaccagagcccgtgttggaagagacggcgccagaagacgcccagaagtcctcctccccagcccctgccgacatcgcccaaaccgtgcaggaagacctacggacttttagctgggcatcggtaacctcaaagaaccttcccccttcaggcgctgttcccgtgaccggaatcccaccacacgtggttaaagtccctgcttcccaacccaggcctgagtctaaaccagaatctcagatccccccacagcgtccccagcgtgatcagcgcgtgcgcgagcagcgaattaatataccaccacagagggggcctcgcccaatcagagaagctggggagcaaggcgacatcgaacctaggcggatggtgaggcaccccgattctcaccagttatttatcggtaacctgccacatgaagtggataaatcggagctcaaggacttctttcagtcatacggtaatgtggtcgagctccggattaacagcggcggaaagcttcctaattttgggtttgtggtttttgatgattctgaacctgtccagaaagtgctatctaatcgccctatcatgttcaggggggaagtacggctgaatgttgaagagaaaaaaacccgcgctgctcgggagggggatcgtcgggacaaccggcttagagggccagggggtccaagggggggtctggggggtgggatgaggggcccaccacgagggggaatggtgcagaagcctgggtttggagtgggaagggggcttgccccacggcaatag

SEQ ID NO: 288221 - DNA, 318 bp, Artificial Sequence
  derived and/or modified sequence
atggttatggagaagccatccccacttctggtgggcagggaattcgtgaggcaatattacacgctgctcaaccaggcccctgatatgctgcatcggttttatggaaagaacagtagttacgtgcatggtgggttagactccaacggcaagccagcagatgctgtctacggccagaaggagattcataggaaggtgatgtcccagaactttaccaattgtcacaccaagatccgacatgttgacgcgcacgccacgctgaatgacggtgtggtggttcaagtgatggggcttctcagcaataacaatcaagcgctctag

SEQ ID NO: 288222 - DNA, 369 bp, Artificial Sequence
  derived and/or modified sequence
atggtcatggaaaaaccctctcccctcctggttggcagagagttcgtcagacagtactatacattgcttaaccaggcacctgatatgctccaccgattttatggcaaaaattcaagctacgtgcacggcggtctggatagcaacgggaaaccagctgatgccgtttacggccagaaagagattcatcgaaaagtgatgtcccagaatttcacaaattgtcatacaaagatccggcacgtggatgctcatgcaaccctgaacgatggcgtggtcgtccaagtaatggggctgcttagtaataataatcaagctttgcggagattcatgcagactttcgttctggccccagaatcattgaaaaagaaatag

SEQ ID NO: 288223 - DNA, 354 bp, Artificial Sequence
  derived and/or modified sequence
atggttatggagaaaccttcacccttactagtcggccgtgagttcgtgagacagtattatacgctacttaaccaagcaccagacatgttacacagattctacggcaagaacagcagctacgttcatggcggactggatagcaatgggaagccagccgatgccgtctacggacaaaaagagatccaccggaaagtaatgagccagaactttactaactgccacactaagattcgacacgtggacgcccacgccaccctaaatgacggggtagtggtgcaggttatgggactgctgtctaacaacaaccaggccctgagacgctttatgcagacgtttgtcctggctccagagtag

SEQ ID NO: 288224 - DNA, 369 bp, Artificial Sequence
  derived and/or modified sequence
atggtaatggagaagcccagtcccctcctggttggcagggaatttgttcgccagtattacacactgcttaaccaggccccagatatgcttcacaggttctacgggaaaaattcgtcctacgttcatggaggcttggatagcaacgggaagcccgctgatgcggtatacggacagaaggagattcatcggaaagtgatgtcacagaacttcacaaactgtcacaccaagatcagacatgtcgatgcccatgctacactgaacgatggtgtagtcgtacaggtgatggggttattgtctaataataaccaagccctgcggcgattcatgcagactttcgtcctggcccctgagtcactgaagaaaaagtag

SEQ ID NO: 288225 - DNA, 321 bp, Artificial Sequence
  derived and/or modified sequence
atggttatggaaaaaccttctcccctgctggtggggagagaattcgtccgtcagtactacacccttttaaatcaggcgccagatatgctgcatcgattctatggcaagaacagcagctatgttcacggtggcttggacagtaacggaaagccggctgatgcggtttatggtcaaaaagagatccacagaaaagtgatgtcacagaatttcacaaattgtcacaccaaaatcaggcatgtggacgcgcatgccactctcaatgatggagtggtggtacaggtgatgggcttattgtcaaacaataatcaggcgctccgttag

SEQ ID NO: 288226 - DNA, 855 bp, Artificial Sequence
  derived and/or modified sequence
atggaggaacacctcgaagagcctgtggcggagcctgaacctgatccagagccggagccagagcaggagccagtgagtgagatccaagaagagaagcctgagcctgtgctggaggaaacagcccctgaggacgcccagaagtcttcttcaccagctccggctgatatcgcccagaccgtgcaggaagatctgcgtacgttctcctgggcgtcagtcacgtccaagaacctccctccatcaggagccgtgccagtcaccggcatacctcctcatgtggtcaaggtcccggcatcccagccaagaccagaaagcaagccagagtctcagatccctccacaacggcctcagagagaccaaagagtacgggaacagcggattaacattcctcctcagcgcggaccacgtccaatcagggaggcgggagaacagggagatattgaaccaaggaggatggtccgccaccctgacagtcaccagctattcattggcaatcttccccacgaggtggacaaatctgagctcaaggacttttttcagtcttatggtaacgtggtggagctgaggattaatagtgggggaaaactgcctaactttggcttcgttgtttttgatgactccgagccagttcagaaagtactgtctaatcggccaattatgtttcgcggtgaggtcagactgaatgtcgaagagaagaaaacccgggctgccagggagggggatcggcgagataaccgacttagaggaccaggtggccctcgcggtggtctaggaggcggaatgagaggacctcccagggggggtatggtacagaagcccggtttcggcgtcgggaggggactggcacccagacaatag

SEQ ID NO: 288227 - DNA, 927 bp, Artificial Sequence
  derived and/or modified sequence
atggtgatggagaagcccagccccctgctggtgggcagagagttcgtgagacagtactacaccctgctgaaccaggcccccgacatgctgcacagattctacggcaagaacagcagctacgtgcacggcggcctggacagcaacggcaagcccgccgacgccgtgtacggccagaaggaggtggaggagcccgaggagagacagcagacccccgaggtggtgcccgacgacagcggcaccttctacgaccaggccgtggtgagcaacgacatggaggagcacctggaggagcccgtggccgagcccgagcccgaccccgagcccgagcccgagcaggagcccgtgagcgagatccaggaggagaagccccccagacccgagagcaagcccgagagccagatccccccccagagaccccagagagaccagagagtgagagagcagagaatcaacatccccccccagagaggccccagacccatcagagaggccggcgagcagggcgacatcgagcccagaagaatggtgagacaccccgacagccaccagctgttcatcggcaacctgccccacgaggtggacaagagcgagctgaaggacttcttccagagctacggcaacgtggtggagctgagaatcaacagcggcggcaagctgcccaacttcggcttcgtggtgttcgacgacagcgagcccgtgcagaaggtgctgagcaacagacccatcatgttcagaggcgaggtgagactgaacgtggaggagaagaagaccagagccgccagagagggcgacagaagagacaacagactgagaggccccggcggccccagaggcggcctgggcggcggcatgagaggcccccccagaggcggcatggtgcagaagcccggcttcggcgtgggcagaggcctggcccccagacagtag

SEQ ID NO: 288228 - DNA, 1401 bp, Artificial Sequence
  derived and/or modified sequence
atggtgatggagaagcccagccccctgctggtgggcagagagttcgtgagacagtactacaccctgctgaaccaggcccccgacatgctgcacagattctacggcaagaacagcagctacgtgcacggcggcctggacagcaacggcaagcccgccgacgccgtgtacggccagaaggagatccacagaaaggtgatgagccagaacttcaccaactgccacaccaagatcagacacgtggacgcccacgccaccctgaacgacggcgtggtggtgcaggtgatgggcctgctgagcaacaacaaccaggccctgagaagattcatgcagaccttcgtgctggcccccgagggcagcgtggccaacaagttctacgtgcacaacgacatcttcagataccaggacgaggtgttcggcggcttcgtgaccgagccccaggaggagagcgaggaggaggtggaggagcccgaggagagacagcagacccccgaggtggtgcccgacgacagcggcaccttctacgaccaggccgtggtgagcaacgacatggaggagcacctggaggagcccgtggccgagcccgagcccgaccccgagcccgagcccgagcaggagcccgtgagcgagatccaggaggagaagcccgagcccgtgctggaggagaccgcccccgaggacgcccagaagagcagcagccccgcccccgccgacatcgcccagaccgtgcaggaggacctgagaaccttcagctgggccagcgtgaccagcaagaacctgccccccagcggcgccgtgcccgtgaccggcatccccccccacgtggtgaaggtgcccgccagccagcccagacccgagagcaagcccgagagccagatccccccccagagaccccagagagaccagagagtgagagagcagagaatcaacatccccccccagagaggccccagacccatcagagaggccggcgagcagggcgacatcgagcccagaagaatggtgagacaccccgacagccaccagctgttcatcggcaacctgccccacgaggtggacaagagcgagctgaaggacttcttccagagctacggcaacgtggtggagctgagaatcaacagcggcggcaagctgcccaacttcggcttcgtggtgttcgacgacagcgagcccgtgcagaaggtgctgagcaacagacccatcatgttcagaggcgaggtgagactgaacgtggaggagaagaagaccagagccgccagagagggcgacagaagagacaacagactgagaggccccggcggccccagaggcggcctgggcggcggcatgagaggcccccccagaggcggcatggtgcagaagcccggcttcggcgtgggcagaggcctggcccccagacagtag

SEQ ID NO: 288229 - DNA, 318 bp, Artificial Sequence
  derived and/or modified sequence
atggtgatggagaagcccagccccctgctggtgggcagagagttcgtgagacagtactacaccctgctgaaccaggcccccgacatgctgcacagattctacggcaagaacagcagctacgtgcacggcggcctggacagcaacggcaagcccgccgacgccgtgtacggccagaaggagatccacagaaaggtgatgagccagaacttcaccaactgccacaccaagatcagacacgtggacgcccacgccaccctgaacgacggcgtggtggtgcaggtgatgggcctgctgagcaacaacaaccaggccctgtag

SEQ ID NO: 288230 - DNA, 369 bp, Artificial Sequence
  derived and/or modified sequence
atggtgatggagaagcccagccccctgctggtgggcagagagttcgtgagacagtactacaccctgctgaaccaggcccccgacatgctgcacagattctacggcaagaacagcagctacgtgcacggcggcctggacagcaacggcaagcccgccgacgccgtgtacggccagaaggagatccacagaaaggtgatgagccagaacttcaccaactgccacaccaagatcagacacgtggacgcccacgccaccctgaacgacggcgtggtggtgcaggtgatgggcctgctgagcaacaacaaccaggccctgagaagattcatgcagaccttcgtgctggcccccgagagcctgaagaagaagtag

SEQ ID NO: 288231 - DNA, 354 bp, Artificial Sequence
  derived and/or modified sequence
atggtgatggagaagcccagccccctgctggtgggcagagagttcgtgagacagtactacaccctgctgaaccaggcccccgacatgctgcacagattctacggcaagaacagcagctacgtgcacggcggcctggacagcaacggcaagcccgccgacgccgtgtacggccagaaggagatccacagaaaggtgatgagccagaacttcaccaactgccacaccaagatcagacacgtggacgcccacgccaccctgaacgacggcgtggtggtgcaggtgatgggcctgctgagcaacaacaaccaggccctgagaagattcatgcagaccttcgtgctggcccccgagtag

SEQ ID NO: 288232 - DNA, 321 bp, Artificial Sequence
  derived and/or modified sequence
atggtgatggagaagcccagccccctgctggtgggcagagagttcgtgagacagtactacaccctgctgaaccaggcccccgacatgctgcacagattctacggcaagaacagcagctacgtgcacggcggcctggacagcaacggcaagcccgccgacgccgtgtacggccagaaggagatccacagaaaggtgatgagccagaacttcaccaactgccacaccaagatcagacacgtggacgcccacgccaccctgaacgacggcgtggtggtgcaggtgatgggcctgctgagcaacaacaaccaggccctgagatag

SEQ ID NO: 288233 - DNA, 855 bp, Artificial Sequence
  derived and/or modified sequence
atggaggagcacctggaggagcccgtggccgagcccgagcccgaccccgagcccgagcccgagcaggagcccgtgagcgagatccaggaggagaagcccgagcccgtgctggaggagaccgcccccgaggacgcccagaagagcagcagccccgcccccgccgacatcgcccagaccgtgcaggaggacctgagaaccttcagctgggccagcgtgaccagcaagaacctgccccccagcggcgccgtgcccgtgaccggcatccccccccacgtggtgaaggtgcccgccagccagcccagacccgagagcaagcccgagagccagatccccccccagagaccccagagagaccagagagtgagagagcagagaatcaacatccccccccagagaggccccagacccatcagagaggccggcgagcagggcgacatcgagcccagaagaatggtgagacaccccgacagccaccagctgttcatcggcaacctgccccacgaggtggacaagagcgagctgaaggacttcttccagagctacggcaacgtggtggagctgagaatcaacagcggcggcaagctgcccaacttcggcttcgtggtgttcgacgacagcgagcccgtgcagaaggtgctgagcaacagacccatcatgttcagaggcgaggtgagactgaacgtggaggagaagaagaccagagccgccagagagggcgacagaagagacaacagactgagaggccccggcggccccagaggcggcctgggcggcggcatgagaggcccccccagaggcggcatggtgcagaagcccggcttcggcgtgggcagaggcctggcccccagacagtag

SEQ ID NO: 288234 - protein, 529 aa, Artificial Sequence
  derived and/or modified sequence
MLGELLEESQMEATRLRQKAEELVKDNELLPPPSPSLGSFDPLAELTGKDSNVTASPTAPACPSDKPAPVQKPPSSGTSSEFEVVTPEEQNSPESSSHANAMALGPLPREDGNLMLHLQRLETTLSVCAEEPDHGQLFTHLGRMALEFNRLASKVHKNEQRTSILQTLCEQLRKENEALKAKLDKGLEQRDQAAERLREENLELKKLLMSNGNKEGASGRPGSPKMEGTGKKAVAGQQQASVTAGKVPEVVALGAAEKKVKMLEQQRSELLEVNKQWDQHFRSMKQQYEQKITELRQKLADLQKQVTDLEAEREQKQRDFDRKLLLAKSKIEMEETDKEQLTAEAKELRQKVKYLQDQLSPLTRQREYQEKEIQRLNKALEEALSIQTPPSSPPTAFGSPEGAGALLRKQELVTQNELLKQQVKIFEEDFQRERSDRERMNEEKEELKKQVEKLQAQVTLSNAQLKAFKDEEKAREALRQQKRKAKPEYTWRLPCGGVRNPNQSSQVMDPPTARPTEPESPKNDREGPQ

SEQ ID NO: 288235 - protein, 572 aa, Artificial Sequence
  derived and/or modified sequence
MEGRGPYRIYDPGGSVPSGEASAAFERLVKENSRLKEKMQGIKMLGELLEESQMEATRLRQKAEELVKDNELLPPPSPSLGSFDPLAELTGKDSNVTASPTAPACPSDKPAPVQKPPSSGTSSEFEVVTPEEQNSPESSSHANAMALGPLPREDGNLMLHLQRLETTLSVCAEEPDHGQLFTHLGRMALEFNRLASKVHKNEQRTSILQTLCEQLRKENEALKAKLDKGLEQRDQAAERLREENLELKKLLMSNGNKEGASGRPGSPKMEGTGKKAVAGQQQASVTAGKVPEVVALGAAEKKVKMLEQQRSELLEVNKQWDQHFRSMKQQYEQKITELRQKLADLQKQVTDLEAEREQKQRDFDRKLLLAKSKIEMEETDKEQLTAEAKELRQKVKYLQDQLSPLTRQREYQEKEIQRLNKALEEALSIQTPPSSPPTAFGSPEGAGALLRKQELVTQNELLKQQVKIFEEDFQRERSDRERMNEEKEELKKQVEKLQAQVTLSNAQLKAFKDEEKAREALRQQKRKAKPEYTWRLPCGGVRNPNQSSQVMDPPTARPTEPESPKNDREGPQ

SEQ ID NO: 288236 - DNA, 1590 bp, Artificial Sequence
  derived and/or modified sequence
atgctgggcgagctgctggaggagagccagatggaggccaccagactgagacagaaggccgaggagctggtgaaggacaacgagctgctgcccccccccagccccagcctgggcagcttcgaccccctggccgagctgaccggcaaggacagcaacgtgaccgccagccccaccgcccccgcctgccccagcgacaagcccgcccccgtgcagaagccccccagcagcggcaccagcagcgagttcgaggtggtgacccccgaggagcagaacagccccgagagcagcagccacgccaacgccatggccctgggccccctgcccagagaggacggcaacctgatgctgcacctgcagagactggagaccaccctgagcgtgtgcgccgaggagcccgaccacggccagctgttcacccacctgggcagaatggccctggagttcaacagactggccagcaaggtgcacaagaacgagcagagaaccagcatcctgcagaccctgtgcgagcagctgagaaaggagaacgaggccctgaaggccaagctggacaagggcctggagcagagagaccaggccgccgagagactgagagaggagaacctggagctgaagaagctgctgatgagcaacggcaacaaggagggcgccagcggcagacccggcagccccaagatggagggcaccggcaagaaggccgtggccggccagcagcaggccagcgtgaccgccggcaaggtgcccgaggtggtggccctgggcgccgccgagaagaaggtgaagatgctggagcagcagagaagcgagctgctggaggtgaacaagcagtgggaccagcacttcagaagcatgaagcagcagtacgagcagaagatcaccgagctgagacagaagctggccgacctgcagaagcaggtgaccgacctggaggccgagagagagcagaagcagagagacttcgacagaaagctgctgctggccaagagcaagatcgagatggaggagaccgacaaggagcagctgaccgccgaggccaaggagctgagacagaaggtgaagtacctgcaggaccagctgagccccctgaccagacagagagagtaccaggagaaggagatccagagactgaacaaggccctggaggaggccctgagcatccagaccccccccagcagcccccccaccgccttcggcagccccgagggcgccggcgccctgctgagaaagcaggagctggtgacccagaacgagctgctgaagcagcaggtgaagatcttcgaggaggacttccagagagagagaagcgacagagagagaatgaacgaggagaaggaggagctgaagaagcaggtggagaagctgcaggcccaggtgaccctgagcaacgcccagctgaaggccttcaaggacgaggagaaggccagagaggccctgagacagcagaagagaaaggccaagcccgagtacacctggagactgccctgcggcggcgtgagaaaccccaaccagagcagccaggtgatggacccccccaccgccagacccaccgagcccgagagccccaagaacgacagagagggcccccagtag

SEQ ID NO: 288237 - DNA, 1719 bp, Artificial Sequence
  derived and/or modified sequence
atggagggcagaggcccctacagaatctacgaccccggcggcagcgtgcccagcggcgaggccagcgccgccttcgagagactggtgaaggagaacagcagactgaaggagaagatgcagggcatcaagatgctgggcgagctgctggaggagagccagatggaggccaccagactgagacagaaggccgaggagctggtgaaggacaacgagctgctgcccccccccagccccagcctgggcagcttcgaccccctggccgagctgaccggcaaggacagcaacgtgaccgccagccccaccgcccccgcctgccccagcgacaagcccgcccccgtgcagaagccccccagcagcggcaccagcagcgagttcgaggtggtgacccccgaggagcagaacagccccgagagcagcagccacgccaacgccatggccctgggccccctgcccagagaggacggcaacctgatgctgcacctgcagagactggagaccaccctgagcgtgtgcgccgaggagcccgaccacggccagctgttcacccacctgggcagaatggccctggagttcaacagactggccagcaaggtgcacaagaacgagcagagaaccagcatcctgcagaccctgtgcgagcagctgagaaaggagaacgaggccctgaaggccaagctggacaagggcctggagcagagagaccaggccgccgagagactgagagaggagaacctggagctgaagaagctgctgatgagcaacggcaacaaggagggcgccagcggcagacccggcagccccaagatggagggcaccggcaagaaggccgtggccggccagcagcaggccagcgtgaccgccggcaaggtgcccgaggtggtggccctgggcgccgccgagaagaaggtgaagatgctggagcagcagagaagcgagctgctggaggtgaacaagcagtgggaccagcacttcagaagcatgaagcagcagtacgagcagaagatcaccgagctgagacagaagctggccgacctgcagaagcaggtgaccgacctggaggccgagagagagcagaagcagagagacttcgacagaaagctgctgctggccaagagcaagatcgagatggaggagaccgacaaggagcagctgaccgccgaggccaaggagctgagacagaaggtgaagtacctgcaggaccagctgagccccctgaccagacagagagagtaccaggagaaggagatccagagactgaacaaggccctggaggaggccctgagcatccagaccccccccagcagcccccccaccgccttcggcagccccgagggcgccggcgccctgctgagaaagcaggagctggtgacccagaacgagctgctgaagcagcaggtgaagatcttcgaggaggacttccagagagagagaagcgacagagagagaatgaacgaggagaaggaggagctgaagaagcaggtggagaagctgcaggcccaggtgaccctgagcaacgcccagctgaaggccttcaaggacgaggagaaggccagagaggccctgagacagcagaagagaaaggccaagcccgagtacacctggagactgccctgcggcggcgtgagaaaccccaaccagagcagccaggtgatggacccccccaccgccagacccaccgagcccgagagccccaagaacgacagagagggcccccagtag

SEQ ID NO: 288238 - DNA, 1590 bp, Artificial Sequence
  derived and/or modified sequence
atgctgggtgagcttctggaggagagtcagatggaagcaacccgcttgagacaaaaagctgaagaattggtgaaagacaatgagctgttacccccgccaagtccttcactcggcagctttgacccgcttgccgagttgaccggcaaggatagtaacgtcacagcatcacctacagctccagcctgcccctcagacaaacctgccccagtgcagaagcccccctctagcggtactagctccgaattcgaggtcgtcactcccgaagagcagaactcacctgagtcgtcaagtcacgctaacgccatggccctggggcccttgcccagagaggacggaaatctcatgttacatctacagcggctggagacaacgctgtctgtgtgtgctgaagagcccgatcatggccaactgtttacccacctcgggaggatggcacttgaattcaaccggctcgcttcaaaagttcacaaaaatgagcagcgcacttctatactgcagacattatgtgagcaactgcggaaggaaaatgaggcactcaaagctaaactggataaggggctcgaacagagggatcaagctgcggagaggcttagggaggagaaccttgagttaaagaagttgctcatgagtaacggtaataaggagggggcttccgggaggccagggtcgcccaagatggaggggactggcaaaaaagcagtagccggtcagcagcaggcatcagtgaccgcgggaaaggtccccgaagtggtggctcttggggccgctgagaagaaggtgaagatgttggagcaacagaggagcgagctgctggaagttaacaagcaatgggaccagcacttccgcagcatgaagcaacagtatgaacagaagatcaccgagctcagacagaagctggccgacctacaaaaacaagtgactgatctggaggcggaaagggagcagaaacagcgtgatttcgatcgcaagctccttctagccaaaagtaagattgagatggaggagacagacaaagaacagctcacagcagaagcgaaagagctgcgacagaaggtgaaatacctccaggaccagttgtctccgctgacacgtcaaagagaatatcaggagaaggaaatacaacgcctcaataaagcgttagaggaagcactctccatacagacacccccaagctcccctcccaccgcctttggatctcccgaaggtgcaggggccctcctgaggaaacaagaactggtaacacagaatgaacttctcaagcaacaagtgaagattttcgaagaagactttcaaagggagagatctgaccgggaacgtatgaacgaagagaaagaagagctgaagaaacaagttgagaaactccaggctcaggtaacactgagcaatgcccagcttaaggctttcaaagatgaagagaaggcccgggaagcacttagacagcagaaaaggaaagcaaagcccgaatatacttggcgcctgccttgcgggggcgttcgcaacccaaaccagtcctcccaggtgatggaccctccgaccgcgaggcctaccgaaccggaatctcccaagaatgatcgggaaggaccacagtag

SEQ ID NO: 288239 - DNA, 1719 bp, Artificial Sequence
  derived and/or modified sequence
atggagggccgcggaccgtaccgcatttacgatccagggggatcagtcccatcaggtgaggcgtccgcagctttcgaacgactggtgaaggagaacagccgtttaaaagagaagatgcaggggatcaaaatgctgggcgagttactggaagaatcccagatggaggctactcgtctacgccagaaggccgaagaactcgtgaaagacaacgagttgttgccgcctccgtctccatcccttggctcttttgatcccctggcagaattgaccgggaaggacagcaacgtgaccgcatctcctactgccccagcgtgccctagtgacaagcccgctccggtgcagaaaccgccatcttctggaactagttctgaattcgaggtggtaactcctgaagaacaaaactcaccagagtcatctagccacgcaaatgcgatggcccttgggccactacctagggaggatgggaacctcatgctgcatttgcagcgcttggagactactctctccgtgtgtgccgaagagccagaccatggacaactattcacccatcttggccggatggccctggagtttaatcgcctggcttccaaagtgcacaagaatgaacagcgaacaagcatccttcagacattgtgcgagcagcttagaaaggagaatgaggcccttaaagccaagcttgataaagggttggagcagcgggaccaagcggcagagcggctgagggaggagaaccttgaactgaagaagttgctgatgtccaacgggaataaagaaggcgcatctggacgtccgggatccccaaagatggagggaacaggcaaaaaggcagttgccgggcagcagcaagcatccgttaccgccgggaaggttcctgaggtcgtcgccttaggggccgcggagaagaaagtcaagatgttggagcagcagcgtagtgagttgcttgaagtcaacaaacaatgggaccagcatttcagatccatgaaacagcaatatgaacagaagatcaccgagctgcgccagaagctagcagatctccagaagcaggttaccgacctggaagccgagagggaacagaagcagagagacttcgacagaaagcttctgctggctaagagcaagatagaaatggaggaaacagataaggagcagctcacggcagaagcgaaagaactccgccagaaggtgaaatacttgcaggaccagctgtccccactgactaggcagagggaataccaggagaaggagatccagaggttgaataaagctctggaagaggccctgagtatccagacacccccctccagcccgcctaccgccttcgggagtcccgagggcgccggcgctctgctgagaaaacaagagctggtcacccagaacgaattactcaaacagcaggtgaaaatcttcgaagaagacttccaaagagaaaggtcggatagggagcggatgaacgaggaaaaggaggagctaaaaaagcaggtcgagaagctccaggcgcaggtaaccctttccaacgctcagttgaaagcatttaaagacgaagaaaaggcgcgggaagcactcagacagcagaaaagaaaagcaaagccagagtacacctggaggctcccgtgtggtggcgtaagaaatccaaaccaatcaagccaggttatggatcctccaacagctcggccgaccgagccggaaagccccaagaatgatcgggaagggccgcagtag

SEQ ID NO: 288240 - DNA, 1590 bp, Artificial Sequence
  derived and/or modified sequence
atgctgggggagctgctggaggagagccagatggaggccacccggctgcggcagaaggccgaggagctggtgaaggacaatgagctgctgcccccacccagccccagcctgggcagctttgaccccctggccgagctgaccgggaaggacagcaatgtgacagccagccccacagccccagcctgccccagcgacaagccagcccctgtgcagaagccacccagcagcggcaccagcagcgagtttgaggtggtgaccccagaggagcagaacagccctgagagcagcagccacgccaatgccatggccctgggccccctgccccgggaggatggcaacctgatgctgcacctgcagaggctggagaccaccctgtctgtgtgtgccgaggagccagaccacggccagctgttcacccacctgggccgcatggccctggagttcaaccggctggccagcaaggtgcacaagaatgagcagaggaccagcatcctgcagaccctgtgtgagcagctgaggaaagaaaatgaggccctgaaggccaagctggacaagggcctggagcagagggaccaggccgctgagcggctgcgggaggagaacctggagctgaagaagctgctgatgagcaatggaaacaaggagggcgccagcggccggcccggcagccccaagatggagggcaccgggaagaaggctgtggccggccagcagcaggcctctgtgacagctgggaaggtgcctgaggtggtggccctgggcgctgctgagaagaaggtgaagatgctggagcagcagaggtctgagctgctggaggtgaacaagcagtgggaccagcacttccgctccatgaagcagcagtatgagcagaagatcacagagctgcggcagaagctggccgacctgcagaagcaggtgacagacctggaggccgagcgggagcagaagcagagggactttgacaggaagctgctgctggccaagagcaagattgagatggaggagacagacaaggagcagctgacagctgaggccaaggagctgcggcagaaggtgaagtacctgcaggaccagctgagccccctgacccggcagcgggagtaccaggagaaggagatccagaggctgaacaaggccctggaggaggccctgagcatccagaccccacccagcagccccccaacagccttcggcagccctgagggcgctggggccctgctgaggaagcaggagctggtgacccagaatgagctgctgaagcagcaggtgaagatctttgaggaggacttccagcgggagaggagtgaccgggagaggatgaatgaggagaaggaggagctgaagaagcaggtggagaagctgcaggcccaggtgaccctgagcaatgcccagctgaaggccttcaaggatgaggagaaggcccgggaggccctgcggcagcagaagaggaaggccaagccagagtacacctggaggctgccctgtggcggcgtgaggaaccccaaccagagcagccaggtgatggaccccccaacagcccggcccacagagcctgagagccccaagaatgaccgggagggcccccagtag

SEQ ID NO: 288241 - DNA, 1719 bp, Artificial Sequence
  derived and/or modified sequence
atggagggccggggcccctaccgcatctatgaccccggcggctctgtgcccagcggggaggccagcgctgcctttgagcggctggtgaaggagaacagccggctgaaggagaagatgcagggcatcaagatgctgggggagctgctggaggagagccagatggaggccacccggctgcggcagaaggccgaggagctggtgaaggacaatgagctgctgcccccacccagccccagcctgggcagctttgaccccctggccgagctgaccgggaaggacagcaatgtgacagccagccccacagccccagcctgccccagcgacaagccagcccctgtgcagaagccacccagcagcggcaccagcagcgagtttgaggtggtgaccccagaggagcagaacagccctgagagcagcagccacgccaatgccatggccctgggccccctgcccagagaagatggcaacctgatgctgcacctgcagaggctggagaccaccctgtctgtgtgtgccgaggagccagaccacggccagctgttcacccacctgggccgcatggccctggagttcaaccggctggccagcaaggtgcacaagaatgagcagaggaccagcatcctgcagaccctgtgtgagcagctgaggaaagaaaatgaggccctgaaggccaagctggacaagggcctggagcagagggaccaggccgctgagcggctgcgggaggagaacctggagctgaagaagctgctgatgagcaatggaaacaaggagggcgccagcggccggcccggcagccccaagatggagggcaccgggaagaaggctgtggccggccagcagcaggcctctgtgacagctgggaaggtgcctgaggtggtggccctgggcgctgctgagaagaaggtgaagatgctggagcagcagaggtctgagctgctggaggtgaacaagcagtgggaccagcacttccgctccatgaagcagcagtatgagcagaagatcacagagctgcggcagaagctggccgacctgcagaagcaggtgacagacctggaggccgagcgggagcagaagcagagggactttgacaggaagctgctgctggccaagagcaagattgagatggaggagacagacaaggagcagctgacagctgaggccaaggagctgcggcagaaggtgaagtacctgcaggaccagctgagccccctgacccggcagcgggagtaccaggagaaggagatccagaggctgaacaaggccctggaggaggccctgagcatccagaccccacccagcagccccccaacagccttcggcagccctgagggcgctggggccctgctgaggaagcaggagctggtgacccagaatgagctgctgaagcagcaggtgaagatctttgaggaggacttccagcgggagaggagtgaccgggagaggatgaatgaggagaaggaggagctgaagaagcaggtggagaagctgcaggcccaggtgaccctgagcaatgcccagctgaaggccttcaaggatgaggagaaggcccgggaggccctgcggcagcagaagaggaaggccaagccagagtacacctggaggctgccctgtggcggcgtgaggaaccccaaccagagcagccaggtgatggaccccccaacagcccggcccacagagcctgagagccccaagaatgaccgggagggcccccagtag

SEQ ID NO: 288242 - DNA, 1590 bp, Artificial Sequence
  derived and/or modified sequence
atgctgggcgagctgctggaggagagccagatggaggccacccggttgaggcagaaagccgaagaactggtaaaggacaatgagctcctgcctcctccatccccctctttagggtccttcgacccacttgcggaattaaccggcaaggatagcaacgtgacagccagtcccaccgcacctgcctgcccgtcagacaagcctgcccctgtccagaaacccccctcatcggggacttctagcgagttcgaggttgtaactcctgaggaacagaactctcccgaatcatcatcccacgccaatgctatggctctgggtcccctgccaagagaagatggaaatctcatgcttcatctgcaacgcctggagaccaccttgagcgtgtgtgccgaggaacctgaccacggccagctgttcacccacctgggccgaatggctcttgagttcaatagactagcgtctaaggttcataagaatgagcagcgaacctctattctgcagactttgtgcgagcagctgaggaaggaaaacgaagctctgaaagccaagttagataagggacttgagcaaagggatcaggcagccgagagactcagggaggagaacctcgaactgaagaagcttctgatgagtaacgggaataaggagggtgcatctgggcgtcccggtagcccgaagatggagggtaccgggaagaaggcagtcgccggccagcagcaagcttccgtgacagccgggaaggtccctgaagttgtggcattgggagcagccgagaaaaaggtgaagatgcttgaacaacaacggtcagagctgcttgaggtgaacaagcagtgggatcagcactttcggtctatgaagcagcaatacgagcaaaagattactgaactgcggcagaagctggctgacctccagaaacaggtgaccgacctagaggccgagagggaacagaagcagcgagactttgaccggaaattattgctggctaaaagtaagattgagatggaggaaactgacaaggaacagcttaccgcggaggcaaaggagctccgacagaaagttaaatacctgcaagaccagctaagtccattgactcgtcagcgcgaataccaggaaaaggagatccagaggctaaataaagcgcttgaggaggcactgtctatccagactcccccttcctccccgcctacagcattcggcagccccgagggtgcaggagctttgcttaggaaacaagaacttgtgactcagaacgagctgctaaagcagcaagtgaagattttcgaggaagatttccagagggagaggtccgatagggagcggatgaatgaggagaaggaggaactaaaaaagcaagtggagaagctgcaggcgcaagttactctgagtaatgcccaactgaaagccttcaaggacgaggagaaggcacgggaagctctccggcagcagaaaagaaaggcaaaaccggaatacacatggcgactcccctgtggtggcgttaggaaccctaaccagtcttcccaggtaatggatccccccactgctaggcccaccgaaccagagagtccaaaaaacgatcgcgaagggcctcaatag

SEQ ID NO: 288243 - DNA, 1719 bp, Artificial Sequence
  derived and/or modified sequence
atggagggccggggcccctaccggatctacgaccccggcggcagcgtgccgtctggagaggcctctgccgcttttgaaagactcgtgaaagaaaacagtagattgaaggaaaagatgcagggcatcaagatgttgggggaattactggaagaaagccaaatggaagcaacgcgccttaggcagaaggctgaagagttggtgaaagataacgagctgctcccacccccgtcgccatccctgggttctttcgatcctctcgccgaactaactgggaaggacagcaatgtgacggcgtcaccaactgcccctgcttgcccatccgataagcccgccccagttcagaaacccccatcgagtgggacaagctccgagtttgaagtggtgacgcccgaagagcagaactcccccgaatcaagctcgcacgcaaatgccatggccctgggcccattgccgcgggaagatggaaatcttatgttacacctgcagcggctcgagaccacattgtcagtttgtgctgaagagccggaccacggccagctgttcacacacttagggaggatggccttagaatttaaccgactggctagcaaggtgcacaagaacgaacagagaacctctattctgcaaacactctgtgagcaattacggaaggaaaacgaggccctgaaggcgaaattagacaagggactggagcagcgggaccaggctgccgagagactcagagaggagaatttggagctcaaaaaattactgatgtccaacggcaacaaggaaggggccagcgggcgtcccggatcgcctaaaatggagggcacaggtaaaaaggcagtggcgggccagcagcaggctagtgttacggctggaaaggtccctgaggtcgtcgctctgggggctgcggaaaagaaggttaagatgcttgagcagcagaggtctgagctgctcgaggtgaacaagcaatgggatcaacacttccggagcatgaagcagcagtatgagcagaagattacagaacttaggcagaaactggcggatctccagaagcaggtaactgatctggaggctgaacgggagcaaaagcaacgggatttcgaccgcaaactgctccttgccaaaagtaaaattgagatggaagagaccgacaaggagcagctaactgccgaggctaaagagctgaggcagaaggttaagtacctgcaggatcagctgagtcccttaactcgccaaagggagtatcaggagaaagaaatccagaggttgaacaaggccctcgaggaggctctgagcatccagactccgccttctagtcctccaactgccttcggaagtcctgaaggcgcaggtgcccttctcaggaaacaggaactggtcacacaaaacgaactgctcaaacagcaggtaaagatttttgaggaggattttcagcgggaacgatcagatcgggagcggatgaacgaggaaaaggaggaactgaaaaaacaggtggagaagctgcaggctcaggtgacactctctaacgcacagcttaaagccttcaaagatgaggagaaggcccgcgaagccttaagacagcagaaacgcaaagctaaaccggagtacacatggaggctgccatgcgggggtgtgcgcaacccaaatcagtcaagtcaagtaatggacccgccaacagcaaggcctaccgagcccgagtctcctaagaacgatcgagagggccctcagtag

SEQ ID NO: 288244 - DNA, 1590 bp, Artificial Sequence
  derived and/or modified sequence
atgttgggagaactgctcgaagagagccaaatggaggctacgcgactgaggcagaaggctgaggagctggtgaaggataatgaattacttccccctccatccccgtcactgggctccttcgatcccctggccgaactaaccgggaaagactccaatgtgaccgcctcacccacggctcccgcttgtcccagcgacaagcccgcacccgtgcagaaaccaccaagttccggaacctcctccgagttcgaagtagtgactccggaggagcaaaacagtcccgagtctagctctcacgccaacgccatggcactggggcctctgccaagggaagatggaaatttgatgctccatcttcaacgcctggaaactactttaagcgtttgtgctgaggaacccgatcacgggcagctgtttacgcacctgggcaggatggctttggaatttaaccgcctggcttccaaggttcataagaacgaacagcgcacctctatcctacagaccctgtgcgagcagcttaggaaggaaaatgaggcccttaaggctaagctcgataaaggcctggagcagagagaccaggccgcagagcgattaagggaggagaatctcgagctgaagaagctgcttatgtccaacggaaacaaggagggcgcttcaggtcggcctggcagccctaagatggagggaacgggcaaaaaagccgttgccggtcaacagcaggcttccgtaacagctggcaaagtcccggaggttgtggcactcggtgctgcagagaagaaagtgaagatgctcgagcagcaacggtccgaactccttgaagtaaataagcagtgggatcagcactttcggagtatgaagcaacaatatgaacagaaaatcacagagcttcggcaaaagctagcagacctgcagaaacaggtcacagatctggaggcagaaagagagcagaaacagcgggattttgataggaaattgctcttagctaaatctaagattgagatggaggaaacagataaagagcagctgaccgctgaggcaaaagaacttagacagaaagtgaaatacctacaggaccaactgtcaccgctgacacggcagagagagtatcaggaaaaagagatccaaagactcaataaggccctggaagaagccctgagcattcaaacacctccgagcagcccccctaccgcattcggaagccccgaaggcgctggggctctgcttcggaaacaggagctagtgacccagaacgagttgctcaagcaacaggtcaagattttcgaagaggactttcaaagggagcggtctgatcgagaacggatgaacgaagaaaaggaggagctgaagaagcaggtggagaagttacaggctcaggtgaccttgagcaatgcacagcttaaagctttcaaagatgaggagaaggcacgggaggctctgagacagcagaaacggaaggcaaaacctgagtacacgtggcggctgccttgtgggggtgtgagaaacccgaaccagtcatcacaggtcatggacccgccaaccgcccgtcccaccgagcccgagtcacccaagaacgatagggagggtccgcagtag

SEQ ID NO: 288245 - DNA, 1719 bp, Artificial Sequence
  derived and/or modified sequence
atggagggcagggggccatatcggatttacgatccaggtgggagtgtaccaagcggagaggcctctgcggcttttgagcgtctagtgaaggagaacagtcgactgaaggagaagatgcaggggatcaagatgcttggggaacttctagaggagtcccagatggaagccactcgtttgcggcagaaagctgaggaactggtgaaagacaacgaattgctgcctcccccttctccatccctcggctccttcgacccactggccgaacttaccggaaaggatagtaatgttaccgcatctccaacggcaccggcttgcccaagcgacaagcctgcccctgtgcaaaagcctccatccagtggcacctcaagcgagttcgaggtcgtcactccagaagagcagaactcacctgaatcttcctctcatgccaatgctatggctctcggacccctgcccagggaagatggaaacctgatgttacatctgcaacgcttggagaccaccctgtctgtatgtgctgaggagcccgatcacggacagctgtttacccatctgggaaggatggccctcgaattcaaccggcttgcgtcaaaggtgcacaagaatgaacaaagaaccagcattctccagactctgtgtgaacagctgagaaaggagaatgaggccctgaaggccaagcttgataagggacttgaacagcgcgatcaggccgctgaacgtcttagagaagaaaatctcgaactgaaaaaattactaatgagtaatggcaacaaggagggtgcaagcggcaggccaggtagcccaaagatggaagggactggtaagaaggctgtggccggacagcaacaggcctcggtgaccgccggtaaagtgcccgaagtcgtcgcccttggggctgccgagaagaaagtgaagatgcttgagcagcagaggtccgaactcttggaggtgaacaagcagtgggatcaacatttccgtagtatgaaacagcagtacgaacaaaagatcactgagctcaggcaaaagcttgcagacctgcagaaacaggtaacggacctggaggctgaaagagagcaaaagcaaagagacttcgatcgaaagcttctacttgcaaagtccaaaattgagatggaggagacagataaggagcagctgacggcggaggctaaagaactccggcagaaagtgaagtatctgcaagatcagctatctcctctgacccggcagcgggaataccaggagaaagagatccagcgccttaacaaggcactcgaagaggcactgagtattcagaccccgcctagctccccccctacggcattcggatccccagaaggtgctggtgctctgttgcgaaaacaagaattagttacccagaacgagctgctgaaacagcaggtgaaaattttcgaagaggattttcagagggagaggtctgaccgtgagagaatgaatgaggaaaaggaagagctgaaaaagcaggtcgagaaactgcaggcacaggtgaccctgtccaatgcacagcttaaggcatttaaagatgaagaaaaagcacgagaggcactgaggcagcagaaacgcaaggcaaaaccggagtatacatggcggctgccttgcggaggggtgcgaaaccccaatcagtcgagccaggtaatggatcctccgactgccaggcccacagaacctgaatcgcctaaaaacgaccgggaagggccacagtag

SEQ ID NO: 288246 - DNA, 2586 bp, Artificial Sequence
  derived and/or modified sequence
agtgagccgaggagccttcatagggacagccgcccctggtgcacacaccctcgtattctcctgcccttccccagccaggcgggcaccacggcaggggctgagctaccctcatggaagggagaggaccgtaccggatctacgaccctgggggcagcgtgccctcaggagaggcatccgcagcttttgagcgcctagtgaaggagaattcccggctgaaggaaaaaatgcaagggataaagatgttaggggagcttttggaagagtcccagatggaagcgaccaggctccggcagaaggcagaggagctagtgaaggacaacgagctgctcccaccaccttctccctccttgggctccttcgaccccctggctgagctcacaggaaaggactcaaatgtcacagcatctcccacagcccctgcatgccccagtgacaagccagcaccagtccagaagcctccatccagtggcacctcctctgaatttgaagtggtcactcctgaggagcagaattcaccagagagcagcagccatgccaatgcgatggcgctgggccccctgccccgtgaggacggcaacctgatgctgcacctgcagcgcctggagaccacgctgagtgtgtgtgccgaggagccggaccacggccagctcttcacccacctgggccgcatggccctggagttcaaccgactggcatccaaggtgcacaagaatgagcagcgcacctccattctgcagaccctgtgtgagcagcttcggaaggagaacgaggctctgaaggccaagttggataagggcctggaacagcgggatcaggctgccgagaggctgcgggaggaaaatttggagctcaagaagttgttgatgagcaatggcaacaaagagggtgcgtctgggcggccaggctcaccgaagatggaagggacaggcaagaaggcagtggctggacagcagcaggctagtgtgacggcaggtaaggtcccagaggtggtggccttgggcgcagccgagaagaaggtgaagatgctggagcagcagcgcagtgagctgctggaagtgaacaagcagtgggaccagcatttccggtccatgaagcagcagtatgagcagaagatcactgagctgcgtcagaagctggctgatttgcagaagcaggtgactgacctggaggccgagcgggagcagaagcagcgtgactttgaccgcaagctcctcctggccaagtccaagattgaaatggaggagaccgacaaggagcagctgacagcagaggccaaggagctgcgccaaaaggtcaagtacctgcaggatcagctgagcccactcacccgacagcgtgagtaccaggaaaaggagatccagcggctcaacaaggccctggaggaagcactgagcatccaaaccccgccatcatctccaccaacagcatttgggagcccagaaggagcaggggccctcctaaggaaacaggagctggtcacgcagaatgagttgctgaaacagcaggtgaagatcttcgaggaggacttccagagggagcgcagtgatcgtgagcgcatgaatgaggagaaggaagagctgaagaagcaagtggagaagctgcaggcccaggtcaccctgtcaaatgcccagctaaaagcattcaaagatgaggagaaggcaagagaagccctcagacagcagaagaggaaagcaaagccggaatacacctggcgtctaccctgtggaggggttcgaaatccaaatcagagctcccaagtgatggaccctcccacagccaggcctacagaaccagagtctccaaaaaatgaccgtgaggggcctcagtgagaccagattgtgtcatttggctccaccttcatcttgcagagccagctgatctcagattgccaagaaactagaagccacttgcacggtgtggccagagcctcagctggatgagaggctgagatgggtggccagcttgtacaccagtccctgaactgagctgtttacaggactggggaggctccacccagaaggctttcatttgtactctgctgggagtgactgggaaaaactccttccctgctgctgagtggagagaggcctcatccggctttgacccaccatccgttgcagaagcctccaggagcagcaatcctaagagtgggaggcagccaagacccccttccttcaaaacctcccggaagtggtttcaggccctctagttgccatgaccaatttgtgtgtgtgtttaatttttgcttcaagctctgtagcaggacctgccccacgcacacccctacccctctgtgaggagctgtgggaagtgtgggtttgtctccagaacagaagagaatgatggatattctggctctggggccctctccaccaccactcacagtagccttgctgaagccatcacagatgggagaaggccatgccagccacgtccgccgaggggcgccagcctgaagctgccaggccctgaggttcagaccctggaccccatagctggaggcctgtggtgccagaagcccagattagggtggctgtccatccctggatagctatttgcacgaatcatggacataaatccaagttg

SEQ ID NO: 288247 - DNA, 1743 bp, Artificial Sequence
  derived and/or modified sequence
atggaagggagaggaccgtaccggatctacgaccctgggggcagcgtgccctcaggagaggcatccgcagcttttgagcgcctagtgaaggagaattcccggctgaaggaaaaaatgcaagggataaagatgttaggggagcttttggaagagtcccagatggaagcgaccaggctccggcagaaggcagaggagctagtgaaggacaacgagctgctcccaccaccttctccctccttgggctccttcgaccccctggctgagctcacaggaaaggactcaaatgtcacagcatctcccacagcccctgcatgccccagtgacaagccagcaccagtccagaagcctccatccagtggcacctcctctgaatttgaagtggtcactcctgaggagcagaattcaccagagagcagcagccatgccaatgcgatggcgctgggccccctgccccgtgaggacggcaacctgatgctgcacctgcagcgcctggagaccacgctgagtgtgtgtgccgaggagccggaccacggccagctcttcacccacctgggccgcatggccctggagttcaaccgactggcatccaaggtgcacaagaatgagcagcgcacctccattctgcagaccctgtgtgagcagcttcggaaggagaacgaggctctgaaggccaagttggataagggcctggaacagcgggatcaggctgccgagaggctgcgggaggaaaatttggagctcaagaagttgttgatgagcaatggcaacaaagagggtgcgtctgggcggccaggctcaccgaagatggaagggacaggcaagaaggcagtggctggacagcagcaggctagtgtgacggcaggtaaggtcccagaggtggtggccttgggcgcagccgagaagaaggtgaagatgctggagcagcagcgcagtgagctgctggaagtgaacaagcagtgggaccagcatttccggtccatgaagcagcagtatgagcagaagatcactgagctgcgtcagaagctggctgatttgcagaagcaggtgactgacctggaggccgagcgggagcagaagcagcgtgactttgaccgcaagctcctcctggccaagtccaagattgaaatggaggagaccgacaaggagcagctgacagcagaggccaaggagctgcgccaaaaggtcaagtacctgcaggatcagctgagcccactcacccgacagcgtgagtaccaggaaaaggagatccagcggctcaacaaggccctggaggaagcactgagcatccaaaccccgccatcatctccaccaacagcatttgggagcccagaaggagcaggggccctcctaaggaaacaggagctggtcacgcagaatgagttgctgaaacagcaggtgaagatcttcgaggaggacttccagagggagcgcagtgatcgtgagcgcatgaatgaggagaaggaagagctgaagaagcaagtggagaagctgcaggcccaggtcaccctgtcaaatgcccagctaaaagcattcaaagatgaggagaaggcaagagaagccctcagacagcagaagaggaaagcaaagccggaatacacctggcgtctaccctgtggaggggttcgaaatccaaatcagagctcccaagtgatggaccctcccacagccaggcctacagaaccagagtctccaaaaaatgaccgtgaggggcctcagtgagaccagattgtgtcatttggctcc

SEQ ID NO: 288248 - DNA, 5374 bp, Artificial Sequence
  derived and/or modified sequence
ctgataaagagctgggctgagtcatctgtggaggagaaaagtcacatccagctccttcatgttgctgccgatgtgggattttcctggcttcgtcagccaagcaattggctgcctttgccggaggctttgagaaccaaggcttgaaggccggcaggagcatccagggggaagcttggcttcagggaggacctagcagacgttgggccggagcactagcctcacggagaaggatctgaaagaagccaaggcgcggagccagcagattgcagcccagctgaccacccctcccagctccaattcccgtggcgtccagctcttcaacaggcgccggcagagggtgaacgagttcaccttggagagccacggccagaggggacagaagcccagccaggagtccctcagagtgctcccttcaagcctcccaggccatgcaccggggctcagcctgagttccacctcgctgccggagccaggccctccacggcaccccagtccccagagccccgacagaggggtccctggccacagcatggaggggtactcagaggaggctagcttgctgcggcacctggagaaggtggccagtgaggaggaagaggtaccactggtggtttatctaaaggagaatgcagcactgctgacagccaatgggctgcacctgtcccaaaaccgagaggcccagcagtcctcaccggccccacctccagctgaggtccacagcccagctgcagatgtcaaccaaaaccttgcctcgcccagtgccacgctcaccacaccaacttctaacagcagccacaatccgccagccaccgatgtcaatcagaacccaccggcaactgttgtcccacagagcctgccactttctagcatccaacagaattcctcagaggcccaactcccatctaatggcacagggcctgcttccaaacccagcaccctgtgtgctgatgggcaaccccaggcaccggctgaggaggtgagatgcagcacactcctaattgacaaggtatcaactccagctaccaccaccagcaccttctccagagaagctacgctcatccccagctccaggcccccagcctcagatttcatgtccagctccctgctcattgacatccagcccaacaccctagtggtgtcagcagatcaagagatgtctgggcgagcagctgccaccacgcccaccaaggtctacagtgaggtccacttcacactggccaagcccccatcagtggtcaacaggacggccaggccttttgggatccaggcgccagggggcaccagccagatggagaggagccccatgctagagagacgacattttggggagaaggccccggctccccagccccccagtttgccagacaggagcccccggccacagagacacataatgtcccgcagccccatggtggaaaggaggatgatggggcagcgaagcccggcctcagagagacgccccttggggaacttcactgcaccccccacctacactgagaccttgtccacagcccctctggcttcctgggtgaggtctcctccctcatattctgtcctgtatcccagctccgaccccaagtcttctcatctgaagggccaggcggttcctgccagcaagacgggcattctggaggagtcgatggcccgccggggcagccgcaaatccatgtttactttcgtggagaagcccaaggtgaccccgaatccagacttgctggatctggtacagacagcggatgagaagcggcggcagagggaccagggggaggtaggcgtggaggaggagcccttcgcactgggggccgaggcctccaacttccagcaggagccagcacctcgtgacagggccagccccgcggcggcggaggaggtggtaccagagtgggcctcctgcctcaagtcaccccgcatccaggccaagccgaagcccaaacccaaccagaacctctccgaggcctctgggaagggagctgagctctacgcccgccgccagtcacggatggagaaatatgtcatcgagtcttcaagccacacgccagagctggcccgctgcccatcacctaccatgtccctgccttcctcctggaaataccccactaacgcccccggggccttccgagtggcatcccgaagcccagcccggaccccgcctgcctccctctaccatggctacctgcctgagaacggggtcctgcgcccagagcccaccaagcagccgccataccagctgcgcccctcgctctttgtcctctcacctatcaaggagcctgccaaggtctcaccaagagctgcctcgcccgccaagcccagctccttggacctggtgcccaacctgcccaagggggctctccctccatctcctgccctgcctcggccctcgcgctcctcaccgggcctctacacctcccccggccaggacagcctgcagcccactgccgtgagccctccttacggcggtgacatctcccccgtgtctccctccagggcgtggtctccccgagccaagcaggcccccaggccctccttctctacccggaacgccgggatcgaggctcaggaccgccgggagagcctgcccacctccccaccctggacgccgggcgcgtcccggccccccagcagcctagacggctgggtgagcccgggcccgtgggagccaggtcgcgggagcagcatgagcagccccccgccgctgccgccgccaccgcccatgtctccctcgtggagcgagcgctcggtgtccccgctgcgacctgagaccgaggcgcggccccccagccgccagctgcaggcgcttctggcgcgaaacatcatcaatgcggcccggcgcaagagcgcctccccgcggtcggcgggcgccgagaacccgcggcccttctccccgccgagggcgccaccgcccccgcccccgcccccgcccccgcccccgcgcatgcgctcgccacagcccgcccgccccggctcggctgctgtgccgggggcagccttcgcgcccatcccgcggagcccgttgcccgccggtccttcgtcctgcaccagtccccggagcccgctgcccgcgcctcccaggcccttcctctaccgccgctcgcccacggactccgacgtgtccctcgactccgaggactccggggctaagtctccaggcatcctgggctacaatatctgtccccgcgggtggaatggcagccttcggctcaagcgtggcagcctccccgccgaggcctcctgcaccacctagagccccacccccgaccccaccccgggagggcagagccagaagaaggctcattagacctgggggacccaaagggtctggcctctttgggcagccccagagatgaggggtcagcagaggagagctctggggttggggatgggttagggacgcaagcttgagttctagcccttgctctcattcagctgttgtgtgaccctgggtaagacccttccttgtttgaccctcagctttcccatctgtttaatggtggctttggccaaggcaatccacaaacgtcaaaattccccttcccatcagtacacacaccgatgcacacacactctctctttctctctctctctctctcacacacacacacacacacacacacacacacacacacacacacactagttagtgccttggatgaggcggggcagtgtgtatatggacccctggacttgctaccttcagggttccatactcgtccctcccctcctggctctgctgtctggagtctggcaagcggggtgtgttcagaaggtcctaggcctgtgtcgcatgtccaggcactggcctgaccatccggctccctggcaccaagtcccaggcaggagcagctgttttccatcccttcccagacaagctctatttttatcacaatgacctttagagaggtctcccaggccagctcaaggtgtcccactatcccctctggagggaagaggcaggaaaattctccccgggtccctgtcatgctactttctccatcccagttcagactgtccaggacatcttatctgcagccataagagaattataaggcagtgatttcccttaggcccaggacttgggcctccagctcatctgttccttctgggcccattcatggcaggttctgggctcaaagctgaactggggagagaagagatacagagctaccatgtgactttacctgattgccctcagtttggggttgcttattgggaaagagagagacaaagagttacttgttacgggaaatatgaaaagcatggccaggatgcatagaggagattctagcaggggacaggattggctcagatgacccctgagggctcttccagtcttgaaatgcattccatgatattaggaagtcgggggtgggtggtggtggtgggctagttgggcttgaatttaggggccgatgagcttgggtacgtgagcagggtgttaagttagggtctgcctgtatttctggtccccttggaaatgtccccttcttcagtgtcagacctcagtcccagtgtccatatcgtgcccagaaaagtagacattatcctgccccatcccttccccagtgcactctgacctagctagtgcctggtgcccagtgacctgggggagcctggctgcaggccctcactggttccctaaaccttggtggctgtgattcaggtccccaggggggactcagggaggaatatggctgagttctgtagtttccagagttggctggtagagccttctagaggttcagaatattagcttcaggatcagctgggggtatggaattggctgaggatcaaacgtatgtaggtgaaaggataccaggatgttgctaaaggtgagggacagtttgggtttgggacttaccggggtgatgttagatctggaacccccaagtgaggctggagggagttaaggtcagtatggaagatagggttgggacagggtgctttggaatgaaagagtgaccttagagggctccttgggcctcaggaatgctcctgctgctgtgaagatgagaaggtgctcttactcagttaatgatgagtgactatatttaccaaagcccctacctgctgctgggtcccttgtagcacaggagactggggctaagggcccctcccagggaagggacaccatcaggcctctggctgaggcagtagcatagaggatccatttctacctgcatttcccagaggactagcaggaggcagccttgagaaaccggcagttcccaagccagcgcctggctgttctctcattgtcactgccctctccccaacctctcctctaacccactagagattgcctgtgtcctgcctcttgcctcttgtagaatgcagctctggccctcaataaatgcttcctgcattcttctgcctcctg

SEQ ID NO: 288249 - protein, 207 aa, Artificial Sequence
  derived and/or modified sequence
MNDTAVLPLENKMKNARHFPAILSLGMSIVTSLYIGMAALGYLRFGDDIKASISLNLPNCWLYQSVKLLYIAGILCTYALQFYVPAEIIIPFAISRVSTRWALPLDLSIRLVMVCLTCLLAILIPRLDLVISLVGSVSGTALALIIPPLLEVTTFYSEGMSPLTIFKDALISILGFVGFVVGTYQALDELLKSEDSHPFSNSTTFVR

SEQ ID NO: 288250 - DNA, 624 bp, Artificial Sequence
  derived and/or modified sequence
atgaacgatacggcagtattgccactcgaaaataaaatgaaaaatgctaggcacttccccgcgatcctgagcctgggcatgtctatcgtgacgtctctctatatcggcatggccgcccttgggtacctcaggtttggagatgacataaaggcctccatctcactcaacctacccaattgctggctgtatcagagcgtgaagctgctgtatattgccgggatcctctgtacatatgcactgcagttttatgtgcccgctgaaataatcattccgttcgctatctcacgggtcagcactaggtgggcccttccattggatttaagcattaggctagtgatggtttgcctcacatgtctgctcgctatcctgatcccaagactcgacctggtaatctcactggtcggatccgtctccggcactgcccttgcactgattatcccaccactactggaagtcacaactttctattccgaagggatgtcacccctgacaattttcaaagatgctctgatctcaatactaggcttcgtgggatttgtggtgggtacgtaccaggctctcgatgagttactgaaaagcgaagactcacaccctttctccaacagtactaccttcgtgcgttag

SEQ ID NO: 288251 - DNA, 624 bp, Artificial Sequence
  derived and/or modified sequence
atgaatgacacagctgtgctgcccctggagaacaagatgaagaatgcccggcacttccctgccatcctgagcctgggcatgagcatcgtgaccagcctgtacatcggcatggccgccctgggctacctgcgctttggagatgacatcaaggccagcatcagcctgaacctgcccaactgctggctgtaccagagcgtgaagctgctgtacatcgccggcatcctgtgcacctacgccctgcagttctacgtgcctgctgagatcatcatcccctttgccatcagccgggtgtccacccgctgggccctgcccctggacctgagcatccggctggtgatggtgtgcctgacctgcctgctggccatcctgatcccccggctggacctggtgatcagcctggtgggctctgtgtctggaacagccctggccctgatcatcccccccctgctggaggtgaccaccttctacagcgagggcatgagccccctgaccatcttcaaggatgccctgatcagcatcctgggctttgtgggctttgtggtgggcacctaccaggccctggatgagctgctgaagtctgaggacagccaccccttcagcaacagcaccacctttgtgaggtag

SEQ ID NO: 288252 - DNA, 624 bp, Artificial Sequence
  derived and/or modified sequence
atgaacgacaccgccgtgctgcccctggagaacaagatgaagaacgctaggcacttcccagctatactgagcctcgggatgtcaatcgtgacctccttgtacattggcatggcagccctggggtacttgcgtttcggcgatgacatcaaggccagtataagcctgaacttgccgaactgttggctgtatcagtccgtaaagcttctgtatatagctggcatcttatgcacgtacgcccttcagttctacgtgcccgccgaaattatcattccgttcgctatcagccgggtgtccactagatgggctctcccccttgacctgagtattagactggttatggtctgcctgacttgcctcctggccatcctgattcccaggctggacctcgtcatctcactggtcggaagtgtgagcggtaccgccctggccctgataatacctccactgctggaggtgactaccttttactccgaagggatgagcccccttaccattttcaaggacgccctgattagcattcttggttttgtcgggtttgttgtcggaacataccaggctctagatgagctgcttaagtcagaggactcccatcctttcagcaacagcacaacgtttgtccgatag

SEQ ID NO: 288253 - DNA, 624 bp, Artificial Sequence
  derived and/or modified sequence
atgaatgatactgctgtgctgcccttagagaacaagatgaaaaacgcccgtcacttcccagctatcctttccttggggatgagcatcgtgaccagtctgtatattggtatggccgctctcggatatttgaggtttggcgacgatattaaggctagcatttcattaaacttgcccaactgttggttgtaccagtcagtgaagctgctctacattgccggtattctctgtacctacgccctgcagttctacgtacctgccgagatcataatcccctttgccatatcccgcgtgagtacccgttgggcccttcccctggatctttcgatccggctagttatggtctgtctgacctgcctccttgcgatcctgattcccaggttagatttagtcatttctctggtggggagtgtgagtgggaccgccctcgctcttatcattccacccctgctggaagtcacaaccttttacagtgaaggcatgtcaccactgaccatctttaaggacgctcttatctcaatactgggtttcgtgggttttgttgtggggacataccaggccttggatgagctcctgaagagtgaggactcccaccctttcagcaacagcactaccttcgttcgctag

SEQ ID NO: 288254 - DNA, 2459 bp, Artificial Sequence
  derived and/or modified sequence
atgaatgatactgccgttctgcctctggaaaacaagatgaagaatgcccgccacttcccagccatcctgtctttgggaatgtccatcgtcacttccctatacattggcatggcggctctgggctacctgcggtttggagatgacatcaaggccagcataagccttaacctgcctaactgctggctgtaccagtctgtcaagcttctctacattgccggcatcctgtgcacctatgccctgcagttctacgtccctgcagaaatcatcatcccctttgccatctcccgggtgtcaacacgctgggcactgcctctggatctgtccattcgcctcgtcatggtctgcctgacatgcctcctggccatcctcatcccccgcctggacctggtcatctccctggtgggctccgtgagtggcaccgccctggccctcatcatcccaccgctcctggaggtcaccacgttctactcagagggcatgagccccctcaccatcttcaaggacgccctgatcagcatcctgggcttcgtgggctttgtggtggggacctaccaggccctggacgagctgctcaagtcagaagactctcaccccttttccaactccaccacttttgttcggtgagcctggcactgctccttgcctaccagcacccgacttttaattatatggatctctttttttttttttttttttttttgagacggagtttctgtcttgttgcccagactggagtacaatgatgcgatctcagctcaccacaacttcggcctcctgggttcaagcgattctcctgcctcagcctcccgagtagttgggattagaggcatagtccagcacgcctggctaattttgtatttttagtagagacggggtttctccatgttggtcaggctggtcttgaactcccgacctcaggtgatccacccaccccggcctcccaaaatgctgggatcacaggcgtgagccacctcgcctggccagatctcttttatatgcattatctttatgtcactgctttgccttttctctgggccaagtcatggtgaaacaagaaagctacaagctctaaatggtaattttttacatttttgttttgtttattacttcttcttttcatacctctggcattccactacattgtgagctttcccttggaaggctctggactctatccaagcttatgataattcacacaatgaatttcatacctagcgtggagctatgcaagaagcagccaccagagggccccaagtggcagcaactggccaaaggagatgcagccagctaagactgtccacactttggcagacaaccggttttcccttttctgggtctgttcaaaaagcaaacattaagggtgggcacataatccacaagccagaaagttgtgcacggctccagtgttgagatgggtagggccaagatgaccagtgtgaaaactctcagatagaaaggagccatgcatattaaatgaggggcaacaaacatttcaaacgattagataacattttctcccaactcaaagatcccaacaatgaataggaggcatggaagtagatgtgccaatggggagggatgaggagtgaacatgaatattatttgaatagactttacctcttaattcttgcaacatgcattcttgattacctactgtgtgccaaacaagattttgtagaatattgcaaaaatgaccataaattcctcgtgataatgtgactttgcacctgctcctatgaaaagatgaagtctgtatctgtatcccttaaatttttttgcttgtttgtcggttttgttttgtgttttgtttttttgagatgaagtctcgctctgttgcccaggctggagtgcaatggcacaatctcggctcactgcaacctccacctcctgggttcaagcgattcttctgcctcagcctcccaagtagctaggattacaagtgcctgccactatgcctggctaatttttgtttttcgtagagatggggttttaccatgttggccaggctggtctcaaactcctgacctcaggtgatccacttgcctcggcctcccaaagtgctgagattacaagtgtgagccaccacgcccagcctctcccctttaaatttgatcttggccttgtaacttgctttggccaatgggacattagtaaatgtgatgcagtcagaggtttggtaataacctatgcatcaggacttacatcacttgctgctctatggagttgagaccaccaagtaaagcatcctgggctagcctaccggaggatcagagaccatgtggaacataaatgaatcatcccagttgagccctgtccgcagatcaaccagcctaccaacttccagacacgagtaaagccatcctagactatatccaaccccagtcaggctgacacagaccataagaattgtacagataatccacagaactgtgataaataataaagatgtttgtaatttt

SEQ ID NO: 288255 - DNA, 624 bp, Artificial Sequence
  derived and/or modified sequence
atgaacgacaccgccgtgctgcccctggagaacaagatgaagaacgccagacacttccccgccatcctgagcctgggcatgagcatcgtgaccagcctgtacatcggcatggccgccctgggctacctgagattcggcgacgacatcaaggccagcatcagcctgaacctgcccaactgctggctgtaccagagcgtgaagctgctgtacatcgccggcatcctgtgcacctacgccctgcagttctacgtgcccgccgagatcatcatccccttcgccatcagcagagtgagcaccagatgggccctgcccctggacctgagcatcagactggtgatggtgtgcctgacctgcctgctggccatcctgatccccagactggacctggtgatcagcctggtgggcagcgtgagcggcaccgccctggccctgatcatcccccccctgctggaggtgaccaccttctacagcgagggcatgagccccctgaccatcttcaaggacgccctgatcagcatcctgggcttcgtgggcttcgtggtgggcacctaccaggccctggacgagctgctgaagagcgaggacagccaccccttcagcaacagcaccaccttcgtgagatag

SEQ ID NO: 288256 - DNA, 569 bp, Artificial Sequence
  derived and/or modified sequence
acggccaccgcctgggccgcagcggttagtgggcaacggtgtggttcgggcctacctcgtcggcagagggtgggcgctggtttcagtgaaacgatccccaccgcatgctggtaacactctgctccagccaaggtggtgagggcagctgttcctaaacagcgcaaaggcagcaaggttggtgactttggagatgcaatcaattggcccacacctggagagatagcccacaagagtgttcagccacagtcccacaagcctcagcctacccgtaaactgccacccaagaaggacatgaaggaacaggagaaaggagaagggagtgatagtaaggagagtccaaaaaccaaatcagatgaatcaggggaggaaaagaatggagatgaggattgccagcgaggcgggcagaagaagaaaggaaacaaacacaagtgggttccattacaaatagacatgaagcctgaagtgcccagagagaaactggcttcacgccccactcgcccaccggagcctagacacatacctgccaatcgcggagagatcaaagggtctgagtctgccacctacgtgcc

SEQ ID NO: 288257 - protein, 882 aa, Artificial Sequence
  derived and/or modified sequence
MPALACLRRLCRHVSPQAVLFLLFIFCLFSVFISAYYLYGWKRGLEPSADAPEPDCGDPPPVAPSRLLPLKPVQAATPSRTDPLVLVFVESLYSQLGQEVVAILESSRFKYRTEIAPGKGDMPTLTDKGRGRFALIIYENILKYVNLDAWNRELLDKYCVAYGVGIIGFFKANENSLLSAQLKGFPLFLHSNLGLKDCSINPKSPLLYVTRPSEVEKGVLPGEDWTVFQSNHSTYEPVLLAKTRSSESIPHLGADAGLHAALHATVVQDLGLHDGIQRVLFGNNLNFWLHKLVFVDAVAFLTGKRLSLPLDRYILVDIDDIFVGKEGTRMKVEDVKALFDTQNELRAHIPNFTFNLGYSGKFFHTGTNAEDAGDDLLLSYVKEFWWFPHMWSHMQPHLFHNQSVLAEQMALNKKFAVEHGIPTDMGYAVAPHHSGVYPVHVQLYEAWKQVWSIRVTSTEEYPHLKPARYRRGFIHNGIMVLPRQTCGLFTHTIFYNEYPGGSSELDKIINGGELFLTVLLNPISIFMTHLSNYGNDRLGLYTFKHLVRFLHSWTNLRLQTLPPVQLAQKYFQIFSEEKDPLWQDPCEDKRHKDIWSKEKTCDRFPKLLIIGPQKTGTTALYLFLGMHPDLSSNYPSSETFEEIQFFNGHNYHKGIDWYMEFFPIPSNTTSDFYFEKSANYFDSEVAPRRAAALLPKAKVLTILINPADRAYSWYQHQRAHDDPVALKYTFHEVITAGSDASSKLRALQNRCLVPGWYATHIERWLSAYHANQILVLDGKLLRTEPAKVMDMVQKFLGVTNTIDYHKTLAFDPKKGFWCQLLEGGKTKCLGKSKGRKYPEMDLDSRAFLKDYYRDHNIELSKLLYKMGQTLPTWLREDLQNTR

SEQ ID NO: 288258 - DNA, 2649 bp, Artificial Sequence
  derived and/or modified sequence
atgcctgctctagcttgcctcaggcggttgtgccggcatgttagtccacaggccgttcttttcttattgtttatcttctgcctcttcagcgtattcatcagcgcctactacctttacggttggaagcgagggcttgaaccgtcggcagatgctcccgagccagattgtggggatccacctccagtggcacctagcagactcctgcccctgaagccggtgcaggcagctacaccaagtcggaccgatcctctcgtgttggtcttcgttgagtctctgtactcgcagctcggccaagaggtcgtggctatcctggagtcaagcagatttaagtacagaaccgagatagcccctgggaagggcgatatgcccactctgactgataagggcaggggcaggtttgccttgattatttacgagaacattctgaaatatgtgaacctcgacgcatggaatcgtgaactattagacaagtactgtgtggcatacggcgtaggaattattggttttttcaaagcgaacgagaactccctcctcagtgcccaactgaagggcttcccgctctttcttcacagtaacctcggattaaaggactgttctattaatcccaagtcacctctgttgtacgtgacacgtccaagtgaagtggaaaagggcgtcctcccaggtgaagattggaccgtgtttcagtccaatcacagtacttacgagccggttttgctcgcaaagacaaggagttccgaatccataccacacctcggcgctgacgccggattacatgccgccctgcacgccacagttgtgcaggacttagggctccacgacggaatccagcgggtcttgtttggaaacaatctgaatttctggctgcataagctggtgttcgtcgatgccgtggccttcctgacaggaaaacgcctcagtctgcctcttgatcgttatattcttgtggatattgacgacattttcgtaggaaaggaaggcacgaggatgaaggtcgaagacgtgaaggccctgttcgacactcagaatgagctgcgcgcccacattcctaactttacttttaaccttgggtactcaggtaagttctttcatacgggcactaacgcagaggacgccggcgacgacctcctgctctcttacgtcaaagagttctggtggtttccccatatgtggtcacacatgcaaccgcaccttttccataaccagtcagttctggccgagcaaatggccttgaataagaaatttgctgtggagcacgggattccaactgatatgggctacgccgtcgccccgcaccatagtggggtgtaccctgtgcacgtgcagctgtacgaggcctggaagcaagtatggagcatccgagtgaccagtactgaggagtacccccacctgaagcccgcaagatatagacgaggctttatccacaacggcatcatggttctgccacgacagacttgcggtctctttacacacaccattttctacaacgaataccccggtggctccagtgagttagacaaaattatcaatgggggcgaactatttttgactgttttgctgaatcctatttctatctttatgacccatctctcaaactacggcaatgataggctgggactttacacctttaagcacctcgtacgatttctacacagctggactaatttgcgactgcagactctaccaccagttcagctggcccagaagtactttcagatcttcagcgaggagaaggaccctctatggcaggacccatgcgaggataagcgacacaaggacatatggtccaaagagaagacttgcgatcggttccccaagctcttaatcatcggaccgcagaagactgggacaacagctctgtatctattcctgggtatgcatcccgatctcagcagcaattatccctccagcgagacctttgaagaaatccagtttttcaacggccacaattatcataagggaattgattggtacatggagttcttcccaatcccttctaatactacgtctgacttctacttcgagaagagtgccaactattttgatagcgaagtggcacctagacgcgcggctgctctcctgcctaaagctaaagtgttaacaatactgattaatccagcggacagggcctattcttggtaccagcaccaaagggctcatgatgatcccgtagcgctcaaatataccttccacgaggtcattaccgcaggcagcgacgcttcctctaagctccgtgccctacagaaccgatgtctcgtgcctggatggtatgccactcatattgagaggtggctgagcgcttatcacgctaaccagatcctggtcttggacgggaagctgttgcgcactgaacctgcaaaagtgatggacatggttcagaaatttctcggggtcactaacacgattgattatcacaaaactctagctttcgacccgaagaagggtttctggtgccaactgctggaaggggggaaaaccaaatgccttggtaagagtaagggacggaagtatcccgaaatggacctggattctagagcgtttcttaaggattattaccgggatcacaacattgaactatccaagctgctgtataagatgggccaaacattacctacctggctgcgcgaagatcttcaaaacacgcgttag

SEQ ID NO: 288259 - DNA, 2649 bp, Artificial Sequence
  derived and/or modified sequence
atgcctgccctggcctgcctgcggcggctgtgcagacatgtgagcccccaggccgtgctcttcctgctcttcatcttctgcctcttcagcgtcttcatcagcgcctactacctgtatggctggaagaggggcctggagcccagcgcagatgcccctgagccagactgtggggaccccccacctgtggcccccagccggctgctgcccctgaagcctgtgcaggccgccacccccagcaggacagaccccctggtgctggtgtttgtggagagcctgtacagccagctgggccaggaggtggtggccatcctggagagcagccgcttcaagtacagaacagaaattgcccctggaaaaggagacatgcccaccctgacagacaagggccggggccgctttgccctgatcatctatgagaacatcctgaagtatgtgaacctggatgcctggaaccgggagctgctggacaagtactgtgtggcctacggcgtgggcatcatcggcttcttcaaggccaatgaaaacagcctgctgagcgcccagctgaagggcttccccctcttcctgcacagcaacctgggcctgaaggactgcagcatcaaccccaagagccccctgctgtatgtgacccggcccagcgaggtggagaagggcgtgctgcctggagaggactggacagtgttccagagcaaccacagcacctatgagcctgtgctgctggccaagaccaggagcagcgagagcatcccccacctgggcgcagatgctggcctgcacgccgccctgcacgccaccgtggtgcaggacctgggcctgcatgatggcatccagagggtgctgtttggaaacaacctgaacttctggctgcacaagctggtgtttgtggatgctgtggccttcctgaccgggaagaggctgagcctgcccctggaccgctacatcctggtggacattgatgacatctttgtgggcaaggagggcaccaggatgaaggtggaggatgtgaaggccctgtttgacacccagaatgagctgcgggcccacatccccaacttcaccttcaacctgggctacagcggcaagttcttccacacaggcaccaatgcagaagatgctggagatgacctgctgctgtcctatgtgaaggagttctggtggttcccccacatgtggagccacatgcagccccacctgttccacaaccagagcgtgctggccgagcagatggccctgaacaagaagtttgctgtggagcacggcatccccacagacatgggctatgctgtggccccccaccacagcggcgtgtaccctgtgcacgtgcagctgtatgaggcctggaagcaggtgtggagcatccgggtgaccagcacagaggagtacccccacctgaagccagcccgctaccgccggggcttcatccacaacggcatcatggtgctgccccggcagacctgtggcctcttcacccacaccatcttctacaatgagtacccaggcggcagcagcgagctggacaagatcatcaatggaggagagctgttcctgactgtgctgctgaaccccatcagcatcttcatgacccacctgagcaactatggaaatgaccggctgggcctgtacaccttcaagcacctggtgcgcttcctgcacagctggaccaacctgcggctgcagaccctgccccctgtgcagctggcccagaagtacttccagatcttcagcgaggagaaggaccccctgtggcaggacccctgtgaggacaagaggcacaaggacatctggagcaaggagaagacctgtgaccgcttccccaagctgctgatcatcggcccccagaagacaggcaccacagccctgtacctgttcctgggcatgcacccagacctgagcagcaactaccccagcagcgagacctttgaggagatccagttcttcaacggccacaactaccacaagggcatcgactggtacatggagttcttccccatccccagcaacaccaccagtgacttctactttgagaagagcgccaactactttgattctgaggtggccccccggcgggctgctgccctgctgcccaaggccaaggtgctgaccatcctgatcaacccagctgaccgggcctacagctggtaccagcaccagagggcccatgatgatcctgtggccctgaagtacaccttccatgaagtcatcacagctggcagtgatgccagcagcaagctgcgggccctgcagaaccgctgcctggtgcccggctggtacgccacccacatcgagcgctggctgagcgcctaccacgccaaccagatcctggtgctggatggcaagctgctgaggacagagcccgccaaggtgatggacatggtgcagaagttcctgggcgtgaccaacaccatcgactaccacaagaccctggcctttgaccccaagaagggcttctggtgccagctgctggagggcggcaagaccaagtgcctgggcaagagcaaaggaaggaagtacccagagatggacctggacagccgggccttcctgaaggactactacagagaccacaacatcgagctgagcaagctgctgtacaagatgggccagaccctgcccacctggctgcgggaggacctgcagaacaccaggtag

SEQ ID NO: 288260 - DNA, 8030 bp, Artificial Sequence
  derived and/or modified sequence
aacagtaatgccatttttcctggccctgggattaggtgcagccgtgttaaggagaggacattcgagagggcgtggcgaagtgaagaggaacctcacgccactgcctggagctccgccttagccccgtgggccccacggagtgagcggcatgcagcacccccgggcctgtccagtgtcctctggcctgctgccctgcacccccagaaggccctgacgccctggggcacttctgctctgcacaggaccacgcgggggtttgccatggtgacataaaggggcgcggaggaaggaaggagcgtgaccagcctgtggactgcgcccctggctgggaggaaggactgggggcccagatcctccactcccagtgccccacaagggcgtcgcttcctaagtctctgtgaatttgttggtcagtggacgattctcgtgtctcctcctgtgtggggccttggggtagccagggcaggccgggcctccggtggccaaggtctcggaggccaggatgcctgccctggcatgcctccggaggctgtgtcggcacgtgtccccgcaggctgtccttttcctgctgttcatcttctgcctgttcagcgttttcatctcggcctactacctatatggctggaagcgaggcctggagccctcggcggatgcccccgagcctgactgcggggacccgccgcctgtggcccccagtcgcctgctgccactcaagcctgtgcaggcagccaccccttcccgcacagacccgttggtgctggtctttgtggagagcctctactcgcaactgggccaggaggtggtggccatcctggagtccagccgcttcaaataccgcacagagattgcgccgggcaagggtgacatgcccacgctcactgacaagggccgtggccgcttcgccctcatcatctatgagaacatcctcaagtatgtcaacctggacgcctggaaccgggagctgctggacaagtactgtgtggcctacggcgtgggcatcattggcttcttcaaggccaatgagaacagcctgctgagtgcgcagctcaagggcttccccctgttcctgcactcaaacctgggcctgaaggactgcagcatcaaccccaagtccccgctgctctacgtgacgcgacctagcgaggtggagaaaggtgtgctccccggcgaggactggacggttttccagtcaaatcactccacctatgagccagtgctgctggccaagacgcgctcgtctgagtccatcccacacctgggcgcagacgccggcctgcatgctgcactgcacgccactgtggtccaggacctgggcctgcacgacggcatccagcgcgtgctgtttggcaacaacctgaacttctggctgcacaagcttgtcttcgtggatgccgtggccttcctcacggggaagcgcctctccctgccattggaccgctacatcctggtggacattgatgacatcttcgtgggcaaggagggcacacgcatgaaggtggaggacgtgaaggccctgtttgacacacagaacgaactacgcgcacacatcccaaacttcaccttcaacctgggctactcagggaaattcttccacacaggtaccaatgctgaggacgctggggatgatctgctgctgtcgtatgtgaaggagttctggtggttcccccacatgtggagccacatgcagccccaccttttccacaaccagtccgtgttggccgagcagatggccttgaacaagaagttcgctgtcgagcatggcattcccacagacatggggtatgcagtggcgccccaccactcgggcgtgtaccccgtgcacgtgcagctgtacgaggcttggaagcaggtgtggagcatccgcgtgaccagcacggaggagtacccccacctgaagccagcccgctaccgccgtggcttcatccacaatggcatcatggttctcccacggcagacctgcggcctcttcacacacaccatcttctacaacgagtaccctggcggctccagtgagctggacaagatcatcaacgggggcgagctcttcctcaccgtgctcctcaatcctatcagcatcttcatgacgcacctgtccaactatgggaatgaccgcctgggcctgtacaccttcaagcacctggtgcgcttcctgcactcctggacgaacctccggctgcagacactgccccctgtgcagttggcgcagaagtacttccagatcttctccgaggagaaggacccgctctggcaggacccctgcgaggacaaacgtcacaaagacatctggtccaaggagaagacgtgtgaccgcttcccaaagctcctcatcatcggcccccagaaaacaggcaccactgccctctacctgttcctgggcatgcaccctgacctaagcagcaactaccccagctctgagacctttgaggagatccagttttttaatggccacaactatcacaaaggcatcgactggtacatggagttcttccccatcccttccaacaccacctccgacttctactttgagaaaagcgccaactactttgattcagaagtggcgccccggcgggcagcagccctcttgcccaaagccaaggtcctgaccatcctcatcaaccccgcggaccgggcctattcctggtaccagcaccagcgagcccatgacgacccagtggccctaaagtacaccttccatgaggtgattaccgccggctctgacgcatcctcgaagctgcgtgccctccagaaccgctgcctggtccctggctggtacgccacccacatcgagcgctggctcagtgcctatcacgccaaccagattctggtcttggatggcaaactgcttcgcacagaacctgccaaagtgatggacatggtgcagaagttccttggggtgaccaacaccattgactaccacaaaaccttggcgtttgatccaaagaaaggattttggtgccaactgcttgaaggaggaaaaaccaagtgtctgggcaaaagcaagggccggaaatatcccgagatggacttggattcccgagccttcctgaaggactattaccgggaccacaacatcgagctctccaagctgctgtataagatgggccagacacttcccacttggctacgagaggacctccagaacaccaggtagccgtggccaccacagccagactgaacgtttgtgaaagctgggacatcccaccacacgctgagccagacctgcagagtgggaagctggaccagggcagctgcgcacttatgagcaatactctgtggaggtctggtggggctgggggagcacccaggcggatctgcaagcacctcggagcacccaccgctgggtctgcggcctaagggacctccctcgccagcagaggtccattccgttcccagctgctcctggggaggccgcttcctggtaggagggagtccacgagactcttttctgtccctcactgtgttccgccgactgtcccctctcgtcacccatcactccctgcttccgcagggcgcccctcagtattcgctgccatatgtccctgtcctccaggctgtaggggaggagagcctggccgggggagacagactggacatttccctgtttcgagccaggctcttccaaggggccagctgggtccccggagtcagtcctaggctggatgggagggtggccccctcaagaggactcccagcctccacatctggttcctaccttcacatctcaccctcccgttctggggaagaatttctggttcctacagtatccactccatcctcaaggcttcccgcagggccttggggcactgccttgccatcgggcccagttctccgggccccacctgcacccctttcttccccctgggatatgatgtgtggtgtttcctgtggtaaaagactgaggcaggccaggggtctgccagtaacatgttcccatgtacagacacggtccccacaccctcccagcctcaggcccaggcagacatgggcgagctggtgagactgccagccacggctttgcttagccacctgtggccgagggctctcagagacccccttaacctcccaaatactaagaagctaaaatattttaatattttgtttttttttttcttggtgccagagtttataccctgggtgctggggtcgcactgtgttatatatatatatatatatatataatgtgtatatatatatattctattttttttggttgggttcgtttttaattcagtcctacaaaatggtggtaagccccagtctcaggggtcaccctgtcttagagctagagatgaggtggcagggagggaggctgtgtcctcagtggcctggggctgagcagaccttaggaaggggccctccccagtgccgtggctgctctggggctaccccaggtgaacagaggtggtgagatgcgcagggaagaccagctctctccaggacatcgggctgcgtgaagtccagtgaccctgaggggattttggccaaaggaaacagccagggctgggctaggagagctggggtcaaaagctgccccacccactctccctcacatggtgctaggctgggagctgccctgagagctgggatgcccaccaaggcccacagaactgtctccaggcccttgtagacagtgggatctctgggctgatttctggttggggtctgctcctaccccaccccatttaacaatgtgaagtgactgaggctggggtgcctctccctggccccctccaactgccaaattctgcttccctctgaaccccaggaaatactttctggagaggcttgtcttgttcagaagactctagcatcttggggctggaaggtcctttgacgggtatgaaacaggtccagaaaggggaggtggcctgcttggccgacgtcatggagccagctgggagcagggctgagcgttgaacccgaggctcccggttccaagtcccatcgtgctcctcttccaatgccacactgcctctgagcccatccttgggaccctactctgtgccaggttcctgtcccttcctccgtcacagcatggtcattccaggatatggggacaaaccactccttcccagccagggtgcctttgagccttctcattccgaggtctgcgtttgcatccctgtcgtgttctccctcgaggggtccttccccagcctgtgggggcctgggtctgttctgagctgattcccttttctccagttctctgctgggatgaagaaagttggacactcagtgggaccagctgcaggtggtttcactgtgtacacagcagtgtccccatcatgcctctcaatggggcctgcaagcctgggaacttgggcatcgttgggccagcaggatgagcagcaaagggtctgaggacagggtggcatgtctgcttgtgtgctcatgaagacatgcccacgccatggagccaggggcttatagagaggggcagtgacttccagagtcccatccgtcagtgaggggactgggctgcgggatgggtgaggatcttacagctcccaggttcggaaatctaccctctaggcctggaggcctctctcgcagagcatggaaggcaggagaggtgggctggcctagggcaggagctccacttctctctgcctctggctatgggaaggagcaggcggttggaaatcctgtgacagcagagatcttctggatttttgcctggacccttctgcaagcctggagactggacctgccacatgttccaagtctgtctgcctaggtcactgctgccacttctcctcccactaacagacctttcttgaagacccactaggtccagacactgccgggacttgcaggtatggggggtagaaggagaggcagataagctgcctggggggctgttagctaatgggtacaaggacaccccctcccgagaagagaagccacagatgagtgggccagcgaggccagtcttcaatgtccactaattcactctaagcatttggccaaaaaaaggagagagaaataactgaaattgttcaggtggctccatcgtctattctgtggtcccctccatgagcctttgccccagggtgggtgcaggtgcgagtgtcacctgcagctgcctcagtcattcagagttccagagccttctgtggtggagcatcctgctgcttggaggatgagtctgaagtttaaaaatgggccttttctgagcccccctgatgagcagtcagtgcttctgggcccagctaaggaagccatctgttcccagcagaggagagctgctgcgctgacctgcagaggttggtggtcccagcacagagctgtgcccatgggcttgttagtgggaaaagcaaatacaacaatgttttaccaaacatttaattatgaatgcccactccccagcatctagatctaaaattattaacattttgccacattctttttctctctctgtgtatgtatatgttttctctgtcctaatttaaaagtacattgcaaacatcatgaaacttgatccctgaaagcttcagcctgcatctcctaagagttagggcattgtcctacacattggcccagtatcacagccaagacgagaagtcatttcccagcgatgtctgctatctaatctgtattcaaatccccccaattgtctcccaggtaacttatgtgtctggttttggaatcagcatccagtcacggtgcacacattgcattttctaactatgtttttaaaacctctttgaatgctgaaaggtcttccctcagctcactttgagtttttaaatgacattgtttttgaggccctaggcctgctgtctttttgaagccccacattctgaatttgtcagattgtttgctcatggtgtcgcataaccacttcttctatcccctgtactttcaaggataatttaggctacatgagattttgccttttgtgctgacttgacagcttcacttctgcctaagatgcgcctccactgtcacctgtaccaagtgccaaaacagcagaggggccagttagagcaagagctctgggggggccggaaagtctccctggagaaggccgtaatatctgggccttggaaggaaggacacagggctctggaaggaggaggctgcatgcctgaaggctgggccttcgaccctggggatgggccacagggcaccaaacacatcatatgtctctctctttctattttggggtcccagggttttcatttcctggagacccgtggtctgtgtgcactggagcagagccaggctctcagttgcagcagggaaaagcctacatggggaactgcctcccgcaagctgtggtgtgagaagagccctggctggcagcaggagctgtgaagtttcatcccagccgggtgcatttagtagctgcctgaccatcttcctcccaggccctcagtttcttcatctgtagaatgagcagataggggccacagcagggattttcacacatcaaaggaggcagcctctgctctagttgatgtgaggatgagggggcggcctagaccccctgctgcccaggccgttgaggcaacactgggttcctggcttgacagctgtgggctggctgcccttgccagctcagacggctggcgagttttcagcttccctaagggactggcatagggttttgtggggtcaatgccaggaacctgggggaaactggatgcgttttatcctaagaagttcatccctcctgctcttactgtttccggccctggaggagaatgagggaggagagggttttctatgactgtgttagcttttattattagcaagagggctccttttgtaatttgtgcatgaaattcatgtcatttcctgggagaggagagggccgactggagagggtggggggcacactggggaagcaggcagaggtttccttcccttgtaggggggtggggagagtggggagagggggtgctatccagttcgcctgatgagggctctcgaaccagccgttttgggttgtgttaaaggtgagaccttcctccattaatgtacaatctcgaactaactgctaataaagtggggttctgtttgta

SEQ ID NO: 288261 - DNA, 2649 bp, Artificial Sequence
  derived and/or modified sequence
atgcccgccctggcctgcctgcggcggctgtgccggcacgtgagcccccaggctgtgttgttcctcctcttcatcttctgtttattctcagtgttcatttctgcctactatttatatgggtggaagcgcgggctagagccttctgcagatgctcctgagcctgattgtggagaccctccgcctgtggccccgtcccggctgctacccctgaagcctgtacaggcagcaacaccatcacgaacagacccattagtcctcgtgttcgtagagagcctctattcccaattagggcaagaggtcgtggctattctggaatccagtagatttaagtacaggaccgagatagctcctgggaagggagacatgcccacactgaccgacaaaggccggggccgcttcgcgctgattatctatgaaaatattcttaagtacgtgaatctcgacgcctggaaccgggagctgctcgacaaatattgcgtcgcctacggggtgggaatcatcggatttttcaaggcaaacgaaaatagcttgctttccgcccagcttaagggttttccactgttcctgcatagtaacctgggactcaaggattgttccatcaacccaaaaagtcctttgttgtacgtcactcggccttcagaagttgagaagggtgtcctgcctggcgaagattggacagtcttccagtctaatcactcgacatacgaacctgtattactggcaaagacgaggtcgtcggaaagcatcccacatctcggtgctgacgcggggctccacgcagcacttcacgctaccgtggtgcaggacctggggctgcatgatggcatacagagagtcctatttggcaacaatctcaacttttggcttcacaagttggtgttcgttgacgctgtcgcatttctgaccggaaaacgtctgtctctgcctctggatcgatatatcctcgttgacatcgatgacatctttgtaggaaaggagggcacacgaatgaaagtggaagatgtgaaggctttatttgatacccagaatgagcttcgagcccacatcccaaattttacattcaatctggggtactcaggcaagtttttccacaccggaaccaacgcagaggatgctggtgacgatctgctcctttcttatgtgaaagaattttggtggttcccccatatgtggtcccacatgcagccccacctgtttcataaccagtcagtactcgccgagcaaatggctctgaataagaagtttgccgtggaacacggcatccctactgacatgggctatgcagttgcccctcaccatagcggagtgtatcccgtacatgtgcagctgtacgaggcgtggaagcaggtgtggagtattagggtgaccagcactgaggagtaccctcacctcaaacccgcccggtataggcggggtttcatacataacgggataatggtcttaccccggcagacttgcgggctctttactcataccatattctataatgaatacccagggggttcatccgagctggacaagattattaatggaggggagctcttcctgactgttctgctgaatccgattagtatcttcatgactcatctatctaactatggaaatgacagattagggctgtacaccttcaagcatctggttcggtttctccacagctggacaaacctcaggcttcagactttacctcccgtccaactggcacagaagtattttcaaatcttctccgaggaaaaagaccccctctggcaggatccgtgtgaagataaacgtcacaaggacatctggtctaaggaaaaaacctgtgaccgatttccaaagttgctcataatcgggcctcagaagactgggaccactgccttgtacttgtttctgggtatgcacccagatctttcttccaactacccttcttccgaaacatttgaggagatccagtttttcaatggccataattaccacaagggcatcgactggtatatggaatttttccctatcccatcgaatacgacgagcgatttttactttgagaaaagtgccaactacttcgattctgaggtggccccccggcgagccgccgcactacttcccaaagctaaagtcttgacaatcctgattaacccagccgaccgcgcatattcctggtatcagcaccagcgcgcacacgacgaccctgtggctttgaaatacaccttccacgaggtcatcactgctggatccgacgcctccagcaaactgcgggcgcttcagaacagatgcctcgttccgggatggtacgctacccacattgagcggtggttgagcgcctatcacgccaatcagatcctggtccttgacggtaagctcctgagaacagaaccagctaaagtgatggacatggtgcagaagttcctcggcgttacaaatactattgattaccataaaaccctcgctttcgaccctaagaagggattctggtgccagctcctggaaggagggaagactaaatgcctgggaaagtcaaaaggccgtaaataccccgagatggaccttgactctcgagcttttcttaaggactattaccgggatcataatatcgaactgagcaaactgctctataagatggggcagactctgccaacctggctcagagaagacctgcagaacaccagatag

SEQ ID NO: 288262 - DNA, 2649 bp, Artificial Sequence
  derived and/or modified sequence
atgccagctctcgcttgcctcaggaggctttgccggcacgtttccccccaggctgtcttattcctgctgttcatcttctgcttattcagtgtgtttatttcagcttactacctgtatggatggaaaaggggattggagccaagcgccgacgcccctgagcctgactgcggcgatcctccacccgtagcccctagccgcctgttgcccctgaaacctgtgcaagccgctacgccatccaggaccgacccactggttttggtctttgttgagtccctgtacagccagttgggccaggaagtagtggcaattctggaatccagccgcttcaagtaccgcactgaaattgcacctggcaagggagatatgcccacactgaccgacaagggccgaggaagatttgcattgattatatacgaaaatattctgaagtacgtgaatctcgacgcctggaaccgggaactcctggacaaatactgtgtggcttacggcgtgggaattattggtttctttaaggcaaatgagaacagcctgcttagcgcccagttaaaagggtttccattgtttctccacagcaacctcggcttaaaggattgttccattaaccccaagtcacccttactctatgtgactcgaccatccgaggtcgagaagggcgtattgccaggagaggattggacagtctttcagagtaatcacagcacatatgaaccagtcctccttgctaagacaagatcaagcgagtctatcccacacctgggagcggatgcagggctacatgcagcgttacacgcaaccgttgtgcaggacctgggcctccacgacggtatacagagagttctctttggaaacaacctcaatttctggcttcacaagttggtgttcgttgacgcagttgctttcctgacaggcaaaagactgtccctgcccctggatcggtacattctggtagacattgatgatatatttgtaggtaaggaaggaacaagaatgaaggttgaggatgtgaaagccctgttcgatactcagaacgaattgagagcgcacattcccaactttacatttaatttaggttattccggcaagtttttccacactgggactaatgccgaagacgctggggatgatctgctgttgagttacgttaaagaattctggtggttcccacacatgtggtcccacatgcagccacatctttttcacaatcagagtgtactagctgagcaaatggctctcaacaagaagttcgcggtcgagcatggaatcccaacggatatggggtatgctgtagcccctcatcattcaggagtctatcctgttcatgtgcagctgtatgaggcctggaagcaggtgtggagtattagagtgacttctacggaggagtaccctcatttgaaacctgcccgataccgcagggggtttatccacaacgggataatggtgttgccaagacaaacttgcggtctttttacacacactattttctacaatgagtacccagggggtagctctgagctagataagattatcaatggaggggaactctttctgacagtgctactgaacccgatctctatctttatgactcatctgagcaactatggcaatgatcgactgggactgtacacatttaaacacctggttagattcttacacagttggacaaacttgagactgcagaccctgccgcctgtccaactggcacagaagtatttccagatcttctccgaggaaaaggaccccctctggcaggacccctgcgaggataaaaggcacaaggatatttggagcaaggagaaaacctgtgacagattcccaaagctgctaattattggtccccagaagaccggaacaacagctctgtatctgtttctggggatgcaccccgacctgtcatccaactacccttcctcagaaaccttcgaagagatccagttctttaatggccacaactaccacaagggaattgattggtacatggagttttttccgattccttcaaacaccacatctgatttctacttcgagaagtcggcgaactatttcgactccgaggtcgccccacgacgagctgccgcacttctgccaaaagccaaggtcttgacaatcctaatcaacccagccgatagggcatactcctggtatcagcaccaaagggcccacgatgatcccgtggccttaaagtacacctttcacgaggttatcactgcgggatctgatgctagcagcaagctgcgggcacttcaaaataggtgcctggtccctggctggtacgctacacatatcgagcgatggctttccgcctatcatgcgaaccagatcctggtgttagatggaaagctgctgcgcacggagcccgctaaggtcatggatatggttcaaaaattcctcggtgttactaataccatcgattaccataagacactggcctttgacccaaaaaagggcttttggtgccagctgctagagggaggtaaaaccaagtgtctcggtaaatccaagggaagaaagtatcccgagatggacttagatagccgggcattcctcaaagattactatcgtgatcacaacatcgagttaagcaagctcctatacaaaatgggtcagaccctgcccacctggctgcgggaagatctgcagaatacgaggtag

SEQ ID NO: 288263 - DNA, 2649 bp, Artificial Sequence
  derived and/or modified sequence
atgcccgccctggcctgcctgagaagactgtgcagacacgtgagcccccaggccgtgctgttcctgctgttcatcttctgcctgttcagcgtgttcatcagcgcctactacctgtacggctggaagagaggcctggagcccagcgccgacgcccccgagcccgactgcggcgaccccccccccgtggcccccagcagactgctgcccctgaagcccgtgcaggccgccacccccagcagaaccgaccccctggtgctggtgttcgtggagagcctgtacagccagctgggccaggaggtggtggccatcctggagagcagcagattcaagtacagaaccgagatcgcccccggcaagggcgacatgcccaccctgaccgacaagggcagaggcagattcgccctgatcatctacgagaacatcctgaagtacgtgaacctggacgcctggaacagagagctgctggacaagtactgcgtggcctacggcgtgggcatcatcggcttcttcaaggccaacgagaacagcctgctgagcgcccagctgaagggcttccccctgttcctgcacagcaacctgggcctgaaggactgcagcatcaaccccaagagccccctgctgtacgtgaccagacccagcgaggtggagaagggcgtgctgcccggcgaggactggaccgtgttccagagcaaccacagcacctacgagcccgtgctgctggccaagaccagaagcagcgagagcatcccccacctgggcgccgacgccggcctgcacgccgccctgcacgccaccgtggtgcaggacctgggcctgcacgacggcatccagagagtgctgttcggcaacaacctgaacttctggctgcacaagctggtgttcgtggacgccgtggccttcctgaccggcaagagactgagcctgcccctggacagatacatcctggtggacatcgacgacatcttcgtgggcaaggagggcaccagaatgaaggtggaggacgtgaaggccctgttcgacacccagaacgagctgagagcccacatccccaacttcaccttcaacctgggctacagcggcaagttcttccacaccggcaccaacgccgaggacgccggcgacgacctgctgctgagctacgtgaaggagttctggtggttcccccacatgtggagccacatgcagccccacctgttccacaaccagagcgtgctggccgagcagatggccctgaacaagaagttcgccgtggagcacggcatccccaccgacatgggctacgccgtggccccccaccacagcggcgtgtaccccgtgcacgtgcagctgtacgaggcctggaagcaggtgtggagcatcagagtgaccagcaccgaggagtacccccacctgaagcccgccagatacagaagaggcttcatccacaacggcatcatggtgctgcccagacagacctgcggcctgttcacccacaccatcttctacaacgagtaccccggcggcagcagcgagctggacaagatcatcaacggcggcgagctgttcctgaccgtgctgctgaaccccatcagcatcttcatgacccacctgagcaactacggcaacgacagactgggcctgtacaccttcaagcacctggtgagattcctgcacagctggaccaacctgagactgcagaccctgccccccgtgcagctggcccagaagtacttccagatcttcagcgaggagaaggaccccctgtggcaggacccctgcgaggacaagagacacaaggacatctggagcaaggagaagacctgcgacagattccccaagctgctgatcatcggcccccagaagaccggcaccaccgccctgtacctgttcctgggcatgcaccccgacctgagcagcaactaccccagcagcgagaccttcgaggagatccagttcttcaacggccacaactaccacaagggcatcgactggtacatggagttcttccccatccccagcaacaccaccagcgacttctacttcgagaagagcgccaactacttcgacagcgaggtggcccccagaagagccgccgccctgctgcccaaggccaaggtgctgaccatcctgatcaaccccgccgacagagcctacagctggtaccagcaccagagagcccacgacgaccccgtggccctgaagtacaccttccacgaggtgatcaccgccggcagcgacgccagcagcaagctgagagccctgcagaacagatgcctggtgcccggctggtacgccacccacatcgagagatggctgagcgcctaccacgccaaccagatcctggtgctggacggcaagctgctgagaaccgagcccgccaaggtgatggacatggtgcagaagttcctgggcgtgaccaacaccatcgactaccacaagaccctggccttcgaccccaagaagggcttctggtgccagctgctggagggcggcaagaccaagtgcctgggcaagagcaagggcagaaagtaccccgagatggacctggacagcagagccttcctgaaggactactacagagaccacaacatcgagctgagcaagctgctgtacaagatgggccagaccctgcccacctggctgagagaggacctgcagaacaccagatag

SEQ ID NO: 288264 - protein, 1375 aa, Artificial Sequence
  derived and/or modified sequence
MEPSPSPAPQAQPPKPVPKPRTVFGGLSGPATTQRPGLSPALGGPGVSRSPEPSPRPPPLPTSSSEQSSALNTVEMMPNSIYFGLDSRGRAQAAQDKAPDSSQISAPTPALRPTTGTVHIMDPGCLYYGVQPVGTPGAPDRRESRGVCQGRAEHRLSRQDLEAREDAGYASLELPGDSTLLSPTLETEETSDDLISPYASFSFTADRLTPLLSGWLDKLSPQGNYVFQRRFVQFNGRSLMYFGSDKDPFPKGVIPLTAIEMTRSSKDNKFQVITGQRVFVFRTESEAQRDMWCSTLQSCLKEQRLLGHPRPPQPPRPLRTGMLELRGHKAKVFAALSPGELALYKSEQAFSLGIGICFIELQGCSVRETKSRSFDLLTPHRCFSFTAESGGARQSWAAALQEAVTETLSDYEVAEKIWSNRANRQCADCGSSRPDWAAVNLGVVICKQCAGQHRALGSGISKVQSLKLDTSVWSNEIVQLFIVLGNDRANRFWAGTLPPGEGLHPDATPGPRGEFISRKYRLGLFRKPHPQYPDHSQLLQALCAAVARPNLLKNMTQLLCVEAFEDPSPGVYNEVVVRATYSGFLYCSPVSNKAGPSPPRRGRDAPPRLWCVLGAALEMFASENSPEPLSLIQPQDIVCLGVSPPPTDPGDRFPFSFELILAGGRIQHFGTDGADSLEAWTSAVGKWFSPLSCHQLLGPGLLRLGRLWLRSPSHTAPAPGLWLSGFGLLRGDHLFLCSAPGPGPPAPEDMVHLRRLQEISVVSAADTPDKKEHLVLVETGRTLYLQGEGRLDFTAWNAAIGGAAGGGGTGLQEQQMSRGDIPIIVDACISFVTQHELPQKNQRLEKYKDVIGCLPRVNRRTLATLIGHLYRVQKCAALNQMCTRNLALLFAPSVFQTDGRGEHEVRVLQELIDGYISVFDIDSDQVAQIDLEVSLITTWKDVQLSQAGDLIMEVYIEQQLPDNCVTLKVSPTLTAEELTNQVLEMRGTAAGMDLWVTFEIREHGELERPLHPKEKVLEQALQWCQLPEPCSASLLLKKVPLAQAGCLFTGIRRESPRVGLLRCREEPPRLLGSRFQERFFLLRGRCLLLLKEKKSSKPEREWPLEGAKVYLGIRKKLKPPTPWGFTLILEKMHLYLSCTDEDEMWDWTTSILKAQHDDQQPVVLRRHSSSDLARQKFGTMPLLPIRGDDSGATLLSANQTLRRLHNRRTLSMFFPMKSSQGSVEEQEELEEPVYEEPVYEEVGAFPELIQDTSTSFSTTREWTVKPENPLTSQKSLDQPFLSKSSTLGQEERPPEPPPGPPSKSSPQARGSLEEQLLQELSSLILRKGETTAGLGSPSQPSSPQSPSPTGLPTQTPGFPTQPPCTSSPPSSQPLT

SEQ ID NO: 288265 - DNA, 4128 bp, Artificial Sequence
  derived and/or modified sequence
atggagcccagccccagccccgccccccaggcccagccccccaagcccgtgcccaagcccagaaccgtgttcggcggcctgagcggccccgccaccacccagagacccggcctgagccccgccctgggcggccccggcgtgagcagaagccccgagcccagccccagacccccccccctgcccaccagcagcagcgagcagagcagcgccctgaacaccgtggagatgatgcccaacagcatctacttcggcctggacagcagaggcagagcccaggccgcccaggacaaggcccccgacagcagccagatcagcgcccccacccccgccctgagacccaccaccggcaccgtgcacatcatggaccccggctgcctgtactacggcgtgcagcccgtgggcacccccggcgcccccgacagaagagagagcagaggcgtgtgccagggcagagccgagcacagactgagcagacaggacctggaggccagagaggacgccggctacgccagcctggagctgcccggcgacagcaccctgctgagccccaccctggagaccgaggagaccagcgacgacctgatcagcccctacgccagcttcagcttcaccgccgacagactgacccccctgctgagcggctggctggacaagctgagcccccagggcaactacgtgttccagagaagattcgtgcagttcaacggcagaagcctgatgtacttcggcagcgacaaggaccccttccccaagggcgtgatccccctgaccgccatcgagatgaccagaagcagcaaggacaacaagttccaggtgatcaccggccagagagtgttcgtgttcagaaccgagagcgaggcccagagagacatgtggtgcagcaccctgcagagctgcctgaaggagcagagactgctgggccaccccagacccccccagccccccagacccctgagaaccggcatgctggagctgagaggccacaaggccaaggtgttcgccgccctgagccccggcgagctggccctgtacaagagcgagcaggccttcagcctgggcatcggcatctgcttcatcgagctgcagggctgcagcgtgagagagaccaagagcagaagcttcgacctgctgaccccccacagatgcttcagcttcaccgccgagagcggcggcgccagacagagctgggccgccgccctgcaggaggccgtgaccgagaccctgagcgactacgaggtggccgagaagatctggagcaacagagccaacagacagtgcgccgactgcggcagcagcagacccgactgggccgccgtgaacctgggcgtggtgatctgcaagcagtgcgccggccagcacagagccctgggcagcggcatcagcaaggtgcagagcctgaagctggacaccagcgtgtggagcaacgagatcgtgcagctgttcatcgtgctgggcaacgacagagccaacagattctgggccggcaccctgccccccggcgagggcctgcaccccgacgccacccccggccccagaggcgagttcatcagcagaaagtacagactgggcctgttcagaaagccccacccccagtaccccgaccacagccagctgctgcaggccctgtgcgccgccgtggccagacccaacctgctgaagaacatgacccagctgctgtgcgtggaggccttcgaggaccccagccccggcgtgtacaacgaggtggtggtgagagccacctacagcggcttcctgtactgcagccccgtgagcaacaaggccggccccagcccccccagaagaggcagagacgccccccccagactgtggtgcgtgctgggcgccgccctggagatgttcgccagcgagaacagccccgagcccctgagcctgatccagccccaggacatcgtgtgcctgggcgtgagccccccccccaccgaccccggcgacagattccccttcagcttcgagctgatcctggccggcggcagaatccagcacttcggcaccgacggcgccgacagcctggaggcctggaccagcgccgtgggcaagtggttcagccccctgagctgccaccagctgctgggccccggcctgctgagactgggcagactgtggctgagaagccccagccacaccgcccccgcccccggcctgtggctgagcggcttcggcctgctgagaggcgaccacctgttcctgtgcagcgcccccggccccggcccccccgcccccgaggacatggtgcacctgagaagactgcaggagatcagcgtggtgagcgccgccgacacccccgacaagaaggagcacctggtgctggtggagaccggcagaaccctgtacctgcagggcgagggcagactggacttcaccgcctggaacgccgccatcggcggcgccgccggcggcggcggcaccggcctgcaggagcagcagatgagcagaggcgacatccccatcatcgtggacgcctgcatcagcttcgtgacccagcacgagctgccccagaagaaccagagactggagaagtacaaggacgtgatcggctgcctgcccagagtgaacagaagaaccctggccaccctgatcggccacctgtacagagtgcagaagtgcgccgccctgaaccagatgtgcaccagaaacctggccctgctgttcgcccccagcgtgttccagaccgacggcagaggcgagcacgaggtgagagtgctgcaggagctgatcgacggctacatcagcgtgttcgacatcgacagcgaccaggtggcccagatcgacctggaggtgagcctgatcaccacctggaaggacgtgcagctgagccaggccggcgacctgatcatggaggtgtacatcgagcagcagctgcccgacaactgcgtgaccctgaaggtgagccccaccctgaccgccgaggagctgaccaaccaggtgctggagatgagaggcaccgccgccggcatggacctgtgggtgaccttcgagatcagagagcacggcgagctggagagacccctgcaccccaaggagaaggtgctggagcaggccctgcagtggtgccagctgcccgagccctgcagcgccagcctgctgctgaagaaggtgcccctggcccaggccggctgcctgttcaccggcatcagaagagagagccccagagtgggcctgctgagatgcagagaggagccccccagactgctgggcagcagattccaggagagattcttcctgctgagaggcagatgcctgctgctgctgaaggagaagaagagcagcaagcccgagagagagtggcccctggagggcgccaaggtgtacctgggcatcagaaagaagctgaagccccccaccccctggggcttcaccctgatcctggagaagatgcacctgtacctgagctgcaccgacgaggacgagatgtgggactggaccaccagcatcctgaaggcccagcacgacgaccagcagcccgtggtgctgagaagacacagcagcagcgacctggccagacagaagttcggcaccatgcccctgctgcccatcagaggcgacgacagcggcgccaccctgctgagcgccaaccagaccctgagaagactgcacaacagaagaaccctgagcatgttcttccccatgaagagcagccagggcagcgtggaggagcaggaggagctggaggagcccgtgtacgaggagcccgtgtacgaggaggtgggcgccttccccgagctgatccaggacaccagcaccagcttcagcaccaccagagagtggaccgtgaagcccgagaaccccctgaccagccagaagagcctggaccagcccttcctgagcaagagcagcaccctgggccaggaggagagaccccccgagcccccccccggcccccccagcaagagcagcccccaggccagaggcagcctggaggagcagctgctgcaggagctgagcagcctgatcctgagaaagggcgagaccaccgccggcctgggcagccccagccagcccagcagcccccagagccccagccccaccggcctgcccacccagacccccggcttccccacccagcccccctgcaccagcagcccccccagcagccagcccctgacctag

SEQ ID NO: 288266 - DNA, 4128 bp, Artificial Sequence
  derived and/or modified sequence
atggagccaagcccttcgcctgccccccaagcacagccccctaagccggtgcccaagcctagaactgtgttcgggggactgagtgggcccgccactacacagaggcctggtttaagccctgccctgggggggcctggcgtgtcgcggtcccccgagccgagtcctagacccccacctctacccacatcctctagcgagcagagtagcgcccttaacactgtggaaatgatgcctaatagcatttactttggattggatagcaggggtcgcgctcaggccgcacaagataaagcgcctgacagctcccagatttcagcacctacccctgccctgcgccccaccactggcacagtccatattatggaccccgggtgcctgtattatggggtccagcccgtgggcacaccaggcgcccctgatagaagggaaagcagaggagtgtgtcagggaagagcggaacatcgattgtcaagacaagatttggaggcccgggaggacgccggctacgcgtcactggagctgccaggagacagcacactcctgtcgcccaccttggagactgaggagacctcagacgacttgatttccccatacgcctcattctccttcacagccgatagactgactccactacttagcgggtggctcgacaaactctctccacagggcaactacgtgttccaacggcgttttgtccagtttaatggtcggagcctaatgtattttggttccgacaaagatcctttcccaaagggagtgattcccctaaccgcaattgaaatgacaagatcgagcaaggataataagtttcaggttattactggccaaagggttttcgtgttcaggacggagagcgaggcgcagcgcgatatgtggtgttccacactccaatcatgtttgaaggagcaaaggctgctcggccatccacgaccacctcagcctcccaggcctttgaggacaggcatgttagaactccgtggccacaaggcaaaagtgtttgctgcgttaagcccgggcgaattggctctttataagtcagagcaggcattctccttgggaatcggaatctgtttcatagaactacagggatgcagtgtaagggagactaaatctcgttccttcgacctgcttacaccacacaggtgtttcagtttcacagcagaatcagggggagctcgccaatcttgggccgcagcactgcaggaggccgtaaccgagactctgtccgactatgaggtggccgaaaagatttggagtaatagagccaataggcagtgcgctgattgtggctcttcccgcccagattgggccgctgtgaacctgggggttgttatctgtaagcagtgtgcaggacaacaccgtgccctcggcagcggcatttccaaagtgcagtcactgaaattggatacctccgtgtggtccaacgagatagtccagttattcatcgttctaggtaacgatcgtgctaacaggttttgggccggcaccctccctcccggcgaggggttgcaccccgacgctaccccgggacctaggggcgagttcatttcaaggaagtacaggctggggctgtttcggaagccacaccctcaatatcctgatcattcacagctcctgcaggcgctatgcgctgcggtggccaggcctaatttattaaagaacatgacccagctgctctgtgtcgaggctttcgaggacccctcccccggcgtgtataatgaggtggttgtccgcgccacgtactcaggtttcttatattgctccccagtatcaaacaaagccggcccctcaccaccgcggaggggaagggatgcaccaccccgtctgtggtgtgtgttgggtgccgccttggagatgtttgccagcgaaaacagtcccgagcctctcagcctcatacagcctcaggatatagtgtgtctgggagtgtctcctcctcccacggaccccggggaccgcttccccttttccttcgagttgatcctcgctggcggacgcatccaacattttggcaccgatggggcggattcgcttgaagcctggacatctgcagtgggaaagtggttcagccccctgagctgccaccaactgctgggacctggattattgaggcttggacgtctctggttgaggagcccttcacacacggcccctgcacccgggctgtggctgtcggggttcgggctgttgcgtggagaccacctcttcctctgctcagctcctggacccggaccacccgcaccggaggacatggtgcatctgaggcggctgcaggagatcagtgttgtttctgccgctgatactcctgacaagaaggagcatctggttctggtagagaccgggagaactctgtacctacagggcgagggacgccttgacttcacagcatggaatgcagcgatcggcggggccgctggcggtggcggaaccgggctgcaggaacagcagatgagccgcggggatatccctattatcgtcgacgcgtgcatcagcttcgttactcaacatgagctcccccaaaagaaccagaggctcgagaaatacaaggacgtcataggttgtctgccccgggtcaacagaaggactctggccaccctaattggtcacctctaccgagtgcagaaatgtgctgctcttaatcagatgtgtacccggaatttggccctgctgttcgccccctccgttttccagacggacggcaggggggaacacgaggtgcgcgtgctgcaggaactcattgacggatatatatcagtttttgatatagatagtgatcaggtagcccagattgacctcgaggtctctttaattaccacctggaaggatgtgcagctgtctcaggccggggacctcatcatggaagtctatatagagcagcagctgccagataattgtgtgactctaaaggtatctccgacgctcacagctgaagagttgactaaccaggtcctggaaatgagggggaccgccgcgggcatggacctgtgggtcacattcgaaattagggaacacggagaactggaaaggccgctgcaccccaaagagaaggtacttgaacaggcactgcagtggtgtcagctgcctgagccctgttctgcctccttgctactgaagaaagtgccgttggcgcaagctggatgcctgtttactggcatccgaagagaatcaccgcgggtaggactgctacggtgtcgcgaggagccgcccagactgctgggctcgagattccaggaacgcttcttccttctgcgcgggagatgtctactgctgctgaaagaaaaaaagtcatcaaagccggaaagggaatggcccctagaaggggccaaggtctacctggggatcaggaagaagctaaaaccgcctaccccgtggggttttacattgattttggaaaagatgcatctgtacctgagctgtaccgatgaagatgagatgtgggactggaccacttcaatactgaaggcccagcacgatgaccagcaacccgtagttctgcgtcggcatagctcttccgacttagctagacagaagtttggtactatgcctctgctccctatccgcggcgatgattccggcgcaacgttgttatcggcaaatcagacattgcgcagactgcacaacagaaggaccctatccatgttctttcccatgaaatcctcacagggctccgtggaggagcaggaggagctggaggaaccagtttacgaagagccagtctatgaagaggtgggagcttttcccgaactcatccaggatacgagtacgagtttttcaacaaccagggagtggactgtgaagccagagaaccccttgactagccagaagtccctcgatcagccatttctaagcaaatccagtacactgggacaggaggaaagacccccagaacctcctccgggaccgccatcaaagtctagtccacaggcacgtggcagcctggaggaacagctgcttcaggagttgagctcattgatcctgcggaaaggggagaccacagctggactggggagccccagccagccatcctcccctcaatctcccagcccgacaggccttcctactcagactccgggcttccccactcaacctccttgtactagctcccctccatccagccagcctctcacttag

SEQ ID NO: 288267 - DNA, 4128 bp, Artificial Sequence
  derived and/or modified sequence
atggagcccagccccagccctgccccccaggcccagccccccaagcctgtgcccaagcccaggacagtgtttggaggcctgagcggccctgccaccacccagaggcctggcctgagccctgccctgggcggccctggggtgagccgcagccctgagcccagcccccggcccccacccctgcccaccagcagcagcgagcagagcagcgccctgaacacagtggagatgatgcccaacagcatctacttcggcctggacagccggggccgggcccaggccgcccaggacaaggccccagacagcagccagatcagcgcccccaccccagccctgcggcccaccactggaacagtgcacatcatggaccccggctgcctgtactacggcgtgcagcctgtgggcacccctggggccccagacagaagagagagccggggcgtgtgccagggccgggcagagcaccggctgagccggcaggacctggaggccagagaagatgctggctacgccagcctggagctgcccggggacagcaccctgctgagccccaccctggagacagaggagaccagtgatgacctgatcagcccctatgccagcttctccttcaccgctgaccggctgacccccctgctgagcggctggctggacaagctgagcccccagggcaactacgtgttccagaggagatttgtgcagttcaacggccgcagcctgatgtacttcggcagtgacaaggaccccttccccaagggcgtcatccccctgacagccatcgagatgaccaggagcagcaaggacaacaagttccaggtgatcaccggccagagggtgtttgtgttcagaacagaaagtgaggcccagagggacatgtggtgcagcaccctgcagagctgcctgaaggagcagaggctgctgggccaccccaggcctccccagcccccccggcccctgaggacaggcatgctggagctgcggggccacaaggccaaggtgtttgctgccctgagccctggagagctggccctgtacaagtctgagcaggccttcagcctgggcatcggcatctgcttcatcgagctgcagggctgcagcgtgcgggagaccaagagccgcagctttgacctgctgaccccccaccgctgcttctccttcaccgctgagagcggcggggcccggcagagctgggccgccgccctgcaggaggccgtgacagagaccctgagtgactatgaggtggccgagaagatctggagcaacagagccaaccggcagtgtgccgactgtggcagcagcaggccagactgggccgctgtgaacctgggcgtggtgatctgcaagcagtgtgccggccagcaccgggccctgggcagcggcatcagcaaggtgcagagcctgaagctggacacctctgtgtggagcaatgaaattgtgcagctgttcatcgtgctgggcaatgaccgggccaaccgcttctgggccggcaccctgcccccaggagagggcctgcacccagatgccaccccaggccccagaggagagttcatcagcaggaagtaccgcctgggcctcttcaggaagccccacccccagtacccagaccacagccagctgctgcaggccctgtgtgccgctgtggcccggcccaacctgctgaagaacatgacccagctgctgtgtgtggaggcctttgaggaccccagccctggggtgtacaatgaggtggtggtgcgggccacctacagcggcttcctgtactgcagccctgtgagcaacaaggccggccccagccccccccggcggggcagagatgccccaccccggctgtggtgtgtgctgggcgccgccctggagatgtttgccagcgagaacagccctgagcccctgagcctcatccagccccaggacatcgtgtgcctgggcgtgagccccccacccacagatcctggggaccgcttccccttctcctttgagctgatcctggccggcggccgcatccagcactttggaacagatggagctgacagcctggaggcctggaccagcgctgtgggcaagtggttcagccccctgagctgccaccagctgctgggccctggcctgctgcggctgggccgcctgtggctgcggagccccagccacacagccccagcccctggcctgtggctgagcggcttcggcctgctgcggggggaccacctgttcctgtgcagcgcccctggccctggccccccagcccctgaggacatggtgcacctgcggcggctgcaggagatctctgtggtgtctgctgctgacaccccagacaagaaggagcacctggtgctggtggagactggaagaaccctgtacctgcagggcgagggccgcctggacttcaccgcctggaatgctgccatcggcggggccgccggcggcggcggcaccggcctgcaggagcagcagatgagcagaggagacatccccatcatcgtggatgcctgcatcagctttgtgacccagcacgagctgccccagaagaaccagaggctggagaagtacaaggatgtgattggctgcctgccccgggtgaacagaaggaccctggccaccctcatcggccacctgtacagagtgcagaagtgtgccgccctgaaccagatgtgcaccaggaacctggccctgctgtttgcccccagcgtcttccagacagatggccgcggggagcacgaggtgcgggtgctgcaggagctgattgatggctacatctctgtgtttgatattgacagcgaccaggtggcccagattgacctggaggtgtccctcatcaccacctggaaggatgtgcagctgagccaggccggggacctgatcatggaggtgtacatcgagcagcagctgcctgacaactgtgtgaccctgaaggtgagccccaccctgacagctgaggagctgaccaaccaggtgctggagatgaggggcacagctgctggcatggacctgtgggtgacctttgagatccgggagcacggggagctggagcggcccctgcaccccaaggagaaggtgctggagcaggccctgcagtggtgccagctgcctgagccctgcagcgccagcctgctgctgaagaaggtgcccctggcccaggccggctgcctcttcaccggcatccggcgggagagcccccgggtgggcctgctgcgctgccgggaggagcccccccggctgctgggcagccgcttccaggagcgcttcttcctgctgcggggccgctgcctgctgctgctgaaggagaagaagagcagcaagccagagcgggagtggcccctggagggcgccaaggtgtacctgggcatcaggaagaagctgaagccacccaccccctggggcttcaccctcatcctggagaagatgcacctgtacctgagctgcacagatgaagatgagatgtgggactggaccaccagcatcctgaaggcccagcatgatgaccagcagcctgtggtgctgcggcggcacagcagcagtgacctggcccggcagaagtttggcaccatgcccctgctgcccatcagaggagatgacagcggggccaccctgctgagcgccaaccagaccctgcggcggctgcacaacagaaggaccctgtccatgttcttccccatgaagagcagccagggctctgtggaggagcaggaggagctggaggagcctgtgtatgaggagcctgtgtatgaggaggtgggcgccttccctgagctgatccaggacaccagcaccagcttcagcaccacccgggagtggacagtgaagccagagaaccccctgaccagccagaagagcctggaccagcccttcctgagcaagagcagcaccctgggccaggaggagaggcctcctgagcccccacctggcccccccagcaagagcagcccccaggcccggggcagcctggaggagcagctgctgcaggagctgagcagcctcatcctgaggaaaggagagaccacagctggcctgggcagccccagccagcccagcagcccccagagccccagccccaccggcctgcccacccagaccccaggcttccccacccagcccccctgcaccagcagcccccccagcagccagcccctgacctag

SEQ ID NO: 288268 - DNA, 4128 bp, Artificial Sequence
  derived and/or modified sequence
atggagcccagccccagccccgccccccaggcccagccccccaagcctgtcccaaaaccaaggaccgtgtttgggggattgagcgggccagccacaacacaacggcctggactttccccagcactcggaggtccaggcgtcagtaggtcccctgaaccctcccctaggccaccacccctgcccacaagttcgtctgaacagtcttccgcattgaacactgtggagatgatgcccaattctatctatttcggcttagacagccggggcagggctcaggccgcccaagataaggctcccgactcctcgcagatctccgcacccactcctgctctgagaccaacgaccgggaccgttcatattatggaccccggatgcctgtactacggagtccagccagtgggcacccctggggcccccgacaggagggaaagtaggggcgtgtgccagggccgcgcagaacacaggctgtccagacaggacctggaggcaagagaagatgccggctacgcatctttagaattaccgggagacagtaccctgctgagtcctacacttgagacagaggaaacttccgacgatcttatctccccgtatgcttctttttcatttactgccgacaggctgactccactcttaagcggatggctggacaaattatcccctcagggcaactacgtcttccagcgtcgctttgtccagtttaacggcaggtccctcatgtacttcggcagcgacaaggatccctttcctaagggagttataccactgaccgccattgagatgacccgaagctctaaagacaacaagttccaggttatcactggacagcgcgtcttcgtgtttaggacagagagcgaagcccagcgtgatatgtggtgttcaacactgcagagctgcctgaaggagcaacggctgctcgggcatccgaggccgccacagcctccccggcccctccgcacggggatgctggagcttcgggggcacaaggcaaaggtgtttgccgccctaagccctggtgagctggcgttatataagtcagagcaggcctttagtctcgggatcggtatttgtttcatcgagctgcaggggtgttctgtgcgagagaccaagagccgcagtttcgatcttttgaccccccatagatgcttctcttttaccgccgagtccggcggggcacggcagtcctgggccgccgctctccaggaggcagttaccgagacactgtccgattatgaagtcgccgagaagatctggtcaaacagggctaatcgccagtgcgctgactgcgggagtagcaggccagactgggccgcagtcaacctgggcgtggtcatctgcaagcagtgcgcggggcagcaccgcgcgcttgggtcggggataagtaaagtgcaaagcctgaagctggacacatcagtgtggtccaatgagatcgttcagctgtttatagtgctgggcaacgaccgggcaaataggttttgggcaggcacattacccccaggtgaaggactacatcctgacgccaccccgggccctagaggggaattcatcagtcggaaataccgcttaggtttgtttcgaaagccccacccccagtacccagatcatagtcagctgctgcaggcattatgcgcagctgtagctagacctaacctgctgaaaaatatgactcagctcctgtgcgttgaggcattcgaggatccctccccaggagtgtacaatgaggtagtggttagggccacgtactctggcttcctttactgcagtccagtcagcaataaggccgggcctagcccgccaaggcgtggtcgggatgctcccccccggctgtggtgcgtcctaggggccgccctcgagatgtttgcaagcgagaacagccccgagcccttgtcactcattcaaccccaggatatcgtctgtctgggcgtgagtccgcctcccaccgatccgggtgaccggttcccctttagcttcgagcttattcttgccggcggacgcatacagcactttggtaccgatggagcagattccctggaggcctggacatctgcggtagggaagtggttctccccccttagctgccaccagctcttgggcccaggcttactccgattggggcggttgtggttgagatctccgtcacatacagctccagcccccggcctgtggcttagcggctttggcttgctgcgaggggatcatctatttctgtgttcggccccaggcccaggtccccccgcccccgaagatatggttcacctccgcagactccaggaaatctcagtggtgtccgccgccgacacccctgataaaaaggaacacctggttctagttgaaactggtcgaactctctacctccaaggtgagggaagattggacttcaccgcttggaacgccgccatcggtggagccgccggaggcggtggcactgggctacaggagcagcaaatgtcccgaggagacatcccaatcatagtggatgcatgcatctcatttgtcacccagcacgagctgccacagaagaatcagaggctagaaaaatataaggacgtgattggctgccttccacgagtgaatagacggaccctagctaccctgattgggcacctatacagagtgcaaaagtgtgccgcgttaaatcagatgtgtactcggaatttggcactgttgttcgcccctagcgttttccagaccgatgggaggggtgaacacgaggtgagagtactgcaggaattgattgatgggtacatttcggtgttcgatatcgacagcgatcaggtggcacaaatcgatttagaggtcagtctcataactacatggaaggatgtacaactctctcaggctggggatctcataatggaagtgtatatcgagcagcagctgcctgacaactgcgtgacactcaaggtcagtccgaccctgacggcagaagagctgactaaccaagtgctcgagatgcgcgggactgctgcgggcatggacctctgggtcactttcgaaataagagagcatggcgagttggagcgacctctgcatccgaaggaaaaggttcttgaacaagccctgcagtggtgccagttgcctgagccctgctcagcatctctgcttctcaagaaggttcctctcgcccaggcaggttgcttgtttacagggattcgtagagagtctccccgcgtgggtttactgcgctgtcgtgaggagccccctcgtttgctggggtcacgcttccaagaaaggttctttctgctacgtgggcggtgcttactgctcctgaaagagaagaagtcctcaaagcccgagagagagtggcctctcgagggcgcgaaggtctaccttggaatccggaagaagttgaaaccacccaccccatggggattcacgctgatattagagaagatgcatctttacctgtcttgtacagacgaagatgaaatgtgggactggacaaccagtatcctgaaagcccagcacgacgatcaacagcctgtcgtgctccgcaggcattcctcaagcgacctcgcccgtcaaaagtttggtacaatgccactgctgccgatcaggggagacgactctggagctactctgctgtctgcaaatcagaccctccggcgcttgcacaatcgcagaacactctcgatgtttttcccaatgaagtcttctcaggggtccgtcgaagagcaggaggagttagaagaaccggtctacgaggaacccgtgtacgaggaggtcggagccttccctgagctaattcaggatacctctactagcttctccacaacaagggagtggacggtgaagcccgaaaaccccctaacatcccagaagtctctggaccagccatttctgagcaagtcaagcaccctaggccaggaggagcggcccccagagcctcccccgggaccccctagtaagtcgagcccccaggcccggggctctctggaagagcagctactgcaggaactctctagtctgattctcaggaagggagagaccacagccggcctgggttcccctagccaacccagctcaccccaatcacccagtcccacaggactgccaacacagacgccagggttcccaacacagcccccttgtacctccagtccaccctcatcccaacctctgacatag

SEQ ID NO: 288269 - DNA, 4927 bp, Artificial Sequence
  derived and/or modified sequence
acccgcgagcggacggcggccgcgtagtgaggacctggacatcgctgtgtggctggccacggtgcacctggagcagtatgcagacacgttccgacggcatggcctggctacagcaggtgcagcccggggcctgggccacgaggagttgaagcagttgggcatcagcgccacagggcaccggaaacgcattctacgcctgctacagacaggcaccgaagagggctccctggatcccaaatcagatagtgccatggaaccatcccccagcccagccccgcaagcccagccccctaagcccgtgccgaagcccaggaccgtgtttggtggactcagtggccctgccaccactcagagacctgggctgagcccagccctcgggggaccaggagtgtccaggagcccagagcccagcccaaggcctcctcctctccccacttcctcctctgagcagtcttcagccctaaatactgtggagatgatgcctaattccatctacttcggcctggactcaagaggcagggcacaggcagctcaggacaaggccccagacagctcccaaatctctgcccccacccctgccctcaggcccacaacaggcacagtgcacatcatggatcctggttgcctgtactatggtgtccaacctgtggggactccaggagcccccgacagaagagagagcagaggtgtttgtcagggcagggctgaacacaggctcagcagacaggatctggaggcacgggaggatgctggctatgccagccttgagctacctggagactccaccctcttatcgcccaccctggaaacagaggagaccagtgatgacctcatttcaccctatgccagcttctccttcacggcagaccgcctcacgcccctgctcagtggctggctagacaagctctcccctcagggaaactatgtcttccagagacgctttgtgcagttcaatgggaggagtctgatgtactttggcagtgacaaggaccccttccctaagggtgtgatacctttgactgccattgagatgacccgcagcagcaaggacaacaagttccaggtcatcaccggccagagggtgttcgtgttccgcacagagagcgaggctcagcgggacatgtggtgctccacgctgcagtcctgtctgaaggagcagcgcctcctgggccacccccggcccccccaaccaccccgacccctccgcacgggcatgctggagctgcgtggacacaaggccaaggtgtttgctgccttgagccctggagagctggcactgtacaagagtgagcaggccttctctctgggcatcgggatctgcttcatcgaactgcagggctgcagcgtccgggagaccaagagtcgaagctttgacctgctcacaccccatcgctgcttcagcttcacagccgagtctgggggtgctcggcagagctgggcggccgctctgcaggaagcagtaaccgagaccctgtctgactacgaggtggctgagaagatctggtctaatcgggccaaccggcagtgtgcggactgtgggtcctcccgcccagattgggctgctgtcaatttgggggtggtcatctgcaagcagtgtgcaggtcagcaccgggccctgggttctgggatctccaaggtgcagagcctgaagctggacacgagtgtctggagtaatgagatagtacagttattcattgtcctgggaaatgatcgtgccaaccgcttctgggcagggaccctacccccaggtgagggactacatccagatgcgacccctggcccccggggagagttcatctcccgaaagtaccgtctgggtctcttccggaagccccaccctcagtacccagatcatagccagcttctccaggcactgtgtgcagctgtggcaagacccaacctgctgaagaacatgacccagctcctctgtgttgaggcctttgaagacccctcccctggtgtgtacaatgaggtggtggtgcgtgctacttacagcggcttcctgtactgcagtcccgtcagcaacaaagctggaccctcaccccctcgcaggggccgggatgctcccccgcgcctttggtgtgtgctgggagcagctctggaaatgtttgcatcggaaaacagccctgaacccctcagcctcatacagccccaggatattgtatgtctgggtgtgagccccccacccactgacccaggtgacaggttccccttttcctttgagctcatcctcgctggggggaggatccagcattttggcacagatggagctgacagtctggaggcctggactagtgctgtgggcaagtggttctccccgctgagctgccaccagctgctgggccccgggctgctgcggctgggccgcctatggctgcggtccccctcccatacagccccggcccctggtctctggctgtcagggtttggcctccttcgtggtgaccacctcttcctgtgctcagcgccgggcccaggccccccagcccctgaggacatggtgcatctgcggcggctacaggagatcagtgtggtttctgcagctgacaccccagataagaaagagcatttggtcctggtggagacaggaaggaccctgtatctgcaaggagagggccggctggacttcacggcatggaacgcagccattgggggcgcggctggtgggggcggcacagggctgcaggagcagcagatgagccggggtgacatccccatcatcgtggatgcctgcatcagttttgttacccagcatgagctgccccagaagaatcagcgcctggagaaatataaagatgtgattggctgcctgccgcgggtcaaccgccgcacactggccaccctcattgggcatctctatcgggtgcagaaatgtgcggctctaaaccagatgtgcacgcggaacttggctctgctgtttgcacccagcgtgttccagacggatgggcgaggggagcacgaggtgcgagtgctgcaagagctcattgatggctacatctctgtctttgatatcgattctgaccaggtagctcagattgacttggaggtcagtcttatcaccacctggaaggacgtgcagctgtctcaggctggagacctcatcatggaagtttatatagagcagcagctcccagacaactgtgtcaccctgaaggtgtccccaaccctgactgctgaggagctgactaaccaggtactggagatgcgggggacagcagctgggatggacttgtgggtgacttttgagattcgcgagcatggggagctggagcggccactgcatcccaaggaaaaggtcttagagcaggctttacaatggtgccagctcccagagccctgctcagcttccctgctcttgaaaaaagtccccctggcccaagctggctgcctcttcacaggtatccgacgtgagagcccacgggtggggctgttgcggtgtcgtgaggagccacctcgcttgctgggaagccgcttccaggagaggttctttctgctgcgtggccgctgcctgctgctgctcaaggagaagaaaagctctaaaccagaacgggagtggcctttggaaggtgccaaggtctacctgggaatccgcaagaagttaaagcccccaacaccgtggggcttcacattgatactagagaagatgcacctctacttgtcctgcactgacgaggatgaaatgtgggattggaccaccagcatccttaaagcccagcacgatgaccagcagccagtggtcttacgacgccattcctcctctgaccttgcccgtcagaagtttggcactatgcctttgctgcctatccgtggggatgacagtggagccaccctcctctctgccaatcagaccctgcggcgactacacaaccggaggaccctgtccatgttctttccaatgaagtcatcccaggggtctgtggaggagcaagaggagctggaggagcctgtgtacgaggagccagtgtatgaggaagtaggggccttccctgagttgatccaggacacttctacctccttctccaccacacgggagtggacagtgaagccagagaaccccctcaccagccagaagtcattggatcaaccctttctctccaagtcaagcacccttggccaggaggagaggccacctgagccccctccaggccccccttcaaagagcagtccccaggcacgggggtccctagaggaacagctgctccaggagctcagcagcctcatcctgaggaaaggagagaccactgcaggcctgggaagtccttcccagccatccagcccccaatcccccagccccactggccttccaacacagacacctggcttccccacccaacccccatgcacttccagtccaccctccagccagcccctcacatgaccctaggaccagcagtctgagagggtaggtaccagaagacccagaaactcttatcgtggcactgttgcagcttcctctgccctggctggaaagactccagaatccagtgtggtgctgtggaaggagcactggactaaaggcttcagtggctgcgtgtcccaggacaggtcatggcccctctctgggcccagcccatttatctataccatgaggtaactgaagtaaggagagcagtgaatgtcaaactgtgtttcttagagccataagccccacatattatccctgaacaagggcagctcctgctttatatatttgatacgtaggggttccatgagagattttgggttttaaaggaatggttttactgcattaaagaaaaaaaatgctttggaaaccagaggcctgggtgatgttaaagtctatcctgtcccacttcctacattctgggactaccgtgaagcctggagtagggagagcgagtttgggagctgggactcggggagtcaaaaatagatgagtaattgtcaataaacctgggaaccaaaagac

SEQ ID NO: 288270 - DNA, 4128 bp, Artificial Sequence
  derived and/or modified sequence
atggagccctcaccttcccccgctcctcaggctcagccccctaaacccgtcccaaagcccagaacggtgtttgggggtctgtccgggcctgccaccacgcaacggcctggcctttcacctgctctcggaggacccggtgtttctcggagtcccgagccctcacccagacctcctccacttccaacctctagtagtgagcagtcgagcgctctgaacacggttgagatgatgccaaactctatttactttggattagactctcggggaagggctcaagcagctcaggacaaggcccctgactcctcacagatctccgcgcctacgcctgcgctgcggcctaccaccggaacggtgcatataatggacccagggtgcctgtactacggtgtacagccagtgggaaccccaggcgctcctgacagacgggagtctaggggtgtgtgccagggaagagcagagcaccgcctaagcaggcaagacctcgaggccagggaagatgccggttatgcctcattagagctgcctggggattctactttgctttctccaactctggaaacagaagagacatcggacgacctcatatccccatacgcatcattttcatttactgcagaccgcctgactccattgctatccggctggctggacaagctcagcccgcagggaaactacgtgttccaaaggcggttcgtgcagttcaacggacgctctctaatgtatttcgggtccgacaaagacccattcccaaagggggttattcccctcactgccattgagatgaccaggagctctaaagacaataagttccaagttataacgggccagcgcgtgtttgtgtttagaaccgaatccgaagctcaacgggacatgtggtgctctacgctccagtcttgcctcaaggagcagcgcttactcggtcatcctagacctccacagccacccagaccgctcaggacgggcatgttggaactgcgcggtcataaagccaaagtgttcgcagccctgtctcccggagaactcgccctatataagtcagaacaggccttcagcctgggaattgggatctgcttcatagagctacaagggtgctctgtaagagagaccaagtcccgaagttttgacttactgacccctcacaggtgtttctccttcacggcagagagcggcggtgcaaggcagagctgggccgcagcactccaagaggccgtaacagaaacccttagtgactacgaggtcgccgaaaaaatctggtccaatcgggctaatcgccagtgtgcagattgcggaagtagccgtcccgactgggccgctgtgaacctgggtgtcgtgatatgtaaacagtgcgcaggccagcatcgcgctctgggaagtggaatttccaaagttcagtcactgaagctggatactagtgtatggagcaacgaaatcgtgcagctatttatagttctgggcaacgaccgggcaaaccgtttctgggccggtacgttacccccaggcgaaggattgcaccctgacgcaacgcccggaccacggggagagttcatctcgagaaaatatcgccttggcctctttcgtaagcctcacccgcaataccccgatcactcccaactcctacaggcattatgtgctgcagtggccagaccgaacctgttgaagaatatgacgcaactgctctgcgtcgaggctttcgaggatccatcccctggggtctataacgaagtggtggtgagagccacctacagcggcttcctatactgtagccctgtgtcgaacaaggcgggaccatcccccccacgacggggacgagacgcccctccgaggctctggtgtgtcctaggcgcagcactcgagatgtttgccagcgaaaactcccccgagccactgtctttaatccagccccaggatatcgtgtgcctgggagtgtctccgccacctactgacccaggggatcgcttcccgttttcgttcgagctgatcctagctggtggacgcatacagcacttcggtacggatggggcagatagcctcgaagcttggacaagtgccgtcggcaagtggtttagccctctatcctgtcatcagctactcggccctgggctgctgagactggggagactgtggctgcgctctcccagtcatacggctcccgcaccagggctgtggctaagcggtttcggcctgcttaggggagatcacctgttcctttgttcggcaccaggccctggccctcctgcacctgaagatatggtacatctgaggcgactccaagagatctccgtcgtgagcgcggctgacacacctgacaaaaaggagcacctcgtgctagttgaaaccggaagaaccctgtatttacagggagaggggaggcttgattttactgcgtggaacgctgctattggaggtgcggctggaggcggaggcacaggcttacaagagcagcagatgtctcgcggagacattcctatcatcgttgatgcatgcatcagcttcgtaacacagcacgagttgccacagaaaaatcaacgcctcgaaaagtacaaggacgttataggatgtctgcccagagtaaatcggagaacactggctacactgataggtcatctgtaccgcgttcagaagtgcgcagcattaaatcaaatgtgtactcgcaatcttgcactgctctttgccccttcagtatttcaaactgacggcaggggggagcacgaggtgagagtgcttcaagaacttatcgatggttacatttcagtgtttgacattgactcggatcaggttgcccagatcgacttagaagtgtctctcattaccacttggaaggatgtgcagctgtcacaggctggcgacctgattatggaggtgtacattgaacagcagcttcctgacaactgcgtaaccctcaaggtgtcccccactctgactgctgaagagctgaccaaccaagtgctggaaatgcgcggaactgcagcaggcatggacctgtgggtaaccttcgagattcgggaacatggtgaacttgagcggcctctgcatccaaaggagaaggtcctcgaacaggcgcttcagtggtgccagcttcctgagccttgtagcgcaagtttgcttttgaaaaaagtcccactggcccaggccggatgtcttttcacaggaatcagacgtgaaagccctagggtggggctgttgagatgtagagaggaacctccgaggctgcttgggtccagatttcaggaaaggttcttcttacttcgcggacgctgcctgctgctcctgaaggagaaaaaaagttccaaacctgagagagaatggcctcttgaaggcgctaaggtctaccttggaattagaaaaaagctgaaaccacccaccccatggggctttaccttaatcctcgagaaaatgcatctatatttatcttgtaccgacgaagacgagatgtgggattggaccacaagcattctgaaggcccagcacgacgaccagcaaccagtcgtgctcaggcggcacagtagctctgatctagccagacagaaatttggcaccatgccgctgctaccaattagaggcgatgattccggggcaacactactgtctgcgaatcagaccctccgtcggttgcacaacagacgcaccttgagcatgttttttcctatgaaatcatctcagggatcggtcgaggagcaggaggaactcgaagaacccgtctatgaagaacccgtgtatgaagaagttggcgctttcccagaactcatacaggacacctcaacttcattcagtacaacccgagaatggacagtcaagccagaaaacccactcacatcccagaaatccctggatcagccattcctgtccaaatcctctacattaggccaggaggagcggcctccagaaccgccacccggaccgccttccaagagctccccccaggctcggggtagtctggaggagcagttgctgcaggagctttcttcactgatcctgaggaagggggaaaccacagcaggactggggtcaccaagccagccatcaagtccacagtcccctagtcctaccggtcttcccacccagacacccggtttccccacacagccgccatgtactagttctccaccttcaagtcagcctttgacctag

SEQ ID NO: 288271 - DNA, 3086 bp, Artificial Sequence
  derived and/or modified sequence
ctggttctgagattctgtgcaagcctcatggaaatgaagctgccaggccaggaagggtttgaagcctccagtgctcctagaaatattccttcaggggagctggacagcaaccctgaccctggcaccggccccagccctgatggcccctcagacacagagagcaaggaactgggagtacccaaagaccctctgctcttcattcagctgaatgagctgctgggctggccccaggcgctggagtggagagagacaggcaggtgggtactgtttgaggagaagttggaggtggctgcaggccggtggagtgccccccacgtgcccaccctggcactgcccagcctccagaagctccgcagcctgctggccgagggccttgtactgctggactgcccagctcagagcctcctggagctcgtggagcaggtgaccagggtggagtcgctgagcccagagctgagagggcagttgcaggccttgctgctgcagagaccccagcattacaaccagaccacaggcaccaggccctgctggggctctactcatccaagaaaggcttctgacaatgaggaagcccccctgagggaacagtgtcagaaccccctgagacagaagctacctccaggagctgaggcagggactgtgctggcaggggagctgggcttcctggcacagccactgggagcctttgttcgactgcggaaccctgtggtactggggtcccttactgaggtgtccctcccaagcaggtttttctgccttctcctgggcccctgtatgctgggaaagggctaccatgagatgggacgggcagcagctgtcctcctcagtgacccgcaattccagtggtcagttcgtcgggccagcaaccttcatgaccttctggcagccctggatgcattcctagaggaggtgacagtgcttcccccaggtcggtgggacccaacagcccggattcccccgcccaaatgtctgccatctcagcacaaaaggcttccctcgcaacagcgggagatcagaggtcccgccgtcccgcgcctgacctcggctgaggacaggcaccgccatgggccacacgcacacagcccggagttgcagcggaccggcaggaaggtcccgtggtaccccagcgatttcttggacgccctgcatctccagtgcttctcggccgtactctacatttacctggccactgtcactaatgccatcacttttgggggtctgctgggagatgccactgatggtgcccagggagtgctggaaagtttcctgggcacagcagtggctggagctgccttctgcctgatggcaggccagcccctcaccattctgagcagcacggggccagtgctggtctttgagcgcctgctcttctctttcagcagagattacagcctggactacctgcccttccgcctatgggtgggcatctgggtggctaccttttgcctggtgctggtggccacagaggccagtgtgctggtgcgctacttcacccgcttcactgaggaaggtttctgtgccctcatcagcctcatcttcatctacgatgctgtgggcaaaatgctgaacttgacccatacctatcctatccagaagcctgggtcctctgcctacgggtgcctctgccaatacccaggcccaggaggaaatgagtctcaatggataaggacaaggccaaaagacagagacgacattgacttaggcctgatcaatgcatccttgctgccgccacctgagtgcacccggcagggaggccaccctcgtggccctggctgtcatacagtcccagacattgccttcttctcccttctcctcttccttacttctttcttctttgctatggccctcaagtgtgtaaagaccagccgcttcttcccctctgtggtgcgcaaagggctcagcgacttctcctcagtcctggccatcctgctcggctgtggccttgatgctttcctgggcctagccacaccaaagctcatggtacccagagagttcaagcccacactccctgggcgtggctggctggtgtcaccttttggagccaacccctggtggtggagtgtggcagctgccctgcctgccctgctgctgtctatcctcatcttcatggaccaacagatcacagcagtcatcctcaaccgcatggaatacagactgcagaagggagctggcttccacctggacctcttctgtgtggctgtgctgatgctactcacatcagcgcttggactgccttggtatgtctcagccactgtcatctccctggctcacatggacagtcttcggagagagagcagagcctgtgcccccggggagcgccccaacttcctgggtatcagggaacagaggctgacaggcctggtggtgttcatccttacaggagcctccatcttcctggcacctgtgctcaagttcattccaatgcctgtgctctatggcatcttcctgtatatgggggtggcagcgctcagcagcattcagttcactaatagggtgaagctgttgttgatgccagcaaaacaccagccagacctgctactcttgcggcatgtgcctctgaccagggtccacctcttcacagccatccagcttgcctgtctggggctgctttggataatcaagtctacccctgcagccatcatcttccccctcatgttgctgggccttgtgggggtccgaaaggccctggagagggtcttctcaccacaggaactcctctggctggatgagctgatgccagaggaggagagaagcatccctgagaaggggctggagccagaacactcattcagtggaagtgacagtgaagattcagagctgatgtatcagccaaaggctccagaaatcaacatttctgtgaattagctggagtaggagtctgggagtggagaccccaggaaacagcatgagatgctcagtcggcttggggaaggactgaagggcagctgccaagacctcagttacctcctgacctgagggtggagagtggcaggaagcaagcatgtttgctgtgcacttaggaaaggctggtgagccagagggactgatcaggccccattcactctctactcattaaaaggtcctga

SEQ ID NO: 288272 - DNA, 1815 bp, Artificial Sequence
  derived and/or modified sequence
atgatgaagagccagggcctggtgagcttcaaggacgtggccgtggacttcacccaggaggagtggcagcagctggaccccagccagagaaccctgtacagagacgtgatgctggagaactacagccacctggtgagcatgggctaccccgtgagcaagcccgacgtgatcagcaagctggagcagggcgaggagccctggatcatcaagggcgacatcagcaactggatctaccccgacgagtaccaggccgacggcagacaggacagaaagagcaacctgcacaacagccagagctgcatcctgggcaccgtgagcttccaccacaagatcctgaagggcgtgaccagagacggcagcctgtgcagcatcctgaaggtgtgccagggcgacggccagctgcagagattcctggagaaccaggacaagctgttcagacaggtgaccttcgtgaacagcaagaccgtgaccgaggccagcggccacaagtacaaccccctgggcaagatcttccaggagtgcatcgagaccgacatcagcatccagagattccacaagtacgacgccttcaagaagaacctgaagcccaacatcgacctgcccagctgctacaagagcaacagcagaaagaagcccgaccagagcttcggcggcggcaagagcagcagccagagcgagcccaacagcaacctggagaagatccacaacggcgtgatccccttcgacgacaaccagtgcggcaacgtgttcagaaacacccagagcctgatccagtaccagaacgtggagaccaaggagaagagctgcgtgtgcgtgacctgcggcaaggccttcgccaagaagagccagctgatcgtgcaccagagaatccacaccggcaagaagccctacgactgcggcgcctgcggcaaggccttcagcgagaagttccacctggtggtgcaccagagaacccacaccggcgagaagccctacgactgcagcgagtgcggcaaggccttcagccagaagagcagcctgatcatccaccagagagtgcacaccggcgagaagccctacgagtgcagcgagtgcggcaaggccttcagccagaagagccccctgatcatccaccagagaatccacaccggcgagaagccctacgagtgcagagagtgcggcaaggccttcagccagaagagccagctgatcatccaccacagagcccacaccggcgagaagccctacgagtgcaccgagtgcggcaaggccttctgcgagaagagccacctgatcatccacaagagaatccacaccggcgagaagccctacaagtgcgcccagtgcgaggaggccttcagcagaaagaccgagctgatcacccaccagctggtgcacaccggcgagaagccctacgagtgcaccgagtgcggcaagaccttcagcagaaagagccagctgatcatccaccagagaacccacaccggcgagaagccctacaagtgcagcgagtgcggcaaggccttctgccagaagagccacctgatcggccaccagagaatccacaccggcgagaagccctacatctgcaccgagtgcggcaaggccttcagccagaagagccacctgcccggccaccagagaatccacaccggcgagaagccctacatctgcgccgagtgcggcaaggccttcagccagaagagcgacctggtgctgcaccagagaatccacaccggcgagagaccctaccagtgcgccatctgcggcaaggccttcatccagaagagccagctgaccgtgcaccagagaatccacaccgtggtgaagagctag

SEQ ID NO: 288273 - DNA, 1815 bp, Artificial Sequence
  derived and/or modified sequence
atgatgaagagccagggcctggtgagcttcaaggacgtggccgtggacttcacccaggaggagtggcagcagctggaccccagccagagaaccctgtacagagacgtgatgctggagaactacagccacctggtgagcatgggctaccccgtgagcaagcccgacgtgatcagcaagctggagcagggcgaggagccctggatcatcaagggcgacatcagcaactggatctaccccgacgagtaccaggccgacggcagacagggcaagaagagcaacctgcacaacagccagagctgcatcctgggcaccgtgagcttccaccacaagatcctgaagggcgtgaccagagacggcagcctgtgcagcatcctgaaggtgtgccagggcgacggccagctgcagagattcctggagaaccaggacaagctgttcagacaggtgaccttcgtgaacagcaagaccgtgaccgaggccagcggccacaagtacaaccccctgggcaagatcttccaggagtgcatcgagaccgacatcagcatccagagattccacaagtacgacgccttcaagaagaacctgaagcccaacatcgacctgcccagctgctacaagagcaacagcagaaagaagcccgaccagagcttcggcggcggcaagagcagcagccagagcgagcccaacagcaacctggagaagatccacaacggcgtgatccccttcgacgacaaccagtgcggcaacgtgttcagaaacacccagagcctgatccagtaccagaacgtggagaccaaggagaagagctgcgtgtgcgtgacctgcggcaaggccttcgccaagaagagccagctgatcgtgcaccagagaatccacaccggcaagaagccctacgactgcggcgcctgcggcaaggccttcagcgagaagttccacctggtggtgcaccagagaacccacaccggcgagaagccctacgactgcagcgagtgcggcaaggccttcagccagaagagcagcctgatcatccaccagagagtgcacaccggcgagaagccctacgagtgcagcgagtgcggcaaggccttcagccagaagagccccctgatcatccaccagagaatccacaccggcgagaagccctacgagtgcagagagtgcggcaaggccttcagccagaagagccagctgatcatccaccacagagcccacaccggcgagaagccctacgagtgcaccgagtgcggcaaggccttctgcgagaagagccacctgatcatccacaagagaatccacaccggcgagaagccctacaagtgcgcccagtgcgaggaggccttcagcagaaagaccgagctgatcacccaccagctggtgcacaccggcgagaagccctacgagtgcaccgagtgcggcaagaccttcagcagaaagagccagctgatcatccaccagagaacccacaccggcgagaagccctacaagtgcagcgagtgcggcaaggccttctgccagaagagccacctgatcggccaccagagaatccacaccggcgagaagccctacatctgcaccgagtgcggcaaggccttcagccagaagagccacctgcccggccaccagagaatccacaccggcgagaagccctacatctgcgccgagtgcggcaaggccttcagccagaagagcgacctggtgctgcaccagagaatccacaccggcgagagaccctaccagtgcgccatctgcggcaaggccttcatccagaagagccagctgaccgtgcaccagagaatccacaccgtggtgaagagctag

SEQ ID NO: 288274 - DNA, 1707 bp, Artificial Sequence
  derived and/or modified sequence
atgctggagaactacagccacctggtgagcatgggctaccccgtgagcaagcccgacgtgatcagcaagctggagcagggcgaggagccctggatcatcaagggcgacatcagcaactggatctaccccgacgagtaccaggccgacggcagacaggacagaaagagcaacctgcacaacagccagagctgcatcctgggcaccgtgagcttccaccacaagatcctgaagggcgtgaccagagacggcagcctgtgcagcatcctgaaggtgtgccagggcgacggccagctgcagagattcctggagaaccaggacaagctgttcagacaggtgaccttcgtgaacagcaagaccgtgaccgaggccagcggccacaagtacaaccccctgggcaagatcttccaggagtgcatcgagaccgacatcagcatccagagattccacaagtacgacgccttcaagaagaacctgaagcccaacatcgacctgcccagctgctacaagagcaacagcagaaagaagcccgaccagagcttcggcggcggcaagagcagcagccagagcgagcccaacagcaacctggagaagatccacaacggcgtgatccccttcgacgacaaccagtgcggcaacgtgttcagaaacacccagagcctgatccagtaccagaacgtggagaccaaggagaagagctgcgtgtgcgtgacctgcggcaaggccttcgccaagaagagccagctgatcgtgcaccagagaatccacaccggcaagaagccctacgactgcggcgcctgcggcaaggccttcagcgagaagttccacctggtggtgcaccagagaacccacaccggcgagaagccctacgactgcagcgagtgcggcaaggccttcagccagaagagcagcctgatcatccaccagagagtgcacaccggcgagaagccctacgagtgcagcgagtgcggcaaggccttcagccagaagagccccctgatcatccaccagagaatccacaccggcgagaagccctacgagtgcagagagtgcggcaaggccttcagccagaagagccagctgatcatccaccacagagcccacaccggcgagaagccctacgagtgcaccgagtgcggcaaggccttctgcgagaagagccacctgatcatccacaagagaatccacaccggcgagaagccctacaagtgcgcccagtgcgaggaggccttcagcagaaagaccgagctgatcacccaccagctggtgcacaccggcgagaagccctacgagtgcaccgagtgcggcaagaccttcagcagaaagagccagctgatcatccaccagagaacccacaccggcgagaagccctacaagtgcagcgagtgcggcaaggccttctgccagaagagccacctgatcggccaccagagaatccacaccggcgagaagccctacatctgcaccgagtgcggcaaggccttcagccagaagagccacctgcccggccaccagagaatccacaccggcgagaagccctacatctgcgccgagtgcggcaaggccttcagccagaagagcgacctggtgctgcaccagagaatccacaccggcgagagaccctaccagtgcgccatctgcggcaaggccttcatccagaagagccagctgaccgtgcaccagagaatccacaccgtggtgaagagctag

SEQ ID NO: 288275 - DNA, 1815 bp, Artificial Sequence
  derived and/or modified sequence
atgatgaagtcgcagggactggtgagcttcaaggatgtagctgttgatttcacccaagaagaatggcagcagctggacccaagtcagcgaaccctgtatagagatgtgatgctggaaaactatagccaccttgttagtatgggctaccccgtgagcaagcccgacgtgatctcgaaactggagcagggggaggaaccgtggatcataaagggagacattagtaactggatctaccccgacgagtatcaagcggacggccgtcaggatagaaaaagcaatctgcacaatagtcagtcatgcatcttgggaacggtgtccttccatcataagattctcaagggtgtgactagggatggatccctgtgttctatattgaaggtctgtcagggggatggacagctgcagagatttctcgaaaatcaggacaaactgttccggcaagttaccttcgtcaattcaaaaaccgtgaccgaagcatcaggacataagtataacccactgggcaaaatcttccaggagtgcatcgagacagatatttccatccagcgcttccacaaatatgatgccttcaagaagaatctcaagccgaatattgatctccccagctgttataagtcaaactccagaaaaaaacctgaccagagcttcggtggtggtaagagcagttcacaatctgaacctaactcgaacctggagaagatccacaacggggtgatcccattcgatgacaatcaatgtggcaacgtgtttcggaatacgcagtccttgatccagtatcagaacgttgagacaaaagagaagagctgcgtttgcgtgacctgtggaaaggctttcgcgaagaagtcccagcttatcgttcatcagagaatccatactggaaagaaaccttacgactgtggcgcttgcggaaaagccttctccgaaaaattccatctagtggtccaccagcggacgcatactggagagaagccctatgactgttctgagtgtggaaaagctttttcacagaagtcatccctaatcattcatcagcgggtccataccggcgagaagccctatgagtgttccgaatgtggaaaagcttttagccagaagtcgccgctcatcatccatcagaggatacacacaggggagaagccatacgaatgcagagagtgtggaaaagcattcagccagaaatcccagctgattatacaccatcgtgcgcacaccggggaaaagccgtacgagtgcacggaatgtggcaaagcattctgtgaaaagagtcatctcatcatacataaacggatccatacaggtgaaaaaccttacaagtgtgcgcagtgtgaagaagcgttcagcaggaaaactgaattgataactcaccagctcgtccacaccggcgagaagccctatgagtgcactgaatgtggtaagacattcagccggaagtctcagctgatcattcatcagaggacccacaccggggaaaagccatacaagtgctcggaatgtggaaaggccttttgccagaagtcccatcttattggccaccaacggattcatacaggagagaagccatacatttgtacagaatgcggcaaagctttctctcagaagagtcacttgcctggacatcaacgcatccacacgggcgaaaagccatacatttgcgctgaatgcgggaaggcgttctctcagaagtccgacctggtgctgcaccagaggatccacactggtgagcggccctatcaatgcgccatttgcggaaaggcctttatccagaaatctcagcttacggtgcaccagaggattcacacagtggtgaaatcttag

SEQ ID NO: 288276 - DNA, 1815 bp, Artificial Sequence
  derived and/or modified sequence
atgatgaaatcccaagggttggttagctttaaagacgtcgctgtcgactttacacaggaggagtggcagcagttggacccttctcaaagaaccctttatcgggatgtaatgttagaaaactactctcatctggtgtccatgggttacccagtcagcaaaccagacgtcatttctaagttggagcagggagaagagccctggataataaagggcgatattagtaactggatatatcccgatgagtaccaggccgacggccgtcaggggaaaaagtctaaccttcataattcccaaagctgcattcttggtaccgttagctttcatcacaagatcctcaaaggagtgactcgcgacggcagcttatgctctattctgaaagtgtgccagggcgacggtcaattgcagaggtttctggaaaaccaggacaagttgtttcgtcaggttaccttcgtgaattctaagaccgtcacagaagctagcgggcataagtacaatcctctggggaagatcttccaggaatgcatcgaaaccgacatctctatccagcgtttccataagtatgacgccttcaaaaagaatctgaagccgaatattgacctcccaagctgttacaagagcaacagccgcaagaaacccgaccagtctttcggcggcgggaaatccagttcacagtcagaacctaattccaacttagaaaaaatccataacggggtaattccgttcgacgataaccagtgcggcaacgtcttcaggaatactcaaagcctgattcagtaccaaaatgtagagacaaaagagaagtcatgtgtgtgcgtcacttgtggaaaagcgtttgcaaaaaaaagccagctcatagtacaccaaagaattcatacaggcaagaaaccctacgactgcggcgcctgtggcaaagctttctccgaaaagttccacctcgtcgtgcatcaacgcacgcatacaggagaaaaaccctatgattgttcagagtgcggcaaagcttttagtcaaaaaagttccctcatcatacaccagcgcgttcacaccggagagaaaccctatgaatgctccgagtgtggtaaggctttttctcagaagtctccacttatcattcaccagcgcattcatacgggggagaagccttatgaatgtcgggagtgcggtaaagcattttcccagaaatctcaattgataatacaccaccgcgcccatacaggggagaaaccttatgagtgcacggaatgcggcaaagctttctgtgaaaagagccaccttataatacataagcgaattcatacaggagagaaaccctataaatgtgcacagtgcgaagaggcattctcccggaaaactgaactgattacccatcagctggtgcatactggagaaaagccctacgagtgtaccgaatgtggtaagactttctcaagaaaaagccagcttatcattcatcagcgcacccatactggcgagaaaccatacaagtgcagtgagtgtggcaaggccttctgtcaaaagagccatttaatcgggcatcagcggattcacactggcgagaagccatatatctgtactgagtgtggaaaagctttctcacagaagagccatctgcctgggcaccaacggatccataccggagagaagccatatatctgtgccgagtgcggtaaggcgttttctcagaaaagcgacttggtgttacatcagcggatccatacaggggagagaccctaccagtgtgctatatgcggcaaagccttcattcagaagagtcagctcactgtccatcagcggatccacaccgtggtgaaatcttag

SEQ ID NO: 288277 - DNA, 1707 bp, Artificial Sequence
  derived and/or modified sequence
atgctcgaaaattattctcacctggtctccatgggatatcccgtgtcaaaacccgacgttatatctaaactggagcaaggcgaggagccctggattataaaaggtgatatatccaattggatttaccccgatgagtatcaggccgacgggagacaggaccgcaagagcaatcttcacaattctcaaagttgcattctcggaactgtgagtttccaccacaagattttgaaaggggtgacgagggacggaagtctttgctccatactgaaggtgtgccagggtgacgggcagctacagaggtttctggagaaccaggacaagttgtttcgacaggtaacgtttgtgaatagcaagactgtgactgaagcctctgggcacaagtataatccactcggcaaaatttttcaggagtgcattgaaacggatatctctatccaaaggttccataaatatgatgccttcaagaaaaacctcaaaccgaacattgatctgccaagttgctacaaatctaactctcggaagaaacctgatcaatccttcggggggggcaagagcagctctcaatcagagccaaactctaacctcgagaagatacataatggggtgatccccttcgacgataaccaatgcggcaatgtattcagaaacacccagagtctgatccagtaccagaacgtagagactaaggaaaagtcctgtgtgtgcgtgacctgtggcaaagcctttgctaaaaaatctcaattgatagtgcaccagagaattcataccggcaagaagccatacgattgcggcgcatgcggtaaggcattctcagagaaatttcatctcgttgtgcatcagcgtacccatactggcgagaagccctatgactgcagcgagtgtggaaaggccttcagccagaagtcaagtttaatcatccatcagcgggtgcacactggagaaaagccttacgagtgtagtgaatgtggaaaagcttttagtcagaaatctccacttattattcaccagcgtatccacactggtgagaagccttatgaatgccgagagtgcggcaaggcattctcacagaaaagccaactgattattcaccacagggcacacacgggagaaaagccctacgaatgcaccgaatgtggcaaagccttctgcgagaagtcgcacttaattatacataaaagaatccacacaggggagaagccttataagtgtgctcagtgtgaggaagccttcagccgaaaaaccgaactgatcacccaccagctcgtacacacaggagagaaaccgtacgagtgcaccgagtgtggcaagactttctccaggaaatcacagctgatcatccatcagcggactcacaccggggaaaagccttacaaatgctctgagtgcggcaaggctttttgccagaaatcgcatcttatcggccaccagcggattcacaccggagagaagccttacatttgtaccgaatgcggaaaggccttttcacagaagagtcatcttcccgggcaccagaggatccacacaggcgaaaagccctatatctgcgcggagtgcggcaaggcattttcacagaaatcggacctggtcctgcatcagcgcatccacactggcgaaagaccctatcagtgtgccatttgcgggaaggcttttattcaaaaaagtcagctgactgtacaccagagaatccatactgtggtcaagtcctag

SEQ ID NO: 288278 - DNA, 1815 bp, Artificial Sequence
  derived and/or modified sequence
atgatgaagagccagggcctggtgtccttcaaggatgtggccgtggacttcacccaggaggagtggcagcagctggaccccagccagaggaccctgtacagagatgtgatgctggagaactacagccacctggtgtccatgggctaccctgtgtccaagccagatgtgatcagcaagctggagcagggcgaggagccctggatcatcaagggggacatcagcaactggatctacccagatgagtaccaggctgatggccggcaggacaggaagagcaacctgcacaacagccagagctgcatcctgggcaccgtgtccttccaccacaagatcctgaagggcgtgaccagagatggcagcctgtgcagcatcctgaaggtgtgccagggagatggccagctgcagcgcttcctggagaaccaggacaagctgttccggcaggtgacctttgtgaacagcaagacagtgacagaggccagcggccacaagtacaaccccctgggcaagatcttccaggagtgcattgaaacagacatcagcatccagcgcttccacaagtatgatgccttcaagaagaacctgaagcccaacatcgacctgcccagctgctacaagagcaacagcaggaagaagccagaccagagctttggaggcggcaagagcagcagccagagcgagcccaacagcaacctggagaagatccacaacggggtcatcccctttgatgacaaccagtgtggaaatgtgttcaggaacacccagagcctcatccagtaccagaatgtggagaccaaggagaagagctgtgtgtgtgtgacctgtgggaaggcctttgccaagaagagccagctgattgtgcaccagaggatccacacaggcaagaagccctatgactgtggggcctgtgggaaggccttcagcgagaagttccacctggtggtgcaccagaggacccacactggagagaagccctatgactgcagtgaatgtgggaaggccttcagccagaagagcagcctcatcatccaccagagggtgcacactggagagaagccctatgagtgcagtgaatgtgggaaggccttcagccagaagagccccctcatcatccaccagaggatccacactggagagaagccctatgagtgcagagaatgtgggaaggccttcagccagaagagccagctgatcatccaccaccgggcccacactggagagaagccctatgagtgcacagaatgtgggaaggccttctgtgagaagagccacctgatcatccacaagaggatccacactggagagaagccctacaagtgtgcccagtgtgaggaggccttcagcaggaagacagagctgatcacccaccagctggtgcacactggagagaagccctatgagtgcacagaatgtgggaagaccttcagcaggaagagccagctgatcatccaccagaggacccacactggagagaagccctacaagtgcagtgaatgtgggaaggccttctgccagaagagccacctgattggccaccagaggatccacactggagagaagccctacatctgcacagaatgtgggaaggccttcagccagaagagccacctgcccggccaccagaggatccacactggagagaagccctacatctgtgctgaatgtgggaaggccttcagccagaagagtgacctggtgctgcaccagaggatccacactggagagcggccctaccagtgtgccatctgtgggaaggccttcatccagaagagccagctgactgtgcaccagaggatccacacagtggtgaagagctag

SEQ ID NO: 288279 - DNA, 1815 bp, Artificial Sequence
  derived and/or modified sequence
atgatgaagagccagggcctggtgtccttcaaggatgtggccgtggacttcacccaggaggagtggcagcagctggaccccagccagaggaccctgtacagagatgtgatgctggagaactacagccacctggtgtccatgggctaccctgtgtccaagccagatgtgatcagcaagctggagcagggcgaggagccctggatcatcaagggggacatcagcaactggatctacccagatgagtaccaggctgatggccggcagggcaagaagagcaacctgcacaacagccagagctgcatcctgggcaccgtgtccttccaccacaagatcctgaagggcgtgaccagagatggcagcctgtgcagcatcctgaaggtgtgccagggagatggccagctgcagcgcttcctggagaaccaggacaagctgttccggcaggtgacctttgtgaacagcaagacagtgacagaggccagcggccacaagtacaaccccctgggcaagatcttccaggagtgcattgaaacagacatcagcatccagcgcttccacaagtatgatgccttcaagaagaacctgaagcccaacatcgacctgcccagctgctacaagagcaacagcaggaagaagccagaccagagctttggaggcggcaagagcagcagccagagcgagcccaacagcaacctggagaagatccacaacggggtcatcccctttgatgacaaccagtgtggaaatgtgttcaggaacacccagagcctcatccagtaccagaatgtggagaccaaggagaagagctgtgtgtgtgtgacctgtgggaaggcctttgccaagaagagccagctgattgtgcaccagaggatccacacaggcaagaagccctatgactgtggggcctgtgggaaggccttcagcgagaagttccacctggtggtgcaccagaggacccacactggagagaagccctatgactgcagtgaatgtgggaaggccttcagccagaagagcagcctcatcatccaccagagggtgcacactggagagaagccctatgagtgcagtgaatgtgggaaggccttcagccagaagagccccctcatcatccaccagaggatccacactggagagaagccctatgagtgcagagaatgtgggaaggccttcagccagaagagccagctgatcatccaccaccgggcccacactggagagaagccctatgagtgcacagaatgtgggaaggccttctgtgagaagagccacctgatcatccacaagaggatccacactggagagaagccctacaagtgtgcccagtgtgaggaggccttcagcaggaagacagagctgatcacccaccagctggtgcacactggagagaagccctatgagtgcacagaatgtgggaagaccttcagcaggaagagccagctgatcatccaccagaggacccacactggagagaagccctacaagtgcagtgaatgtgggaaggccttctgccagaagagccacctgattggccaccagaggatccacactggagagaagccctacatctgcacagaatgtgggaaggccttcagccagaagagccacctgcccggccaccagaggatccacactggagagaagccctacatctgtgctgaatgtgggaaggccttcagccagaagagtgacctggtgctgcaccagaggatccacactggagagcggccctaccagtgtgccatctgtgggaaggccttcatccagaagagccagctgactgtgcaccagaggatccacacagtggtgaagagctag

SEQ ID NO: 288280 - DNA, 1707 bp, Artificial Sequence
  derived and/or modified sequence
atgctggagaactacagccacctggtgtccatgggctaccctgtgtccaagccagatgtgatcagcaagctggagcagggcgaggagccctggatcatcaagggggacatcagcaactggatctacccagatgagtaccaggctgatggccggcaggacaggaagagcaacctgcacaacagccagagctgcatcctgggcaccgtgtccttccaccacaagatcctgaagggcgtgaccagagatggcagcctgtgcagcatcctgaaggtgtgccagggagatggccagctgcagcgcttcctggagaaccaggacaagctgttccggcaggtgacctttgtgaacagcaagacagtgacagaggccagcggccacaagtacaaccccctgggcaagatcttccaggagtgcattgaaacagacatcagcatccagcgcttccacaagtatgatgccttcaagaagaacctgaagcccaacatcgacctgcccagctgctacaagagcaacagcaggaagaagccagaccagagctttggaggcggcaagagcagcagccagagcgagcccaacagcaacctggagaagatccacaacggggtcatcccctttgatgacaaccagtgtggaaatgtgttcaggaacacccagagcctcatccagtaccagaatgtggagaccaaggagaagagctgtgtgtgtgtgacctgtgggaaggcctttgccaagaagagccagctgattgtgcaccagaggatccacacaggcaagaagccctatgactgtggggcctgtgggaaggccttcagcgagaagttccacctggtggtgcaccagaggacccacactggagagaagccctatgactgcagtgaatgtgggaaggccttcagccagaagagcagcctcatcatccaccagagggtgcacactggagagaagccctatgagtgcagtgaatgtgggaaggccttcagccagaagagccccctcatcatccaccagaggatccacactggagagaagccctatgagtgcagagaatgtgggaaggccttcagccagaagagccagctgatcatccaccaccgggcccacactggagagaagccctatgagtgcacagaatgtgggaaggccttctgtgagaagagccacctgatcatccacaagaggatccacactggagagaagccctacaagtgtgcccagtgtgaggaggccttcagcaggaagacagagctgatcacccaccagctggtgcacactggagagaagccctatgagtgcacagaatgtgggaagaccttcagcaggaagagccagctgatcatccaccagaggacccacactggagagaagccctacaagtgcagtgaatgtgggaaggccttctgccagaagagccacctgattggccaccagaggatccacactggagagaagccctacatctgcacagaatgtgggaaggccttcagccagaagagccacctgcccggccaccagaggatccacactggagagaagccctacatctgtgctgaatgtgggaaggccttcagccagaagagtgacctggtgctgcaccagaggatccacactggagagcggccctaccagtgtgccatctgtgggaaggccttcatccagaagagccagctgactgtgcaccagaggatccacacagtggtgaagagctag

SEQ ID NO: 288281 - DNA, 1815 bp, Artificial Sequence
  derived and/or modified sequence
atgatgaagagccagggcctggtgagcttcaaggacgtggccgtggacttcactcaggaggaatggcaacagctggacccttcccaaaggacactttatagggatgtgatgctggagaactattcacacctagtgagcatggggtatcccgtgtccaaacctgatgtgatttcaaagcttgagcagggtgaggagccctggattatcaagggtgacatttccaactggatttacccggatgagtaccaagccgacggaaggcaggatcgcaaatcaaacctgcataacagccagagctgcatcctcgggaccgtttcctttcaccacaagatcctcaaaggtgtcacaagggacggatccctgtgttccatactcaaagtgtgccagggtgatggtcagttgcagcggtttctcgaaaaccaagacaagttatttaggcaggtaacatttgtcaacagcaaaaccgtgactgaagcttccggacacaaatataatcctctgggcaaaattttccaggaatgcattgaaactgatatctcgatccagagattccacaaatacgacgcattcaagaagaacctgaagcctaatatcgacctgccctcttgttacaaatctaattcccgcaaaaaaccagatcagtcctttggcggcgggaagagtagtagccagtctgaacctaactccaacctggaaaagatccacaatggtgtcattcccttcgacgataatcaatgcggtaatgtgttccgcaatactcagagtctcattcagtatcaaaatgtcgagacgaaagagaagtcttgtgtgtgcgttacctgtggcaaggcatttgctaaaaagtcgcagcttatcgtgcaccagcggattcatacagggaagaaaccttacgactgtggcgcatgcggaaaagccttctcagaaaaatttcacctggtagttcatcagaggactcatacaggcgaaaaaccctatgattgtagtgagtgcgggaaggccttttcccagaagagtagtctcatcattcaccagcgggtgcacacgggtgagaaaccctacgagtgcagcgaatgcgggaaggcatttagtcagaagtctcctctgataatacaccagcgcatccacacgggggagaaaccctacgagtgtagagaatgcggtaaagcgttttctcaaaaatcacagctgataatacatcacagagcccacaccggagaaaagccatacgaatgcaccgaatgtgggaaagcattttgcgaaaagagccatttaatcatccacaagcgcatccacactggtgagaagccttataagtgcgctcaatgcgaagaagccttcagtcggaaaaccgagctgataacccaccagctggttcacactggagagaagccttacgaatgtaccgagtgtgggaagaccttctcccgtaagtcccagctgattatccaccagcgaacgcatacgggcgagaaaccatacaagtgctccgagtgcgggaaggccttctgtcagaaaagccacctaattggacaccagagaatccacacaggcgaaaaaccttacatctgtacagagtgtggcaaagcttttagccaaaagtcccacttgccaggccaccaaagaatccacacaggtgagaagccctacatttgcgccgaatgcggtaaagccttttctcagaagagcgaccttgtgcttcaccagcgaatccataccggcgaacgcccgtaccaatgcgccatatgcggtaaagcctttatacagaagtcacaactgacagtgcatcaacgcatccatacagtagtcaagtcctag

SEQ ID NO: 288282 - DNA, 1815 bp, Artificial Sequence
  derived and/or modified sequence
atgatgaagagccagggcctggtgagcttcaaggacgtggccgtggactttacccaggaggagtggcagcagttagacccatcgcaacgaacactctatcgcgacgtcatgttggaaaattacagccatctggtgagcatgggatatccggtctccaaacccgacgtcatatccaagctggaacaaggtgaagaaccttggataattaaaggtgacatctctaactggatctatccagatgagtaccaggcagacggtcggcagggtaaaaagtcaaacctgcataatagccagtcttgtatcctgggcactgtcagctttcaccacaagattctgaagggtgttacacgagacggaagcctctgtagtatcctgaaggtgtgccagggcgacggacagctgcagcgatttttggagaatcaagataagctgttcaggcaagtcacctttgtgaatagtaagactgtcacggaagccagtgggcataaatataaccctctcgggaaaatcttccaggaatgtattgagactgatatctccattcagcgcttccacaagtacgatgcctttaagaaaaatcttaagcccaacattgatctgcccagctgctacaagtcgaatagtagaaaaaagcccgaccagagcttcggaggcggcaaatcctcctcgcagtctgagccaaatagcaatctggaaaagatccataacggcgtcattccctttgatgataaccagtgcggaaatgttttccgcaatacccagagtctcattcaatatcagaacgtggagacaaaagagaagtcctgtgtctgtgtaacgtgcggtaaggctttcgcgaagaagagtcagctaattgtccaccagaggatccataccggcaagaagccatacgattgcggcgcctgtggcaaggccttcagcgagaagtttcatctggttgtgcatcagcgcacccacacaggcgagaagccctatgactgcagcgaatgcggaaaggctttctcacaaaagtccagcttaatcatccaccagagagtgcacacgggcgagaaaccctatgaatgcagcgagtgcggtaaagccttttcccagaagagtccactgatcattcaccagcggatccatactggcgaaaaaccatatgaatgtcgggagtgtgggaaggctttcagccagaagagtcagctgatcatccaccaccgggcacatacgggcgaaaagccctacgaatgcactgagtgtggcaaggctttttgtgagaagtctcatctgattattcataaacgcattcacacgggcgaaaaaccttacaaatgtgcccagtgtgaggaagcatttagtcgcaaaacagagctcatcactcaccagttggtgcacactggggaaaagccatacgaatgcacggaatgcggtaaaacctttagtaggaagtcccagctgattatacatcaacggacacacaccggcgagaaaccatacaagtgttccgagtgcggaaaagctttttgccagaagagtcacttgatcggacatcagcgcatccacactggcgagaagccctatatttgcaccgaatgcgggaaggcattttctcaaaagtcacacctgccaggtcaccagcgaattcacacgggcgaaaaaccatacatctgcgctgaatgcgggaaggccttctcacaaaagagcgatctggtgctccaccagagaattcacaccggtgagcgcccttaccagtgcgcaatatgtggcaaagcttttatccagaaaagccaactgacagtgcatcagcggattcataccgtagtgaaaagttag

SEQ ID NO: 288283 - DNA, 1707 bp, Artificial Sequence
  derived and/or modified sequence
atgctggagaactacagccacctggtgagcatgggctaccccgtgtccaaacctgacgtcatttcaaagttagagcaaggtgaagagccctggattattaaaggcgacatctccaactggatctatccagatgagtatcaggcagatggccggcaggaccgaaagtcaaacctccataatagtcagtcgtgcattctgggcaccgttagctttcatcacaagattttgaagggcgtcacaagggatgggagtttatgtagcattctcaaggtgtgccaaggcgacggccagctgcagcgcttcctggagaatcaggataaacttttccgtcaggttaccttcgttaactcgaaaacagtgactgaggcttcaggccacaagtacaatccattaggcaagatattccaagagtgcatcgagacggacattagcatccaaagatttcataaatacgacgcgtttaagaaaaaccttaaaccgaatatcgaccttccctcttgttataaaagtaacagtaggaagaagcccgatcagtcttttggcggcggcaagagcagcagccagtccgagccaaatagtaacctggagaaaatccacaatggtgtcattccctttgacgataatcagtgtgggaacgtcttccggaatacccaatctctgatccagtatcaaaacgtggaaacaaaggaaaagagctgcgtctgtgtgacctgtggcaaggcatttgccaagaaaagccagctgatcgttcaccagaggatccacacaggtaagaagccatatgactgcggcgcctgtgggaaagccttttcggagaaattccacctcgtggtacaccaacggacacatactggggagaagccttatgattgttcagagtgtggtaaggctttcagccagaagtcaagcctgataatacaccagagggtccacaccggggaaaagccctacgaatgcagcgaatgtggcaaagcttttagccaaaaatcccctctaataattcaccaacgtattcacaccggtgaaaaaccctatgaatgcagggagtgtggtaaagcattcagtcagaagtcccagctgatcattcaccacagggcacacacaggcgaaaagccctatgaatgtacggagtgcggcaaagctttctgcgagaagtcacacctgataatacacaagaggatccacactggagaaaaaccatataagtgcgcgcagtgtgaggaagcattctctcggaaaaccgagctgattacgcatcagcttgtgcatactggcgagaagccctacgagtgtaccgagtgtggcaagacattcagtaggaaaagtcagctcatcattcaccagcgcacccataccggggagaagccctataaatgcagcgagtgcgggaaggcgttctgtcagaagagccatcttatcggacaccagcggatccatacgggggagaagccttacatctgtacagaatgcgggaaggctttttcccagaagagtcacctccccggacaccagcgaatacacaccggcgagaaaccctatatctgcgcagagtgcgggaaagcgttctcccagaagagcgacttggtattgcatcagaggattcatacaggagaaaggccatatcagtgtgctatctgtggcaaggctttcatccagaagagccagcttactgtccatcagcgcatacatacagttgtgaagtcttag

SEQ ID NO: 288284 - DNA, 1815 bp, Artificial Sequence
  derived and/or modified sequence
atgatgaaaagtcaaggtctggtctcattcaaggatgttgcagtggatttcacacaagaggagtggcagcagctcgacccatcacaacgcacactttaccgcgatgtcatgctggaaaactactctcatttggtttctatggggtatcccgtgtctaaaccggacgtcatcagcaaattggagcagggagaagagccttggatcatcaaaggtgacatctccaactggatatacccagacgagtatcaagcagacggcagacaagatcggaagagcaatctgcacaattcccagagttgtatattaggaacagtctctttccaccacaagattctgaaaggagtcaccagggatgggtcactgtgctccatcttgaaggtctgtcagggggatggccagctgcagcgttttctcgagaatcaggataaactattccgccaggtcactttcgtaaatagcaagactgtgaccgaagcgagcggacacaagtacaatccccttggaaagattttccaggaatgcattgagacagatatcagcatccagcggttccacaagtatgatgcctttaaaaagaacctgaaaccaaacattgacctgccatcctgctataagagcaactctaggaaaaagccagaccagtcttttggcggaggaaaatcttccagccagtcagaacccaatagtaaccttgaaaaaatacacaacggcgtgatcccgtttgatgataatcaatgtggtaacgtgtttaggaacacccagtccctgattcaatatcagaatgtagagaccaaggaaaaatcctgtgtgtgcgttacttgcggtaaagctttcgcgaaaaagtctcagcttatagtccaccagcgcatccacactggcaagaagccatatgattgcggtgcctgcggaaaggctttcagcgaaaaatttcaccttgtggtccaccagcggacccataccggcgagaaaccatatgattgttccgaatgcggaaaggcattttctcagaagagctcacttatcatccaccagcgtgtgcataccggggagaagccatacgaatgctccgaatgtggcaaggctttttcacagaaaagtccattaattatccaccagcggatccacacaggagagaagccgtatgagtgccgggagtgcggaaaagccttttctcaaaaatcccaacttatcatccaccatagagcacacactggggaaaagccctacgaatgcacggaatgcggcaaggcgttctgtgagaagtctcatctgattatccataaacgcatccataccggtgaaaagccttataagtgcgcccagtgtgaggaggcgttcagccggaagaccgaactcatcacccaccagctggtgcacaccggagaaaagccttacgagtgtaccgagtgtgggaagactttcagccgcaagagtcagctcataattcaccagcgcacacacaccggggagaaaccatacaaatgtagcgaatgcggtaaagcattttgtcagaagtcacatctgatcggccaccagagaatccatacgggagagaagccctacatctgcacagagtgcggtaaagcgttttcacagaaatctcacctccccggacatcaaagaatacacacaggcgaaaaaccatatatctgcgccgaatgtgggaaagcatttagccagaagtccgacttagttctgcatcaacgtattcatacaggtgaacgcccatatcagtgcgccatctgcggaaaagcctttatccagaagtcacagctaactgtccaccagaggatccacaccgtggtgaaaagctag

SEQ ID NO: 288285 - DNA, 1815 bp, Artificial Sequence
  derived and/or modified sequence
atgatgaaatcacaggggcttgtatcatttaaggatgtggcagtggacttcacccaggaagaatggcaacaactcgatccgtcgcagcgaaccctctatcgggatgtaatgctcgagaactactctcacctagtcagtatggggtaccctgtgtctaagcccgatgtcatcagcaaactggaacagggcgaggagccatggatcattaaaggggacatcagcaattggatatacccagatgaataccaggccgacggaagacaaggcaaaaagtctaacttacacaacagtcaatcatgcatactggggacagtgtcttttcatcacaagattctaaaaggcgtgactcgggacgggtctctgtgttcaatcctcaaggtgtgtcagggggacggacagcttcagcgcttcctggagaatcaagataaactgttccggcaagtgacatttgttaactctaaaacagtgactgaggcatctggccacaaatacaatccccttggaaaaatttttcaggaatgcattgagactgatatctctattcaacgctttcacaaatatgatgcattcaagaagaatctaaagccaaatatcgacctcccatcctgctataagagcaactcccgaaagaaaccagaccaaagtttcgggggtggaaagtcaagcagccaatctgagcctaactccaatctcgagaaaattcacaacggggtgataccctttgatgacaaccagtgtggcaatgtcttccgcaacacccagagtttgatccagtaccaaaacgttgagaccaaagagaaatcctgtgtgtgtgttacttgtggaaaggcctttgctaaaaaatcacagcttatcgtgcaccagaggatacacacgggtaagaagccctacgactgtggggcatgcggcaaggcttttagcgaaaaatttcaccttgtggttcaccagcggacgcatacgggagagaagccgtatgactgcagcgagtgtggcaaggccttcagccagaaatcatccctcattattcatcagcgtgtccacaccggagagaagccctacgagtgcagtgagtgcggaaaagccttttcgcagaagtcaccgttgatcattcatcaacgtatccataccggcgaaaagccttatgaatgcagggaatgcggcaaagcgttcagccagaaaagtcagctgataattcaccatcgcgctcatactggggaaaaaccatacgaatgtacggagtgtgggaaagcattctgcgagaaatcgcatcttattatccataagagaatccatacgggagagaaaccatataaatgtgcccagtgcgaggaagccttttccagaaaaacagagcttatcactcatcaactggttcacactggtgagaaaccctatgagtgtaccgagtgcggaaagacattcagccgaaagtcccaactgatcatacaccagcgtacccacaccggcgagaaaccatacaaatgctctgagtgtgggaaagcattctgccagaaaagtcacttgattggccatcagagaatccatactggcgagaagccttacatctgtacagagtgcggtaaggccttcagccagaagtctcatctacctggccatcaaaggattcatacaggtgaaaagccttatatttgtgccgaatgtggaaaagcatttagccagaaaagtgatctcgttctccatcagcgtatccacacaggggaacggccataccaatgtgctatttgtgggaaggcattcatccaaaagagtcagctgacggtccatcaacgcatccatacagtggtcaagtcgtag

SEQ ID NO: 288286 - DNA, 1707 bp, Artificial Sequence
  derived and/or modified sequence
atgttagaaaactacagccacttggtaagcatgggctaccctgtttcaaagccggacgtcattagcaaactggagcaaggagaagaaccctggataatcaagggtgacatctccaactggatctaccctgatgagtaccaggctgacggcaggcaagaccggaaatctaacctgcacaacagccagagctgcatacttggaaccgtgagcttccaccacaagattctcaaaggcgtcaccagagacggctctctgtgctcaatactgaaagtctgccaaggagacggccagttgcagcggttccttgagaaccaagataaactgttcaggcaggtcacttttgtgaattccaaaacggtgacagaagcctctggccataaatataacccattgggcaaaatatttcaagagtgcatcgagaccgacatatccattcagcggttccataaatatgacgcctttaagaaaaaccttaaacccaatatcgatctcccttcatgttacaagagcaatagccgaaagaagcctgatcagtcctttggcggaggcaaatcatcaagccagagtgaaccaaacagcaacctggagaagattcacaacggagtcataccttttgacgataaccaatgtgggaacgttttccgcaatacacagagcttaatccagtatcaaaacgtcgagacaaaggaaaagagctgcgtctgcgttacttgtggcaaggcttttgccaaaaagtcccaactgattgtccatcagcggatccacaccggaaaaaaaccatatgactgcggggcatgcggaaaagcgtttagcgagaaattccatctggttgtccatcagaggactcacacaggtgagaagccatatgattgttctgagtgtgggaaggcattctctcaaaagagttctctgattatacatcagagggtgcacaccggcgaaaagccttacgaatgctccgaatgtggtaaagcgttttctcaaaagagccccctgatcattcaccagcgaatccacactggagagaagccctatgaatgcagggaatgtggaaaggctttttcgcagaaatctcagttgataatccaccatagggcgcatactggcgagaaaccctacgagtgcaccgaatgcggaaaagcgttctgcgaaaaatcacacctgataatccataagcggatccataccggagaaaagccatataaatgcgctcaatgcgaggaagccttctcaaggaaaacagagctcatcactcatcagctggtgcacactggcgagaagccatatgaatgtaccgaatgcgggaagaccttttcacgcaagagccagttgattatacaccagcgaacacatactggcgaaaagccttacaagtgtagtgaatgtggcaaggccttttgtcagaaaagccatctgatcggtcaccaacggatccatacgggcgaaaaaccctatatttgcacagagtgcgggaaggcttttagccaaaaaagccacctgcccggacaccagcggatacataccggggaaaagccttacatctgtgccgagtgtggtaaggccttcagccagaagtcagacttagtcctacatcagaggattcataccggcgagcgcccttaccaatgtgccatttgcggaaaagccttcatccagaagagtcagctcacagtgcaccaacgaatccacaccgtcgtgaaatcatag

SEQ ID NO: 288287 - DNA, 3226 bp, Artificial Sequence
  derived and/or modified sequence
agtacgaagacgaccgggctctcaagatggcggccccatgcggaaacagctccagggagcagccatgttgcttcctgaacaaagcctctgaagatgcggaacgggcaaaaccgcccagtacggaacggcgcagcctcgggagcccggtgtggtgctcgcggacaggaagcaggagagtttgccaatagggatgtgacagcggttcccattaagcggtgatggtggttttgggacctgataatcgagctgggagtcagaggcgggatgtgtgcggtgaaggatgttttgatacccccatataaaataatctgtctgtcatgggagcccccacgtcctctgaaatagttcagctctgtctgcatgacttgtcctgggactgaggaaaatttaccaggggttagtatcattcaaggatgtggctgtggatttcacccaggaggagtggcagcaacttgacccttctcagaggaccctgtacagggatgtgatgctggagaactacagccacctggtctcaatggggtatccagtttccaaaccagatgtcatctccaagttggaacaaggagaagagccatggatcataaagggagacatatcaaattggatctatccagatgaatatcaggcagatgggagacaagacaggaagagtaaccttcacaactcccagtcatgtattttggggacagtttccttccatcataagatactgaaaggagtcacaagggatggttcattgtgctccattttaaaagtctgtcaaggtgatggtcagctgcagagatttctagagaatcaagacaaactcttcaggcaggtcacatttgttaacagcaaaacagtgactgaggcatcagggcataaatataatccactggggaaaatatttcaagagtgcatagaaacagatatatcaatacagagattccataaatatgatgcttttaaaaagaacttaaaaccaaatattgacctaccgagttgttataagagcaattcaagaaaaaaacctgatcagagttttggaggtggaaaatcatctagccagagtgagcccaattctaatcttgagaagattcacaatggagtaataccttttgatgataatcagtgtggaaacgtttttagaaatacacaatcccttattcaatatcagaatgtggaaactaaagagaaaagctgtgtatgtgttacatgtggaaaagcctttgctaagaagtcacaactcattgtacatcaaagaattcatactggaaagaaaccatatgattgtggtgcatgcggaaaagccttcagtgagaagtttcatcttgttgtacatcagagaactcatactggggagaaaccttatgattgttctgaatgtggaaaagccttctctcagaaatcgtcccttattatacatcagagagttcacactggggaaaaaccctatgaatgtagtgaatgcgggaaagccttctcccagaaatcacccctcattatacatcagagaatacatactggggaaaaaccctatgaatgtagagagtgtgggaaggccttttcccagaagtcacagctgattatacaccacagagctcatactggagagaagccgtatgagtgtaccgaatgtgggaaagccttctgtgagaagtcccacctcattatacataaaagaattcacactggtgagaaaccctacaaatgtgctcaatgtgaggaagccttcagcaggaagacagaactcattacacatcagttagttcatactggggaaaaaccttatgaatgtactgaatgtggaaagacattctcccgcaagtcacagctcatcatacatcagagaacacatactggagaaaaaccctataaatgtagtgaatgtggcaaagccttctgccagaagtcacatctcattggacatcagagaattcacacaggagaaaaaccttatatatgtactgaatgtgggaaagccttctctcagaagtcccaccttccgggacaccagcgaattcatacaggagagaaaccttacatatgtgctgaatgtggaaaggccttttctcagaagtcagaccttgttttacatcagaggattcatactggggaaagaccctatcaatgtgctatatgtgggaaggccttcatccagaagtcacaactaactgtacaccagagaattcacacagtggtaaaatcataatgaactggccacagaaaagccttagtattagctcaagccttaataattactagaaacccaattaatttgataagcttggggacaacatcccaatagataaaaatttttaagggaatttgtttctagtttggtgatgcctaacttttccagcaaagatgatggaaaatagttatataaatgaagaacatttttaatatggcatgtaaagcttttaaagttatgaactcagtgatcagcacagcaagttaagcatacagaatattgtcaagttgcatattccttatactacaaaatgataatcagccattgtgaaactgctaatattagcttgtcataattatggccataaactaatttttctataaaagacgtggaagaaagcttaagtaaacaataaaataaaacctatacactattttaagaaggggcttgagcatgacccctaaagctacatgtaaagttcttgtacaaaaaatggaatgataggttgatcagattcagtaaagttgatctgtatgcattttcccatctcaagcatataagttgacctgcatctctggaaggaccttgagattgatgcattttgagcaggtctcccttttactcttcccaactgggaacttggagctgaaaaacattggcactgaggccagatggccttgggtttaatcctggctcagtgcctcacagattgtgtgactttaggcaaacatacttctcctagctgagtattttttatcagtaagtacaaatacaatgcagagctcattttcagttaatattagtactttttaaatctttactctctatcttgaagcattagatgttaagactaatgtgtaaaaaccacgtctgagcttgcttttccctctggacactctgcttttgattgcctatccctataagtggctcattttactgtcttctgatcctggtggccttatttttgctatgttaaggttgtgttttttaatacttggatttattttcatatacttacataaaccgtggtgattgcacataaagaccctg

SEQ ID NO: 288288 - protein, 426 aa, Artificial Sequence
  derived and/or modified sequence
MRQVCCSALPPPPLEKGRCSSYSDSSSSSSERSSSSSSSSSESGSSSRSSSNNSSISRPAAPPEPRPQQQPQPRSPAARRAAARSRAAAAGGMRRDPAPGFSMLLFGVSLACYSPSLKSVQDQAYKAPVVVEGKVQGLVPAGGSSSNSTREPPASGRVALVKVLDKWPLRSGGLQREQVISVGSCVPLERNQRYIFFLEPTEQPLVFKTAFAPLDTNGKNLKKEVGKILCTDCATRPKLKKMKSQTGQVGEKQSLKCEAAAGNPQPSYRWFKDGKELNRSRDIRIKYGNGRKNSRLQFNKVKVEDAGEYVCEAENILGKDTVRGRLYVNSVSTTLSSWSGHARKCNETAKSYCVNGGVCYYIEGINQLSCKCPNGFFGQRCLEKLPLRLYMPDPKQSVLWDTPGTGVSSSQWSTSPKPRSCTRRGS

SEQ ID NO: 288289 - protein, 330 aa, Artificial Sequence
  derived and/or modified sequence
MRRDPAPGFSMLLFGVSLACYSPSLKSVQDQAYKAPVVVEGKVQGLVPAGGSSSNSTREPPASGRVALVKVLDKWPLRSGGLQREQVISVGSCVPLERNQRYIFFLEPTEQPLVFKTAFAPLDTNGKNLKKEVGKILCTDCATRPKLKKMKSQTGQVGEKQSLKCEAAAGNPQPSYRWFKDGKELNRSRDIRIKYGNGRKNSRLQFNKVKVEDAGEYVCEAENILGKDTVRGRLYVNSVSTTLSSWSGHARKCNETAKSYCVNGGVCYYIEGINQLSCKCPNGFFGQRCLEKLPLRLYMPDPKQSVLWDTPGTGVSSSQWSTSPSTLDLN

SEQ ID NO: 288290 - DNA, 1281 bp, Artificial Sequence
  derived and/or modified sequence
atgagacaggtgtgctgcagcgccttgcccccacctccccttgagaagggtagatgttcaagttacagcgattcaagctcctcctccagcgagaggagcagctcttcatccagctcttcatctgaatctggaagctccagcaggtcttcctctaataactcttccattagtaggccagcagcccctcctgagcccagaccccagcagcaaccacagccaagatctcctgccgcaagaagggccgctgctaggagccgggcagccgccgcgggagggatgcgaagggatcccgcccctggattctccatgttattgttcggcgtctcacttgcttgctactcaccttcgctgaaatccgtacaggaccaagcctacaaagccccagtggtggtcgaaggcaaggtgcaggggctagtccctgcaggtggctcttcttctaattcgacgagagagcctcccgcctccggaagagtggccttggtaaaagtgcttgataaatggccgctgcggtccggcggactacaaagggaacaggtgatcagcgtaggctcctgcgtccccctcgaacgcaaccagcgctatatcttttttctcgagcccaccgagcagcctttggtattcaagaccgcatttgctcctctagacactaacggcaaaaaccttaaaaaagaagtgggcaaaatcctctgcaccgactgtgcaaccaggccgaagctgaagaagatgaaatcccaaacaggccaagtaggagaaaagcagagccttaagtgtgaggctgctgctggcaacccccagccttcctataggtggtttaaggatggtaaggagctgaacaggagccgcgacatccggattaagtatggcaatgggcggaaaaatagcagacttcaatttaataaggttaaagtcgaagacgctggggaatatgtgtgcgaagctgaaaacatcctgggaaaggatacagtcagaggtcgcctgtatgttaattccgtgtcaacgaccttatcatcatggtctggacacgcccgcaagtgcaatgaaacagcgaaaagttactgcgtaaacggaggagtctgctattatatcgagggcataaaccagttgtcttgcaagtgcccgaatggattctttggccagcgttgtttggagaagctgccgcttcgtctgtatatgccagaccccaagcaatctgtgctttgggacacgccgggtaccggcgtgagtagttcacagtggagcaccagtccaaagcctcgctcctgtacgcggcgcgggtcatag

SEQ ID NO: 288291 - DNA, 993 bp, Artificial Sequence
  derived and/or modified sequence
atgaggcgggatcccgcccccggcttcagtatgctcctgtttggcgtttccttagcatgttattcccccagtctgaaaagtgttcaggatcaggcatacaaggctccggtggtggttgagggaaaagtccaggggcttgttcctgcgggcggcagttcctctaactcgacccgggaaccacccgcatctggcagggtggccctggtgaaggtcttggacaaatggccactccggtcaggcgggcttcagcgggagcaggtcatttccgtaggcagctgcgttcccctcgagcgcaatcagaggtacatcttctttctggaaccgaccgaacagccgttggtgtttaagacagcgttcgctccccttgacacgaacgggaaaaacctcaagaaggaggttgggaaaatcctgtgtaccgattgcgctacaagaccgaaactgaagaagatgaaaagccagactggccaggtaggcgaaaagcagtccctgaaatgtgaagcggcggctggaaacccacaacctagttacagatggttcaaggatggcaaggaactgaacaggtcccgggacatcaggatcaagtacggcaacggccgaaagaatagccgcttacagtttaacaaggttaaggttgaggatgcaggtgaatatgtctgcgaagcagagaatattcttgggaaagatactgtgcgcggccgcctatacgtaaactcagtgtctaccactctcagcagctggtcaggtcacgcccgtaagtgcaatgaaaccgctaaaagctactgcgtgaacgggggtgtgtgttattatatcgagggcataaatcaactgagttgcaaatgtcccaatgggtttttcggtcagagatgcctggagaagctgccactcaggctgtatatgccagatcccaagcagtccgtcctgtgggatacccctgggacaggcgtctccagttcccaatggagcactagtccctctacccttgaccttaactag

SEQ ID NO: 288292 - DNA, 1281 bp, Artificial Sequence
  derived and/or modified sequence
atgaggcaggtgtgctgcagcgccctgcccccaccacccctggagaagggccgctgcagcagctacagcgacagcagcagcagcagcagcgagaggagcagcagcagcagcagcagcagcagcgagagcggcagcagcagccgcagcagcagcaacaacagcagcatcagcaggcctgctgcccctcctgagccccggccccagcagcagccccagcccaggagccctgctgccaggagagctgctgcccggagcagagctgctgctgctgggggcatgaggcgggaccctgcccctggcttctccatgctgctgtttggagtgtccctggcctgctacagccccagcctgaagtctgtgcaggaccaggcctacaaggcccctgtggtggtggagggcaaggtgcagggcctggtgcctgctgggggcagcagcagcaacagcacccgggagcccccagccagcggccgggtggccctggtgaaggtgctggacaagtggcccctgcggagcggcggcctgcagcgggagcaggtgatctctgtgggcagctgtgtgcccctggagaggaaccagcgctacatcttcttcctggagcccacagagcagcccctggtgttcaagacagcctttgcccccctggacaccaacgggaagaacctgaagaaggaggtgggcaagatcctgtgcacagactgtgccacccggcccaagctgaagaagatgaagagccagacaggccaggtgggggagaagcagagcctgaagtgtgaggccgctgctggcaacccccagcccagctaccgctggttcaaggatggcaaggagctgaacagaagccgggacatccgcatcaagtatggaaatggaaggaagaacagccggctgcagttcaacaaggtgaaggtggaggatgctggggagtatgtgtgtgaggccgagaacatcctgggcaaggacacagtgcggggccgcctgtatgtgaacagcgtgtccaccaccctgagctcctggagcggccacgccaggaagtgcaatgaaacagccaagagctactgtgtgaatggaggagtgtgctactacatcgagggcatcaaccagctgagctgcaagtgccccaacggcttcttcggccagcgctgcctggagaagctgcccctgcggctgtacatgccagaccccaagcagagcgtgctgtgggacaccccaggcactggagtgagcagcagccagtggagcaccagccccaagcccaggagctgcacccggcggggcagctag

SEQ ID NO: 288293 - DNA, 993 bp, Artificial Sequence
  derived and/or modified sequence
atgaggcgggaccctgcccctggcttctccatgctgctgtttggagtgtccctggcctgctacagccccagcctgaagtctgtgcaggaccaggcctacaaggcccctgtggtggtggagggcaaggtgcagggcctggtgcctgctgggggcagcagcagcaacagcacccgggagcccccagccagcggccgggtggccctggtgaaggtgctggacaagtggcccctgcggagcggcggcctgcagcgggagcaggtgatctctgtgggcagctgtgtgcccctggagaggaaccagcgctacatcttcttcctggagcccacagagcagcccctggtgttcaagacagcctttgcccccctggacaccaacgggaagaacctgaagaaggaggtgggcaagatcctgtgcacagactgtgccacccggcccaagctgaagaagatgaagagccagacaggccaggtgggggagaagcagagcctgaagtgtgaggccgctgctggcaacccccagcccagctaccgctggttcaaggatggcaaggagctgaacagaagccgggacatccgcatcaagtatggaaatggaaggaagaacagccggctgcagttcaacaaggtgaaggtggaggatgctggggagtatgtgtgtgaggccgagaacatcctgggcaaggacacagtgcggggccgcctgtatgtgaacagcgtgtccaccaccctgagctcctggagcggccacgccaggaagtgcaatgaaacagccaagagctactgtgtgaatggaggagtgtgctactacatcgagggcatcaaccagctgagctgcaagtgccccaacggcttcttcggccagcgctgcctggagaagctgcccctgcggctgtacatgccagaccccaagcagagcgtgctgtgggacaccccaggcactggagtgagcagcagccagtggagcaccagccccagcaccctggacctgaactag

SEQ ID NO: 288294 - DNA, 1281 bp, Artificial Sequence
  derived and/or modified sequence
atgcggcaggtgtgctgcagcgccctgccccccccccccctggagaagggccggtgcagcagttactcagatagctcttccagctcctccgaaaggtcgtccagcagctcaagttcatcaagcgagagtgggagcagttcccgttcttcaagcaataatagctcaattagtcgaccagctgctcctcccgagccacgcccccaacagcagcctcaaccacgctctcccgccgcgaggagggcggccgctagaagccgtgctgccgccgccggcggcatgagaagggacccagctccgggtttctctatgctcctcttcggggtgtcccttgcttgctattccccttctctgaaatccgttcaggaccaagcatacaaagctcctgtggttgtcgaaggaaaggtccaaggcctggtgcccgccggcgggtcatcaagtaactccactcgagaacccccagcgtcaggtcgggtcgccctcgtcaaagtcctcgacaaatggcctctgcggtcaggcgggctgcagcgtgagcaggtcatttcggtgggctcatgtgtgccactcgaacgcaaccaacggtacattttttttcttgaacctacggagcaacctctagtcttcaaaactgctttcgccccccttgatacaaacgggaaaaatctcaagaaggaggtgggcaagatcctgtgtacagattgcgcaacccgccccaagctcaaaaaaatgaagagccagacaggccaagtcggggagaagcagagccttaagtgcgaggcggcagcaggcaaccctcagcctagctataggtggttcaaggacggcaaggagctgaacagaagccgtgacataagaatcaaatatggcaatgggaggaagaactctaggctacagttcaacaaagtgaaagttgaagacgcgggtgagtacgtttgcgaagctgagaatatcctcggcaaggataccgttcgcggtcgactctatgtgaattcagtcagcacaacactgtcatcctggtctgggcatgcacgcaagtgcaatgaaaccgcgaaaagctactgtgtcaatggaggagtgtgctattatatcgagggtataaatcagctgtcatgtaagtgcccaaatgggttcttcgggcaaagatgcctggagaaactcccattgcgcctgtatatgcctgatccaaagcagtcggtgttgtgggacacgcctggtactggcgtctcaagttcccagtggagcacatctccgaagccccgatcatgtacaagacgaggctcgtag

SEQ ID NO: 288295 - DNA, 993 bp, Artificial Sequence
  derived and/or modified sequence
atgcggcgggaccccgcccccggcttcagcatgctgctgttcggcgtgtcgctggcgtgttactcacccagcttaaagagtgttcaggatcaggcctacaaagctcccgtggtggtcgagggtaaggttcagggattggtgccggccgggggaagcagcagtaatagtacaagggagccgcctgcttctggtagggtggccttagtgaaggttctggataagtggcccttacgttcagggggcttacagcgggagcaggtaatcagcgtggggtcatgcgtgccgctggagaggaaccagagatatattttctttcttgaaccgacagaacaaccattggtattcaagactgctttcgccccccttgacacaaatggtaaaaatttaaagaaagaggtggggaaaatactttgtactgactgcgcaacaaggcccaagctgaaaaagatgaagagccagaccggtcaggtgggagagaaacagagcttaaagtgcgaggcggccgccggcaacccgcagcctagttatcgctggtttaaggatgggaaggaacttaatcgctcacgggacatccggatcaaatacggtaacggtcgcaagaacagcaggctccagttcaataaagtgaaagtggaagatgccggggaatatgtttgcgaggcagaaaacatccttggcaaggacaccgttagagggagactctatgtaaatagcgtgtccacaacattatcctcctggtcaggccacgctcgaaagtgtaacgaaactgccaaatcatactgcgtgaatggtggcgtgtgctattatattgagggaattaaccagttatcctgcaagtgtccaaacgggttttttggtcagcggtgtcttgagaaactgcctctgaggctgtacatgcctgaccccaagcaatccgtgctgtgggacacccctggcactggggttagttcatctcagtggagtactagcccttcgactcttgatctcaactag

SEQ ID NO: 288296 - DNA, 3079 bp, Artificial Sequence
  derived and/or modified sequence
cctccaggtcctggcgcacagggtgggagcgctgcgctgcgccgcgctgcgcatcgcggcccgcttgccgcctgccccctgccctagctgggccacctccccgggctgccggtggagggctaagaggcgctaacgttacgctgtttccggttttccagcgggctctgtttcccctcccaaggcggcggcggctgagcggcggagccccccaaatggcctggccagatgcggcaggtttgctgctcagcgctgccgccgccgccactggagaagggtcggtgcagcagctacagcgacagcagcagcagcagcagcgagaggagcagcagcagcagcagcagcagcagcgagagcggcagcagcagcaggagcagcagcaacaacagcagcatctctcgtcccgctgcgcccccagagccgcggccgcagcaacagccgcagccccgcagccccgcagcccggagagccgccgcccgttcgcgagccgcagccgccggcggcatgaggcgcgacccggcccccggcttctccatgctgctcttcggtgtgtcgctcgcctgctactcgcccagcctcaagtcagtgcaggaccaggcgtacaaggcacccgtggtggtggagggcaaggtacaggggctggtcccagccggcggctccagctccaacagcacccgagagccgcccgcctcgggtcgggtggcgttggtaaaggtgctggacaagtggccgctccggagcggggggctgcagcgcgagcaggtgatcagcgtgggctcctgtgtgccgctcgaaaggaaccagcgctacatctttttcctggagcccacggaacagcccttagtctttaagacggcctttgcccccctcgataccaacggcaaaaatctcaagaaagaggtgggcaagatcctgtgcactgactgcgccacccggcccaagttgaagaagatgaagagccagacgggacaggtgggtgagaagcaatcgctgaagtgtgaggcagcagccggtaatccccagccttcctaccgttggttcaaggatggcaaggagctcaaccgcagccgagacattcgcatcaaatatggcaacggcagaaagaactcacgactacagttcaacaaggtgaaggtggaggacgctggggagtatgtctgcgaggccgagaacatcctggggaaggacaccgtccggggccggctttacgtcaacagcgtgagcaccaccctgtcatcctggtcggggcacgcccggaagtgcaacgagacagccaagtcctattgcgtcaatggaggcgtctgctactacatcgagggcatcaaccagctctcctgcaaatgtccaaatggattcttcggacagagatgtttggagaaactgcctttgcgattgtacatgccagatcctaagcaaagtgtcctgtgggatacaccggggacaggtgtcagcagttcgcaatggtcaacttctccaaagccgaggagctgtaccagaagagggtcctgaccatcacgggcatctgcgtggctctgctggtcgtgggcatcgtctgtgtggtggcctactgcaagaccaaaaaacagcggaagcagatgcacaaccacctccggcagaacatgtgcccggcccatcagaaccggagcttggccaatgggcccagccacccccggctggacccagaggagatccagatggcagattatatttccaagaacgtgccagccacagaccatgtcatcaggagagaaactgagaccaccttctctgggagccactcctgttctccttctcaccactgctccacagccacacccacctccagccacagacacgagagccacacgtggagcctggaacgttctgagagcctgacttctgactcccagtcggggatcatgctatcatcagtgggtaccagcaaatgcaacagcccagcatgtgtggaggcccgggcaaggcgggcagcagcctacaacctggaggagcggcgcagggccaccgcgccaccctatcacgattccgtggactcccttcgcgactccccacacagcgagaggtacgtgtcggccctgaccacgcccgcgcgcctctcgcccgtggacttccactactcgctggccacgcaggtgccaactttcgagatcacgtcccccaactcggcgcacgccgtgtcgctgccgccggcggcgcccatcagttaccgcctggccgagcagcagccgttactgcggcacccggcgccccccggcccgggacccggacccgggcccgggcccgggcccggcgcagacatgcagcgcagctatgacagctactattaccccgcggcggggcccggaccgcggcgcgggacctgcgcgctcggcggcagcctgggcagcctgcctgccagccccttccgcatccccgaggacgacgagtacgagaccacgcaggagtgcgcgcccccgccgccgccgcggccgcgcgcgcgcggtgcgtcccgcaggacgtcggcggggccccggcgctggcgccgctcgcgcctcaacgggctggcggcgcagcgcgcacgggcggcgagggactcgctgtcgctgagcagcggctcgggcggcggctcagcctcggcgtcggacgacgacgcggacgacgcggacggggcgctggcggccgagagcacacctttcctgggcctgcgtggggcgcacgacgcgctgcgctcggactcgccgccactgtgcccggcggccgacagcaggacttactactcactggacagccacagcacgcgggccagcagcagacacagccgcgggccgcccccgcgggccaagcaggactcggcgccactctagggccccgccgcgcgcccctccgccccgcccgccccactatctttaaggagaccagagaccgcctactggagagaaaggaggaaaaaagaaataaaaatatttttattttctataaaaggaaaaaagtataacaaaatgttttattttcattttagcaaaaattgtcttataatactagctaacggcaaaggcgtttttatagggaaactatttatatgtaacatcctgatttacagcttcgg

SEQ ID NO: 288297 - DNA, 2613 bp, Artificial Sequence
  derived and/or modified sequence
atcctcctccaggtcctggcgcacagggtgggagcgctgcgctgcgccgcgctgcgcatcgcggcccgcttgccgcctgccccctgccctagctgggccacctccccgggctgccggtggagggctaagaggcgctaacgttacgctgtttccggttttccagcgggctctgtttcccctcccaaggcggcggcggctgagcggcggagccccccaaatggcctggccagatgcggcaggtttgctgctcagcgctgccgccgccgccactggagaagggtcggtgcagcagctacagcgacagcagcagcagcagcagcgagaggagcagcagcagcagcagcagcagcagcgagagcggcagcagcagcaggagcagcagcaacaacagcagcatcagccgccgcccgttcgcgagccgcagccgccggcggcatgaggcgcgacccggcccccggcttctccatgctgctcttcggtgtgtcgctcgcctgctactcgcccagcctcaagtcagtgcaggaccaggcgtacaaggcacccgtggtggtggagggcaaggtacaggggctggtcccagccggcggctccagctccaacagcacccgagagccgcccgcctcgggtcgggtggcgttggtaaaggtgctggacaagtggccgctccggagcggggggctgcagcgcgagcaggtgatcagcgtgggctcctgtgtgccgctcgaaaggaaccagcgctacatctttttcctggagcccacggaacagcccttagtctttaagacggcctttgcccccctcgataccaacggcaaaaatctcaagaaagaggtgggcaagatcctgtgcactgactgcgccacccggcccaagttgaagaagatgaagagccagacgggacaggtgggtgagaagcaatcgctgaagtgtgaggcagcagccggtaatccccagccttcctaccgttggttcaaggatggcaaggagctcaaccgcagccgagacattcgcatcaaatatggcaacggcagaaagaactcacgactacagttcaacaaggtgaaggtggaggacgctggggagtatgtctgcgaggccgagaacatcctggggaaggacaccgtccggggccggctttacgtcaacagcgtgagcaccaccctgtcatcctggtcggggcacgcccggaagtgcaacgagacagccaagtcctattgcgtcaatggaggcgtctgctactacatcgagggcatcaaccagctctcctgcaaatgtccaaatggattcttcggacagagatgtttggagaaactgcctttgcgattgtacatgccagatcctaagcaaagtgtcctgtgggatacaccggggacaggtgtcagcagttcgcaatggtcaacttctccaagcaccttggatttgaattaaaggaagccgaggagctgtaccagaagagggtcctgaccatcacgggcatctgcgtggctctgctggtcgtgggcatcgtctgtgtggtggcctactgcaagaccaaaaaacagcggaagcagatgcacaaccacctccggcagaacatgtgcccggcccatcagaaccggagcttggccaatgggcccagccacccccggctggacccagaggagatccagatggcagattatatttccaagaacgtgccagccacagaccatgtcatcaggagagaaactgagaccaccttctctgggagccactcctgttctccttctcaccactgctccacagccacacccacctccagccacagacacgagagccacacgtggagcctggaacgttctgagagcctgacttctgactcccagtcggggatcatgctatcatcagtgggtaccagcaaatgcaacagcccagcatgtgtggaggcccgggcaaggcgggcagcagcctacaacctggaggagcggcgcagggccaccgcgccaccctatcacgattccgtggactcccttcgcgactccccacacagcgagaggtcagttcctaccccctgacctattccccgcttagccagagggctggcaccactggcccaaggctgacccttagggcccctcagaaacactccaaagagcctcatctccatttttcatatgggaaaacaaggtcctagaaaaggtgaaatggcctgctcagagccatcggcatgttaatgacagactgggactagagttgggccagtggaccctggtggacagtgaccatctaatttaattgtcctcccaggacacttttcacactagaaaaaggacattattaatagttacactggaacatcaagaacaaacaggcagccgggcgcggtggctcacacctgtaatcccagcacttgggaggccaaggcggatggatcacctgaggtcaggagtttgagactagtctggccaacatggtgaaacccccatctttactaaaaatacaaaaattagccaggcatggtggcacatgcctgtaatcacagctacttgggaggctgaggcaagagcatcccttcacctgggaggcggaggttgcagtgagctgagatggcgccactgcactccaacctcagcaacagagcaagactccctttac

SEQ ID NO: 288298 - DNA, 1281 bp, Artificial Sequence
  derived and/or modified sequence
atgagacaggtgtgttgctccgcactgccaccccctccactcgagaaaggtaggtgcagctcttactccgattcttcttcgtccagctccgaacgatcgagcagtagttcaagcagttcctccgagagtggctctagttcacgaagttcttccaacaactccagcatcagtcggccagctgcacctcccgagccccgtccccaacagcagcctcagcctcgcagcccggcagccaggagagccgcagccaggagcagggctgctgccgctggaggaatgcggagagatccagccccagggttttcaatgttgctcttcggggtgtctctggcgtgctacagccctagtctgaagtccgtccaggaccaagcttataaggccccagttgtcgtagaaggcaaggtgcaggggctggtccccgcaggcggtagttcgtccaactccacaagagaacctcccgctagcggacgagtcgctctagtcaaggtgcttgataagtggcctttgaggagtggcggattacagcgggagcaggtgatctctgtggggtcgtgcgtcccattagaacgtaaccagcgatacattttcttcttggagccaactgagcagcctttggtgttcaagacagccttcgcacccttggacactaatggaaagaatctcaaaaaggaggtgggcaaaatcctatgtacagattgtgccactagacctaagcttaaaaagatgaagtctcagacgggtcaagtgggtgagaagcaatccctgaagtgtgaggctgccgcaggaaatcctcagccctcatacaggtggttcaaggacggcaaagaactaaacagaagccgggacattcggatcaagtatggtaatggacggaaaaattcaaggctccagtttaataaagtgaaggtggaagatgccggtgaatacgtgtgtgaagctgagaatatcttgggcaaggataccgtgagaggcaggctctacgtaaatagtgtatcaaccactctgtcctcgtggtccggccatgccagaaagtgtaacgagacagctaagagctattgtgtgaacggaggggtctgttactatatcgaggggattaatcagctgagttgtaaatgcccaaacggtttctttgggcaacgatgcctggaaaaactgcctctacgattatacatgcccgacccaaagcagtcagttctttgggacaccccgggtaccggagtttcatcatcacaatggtcgacctcccccaaaccacgttcctgtaccagaagggggagttag

SEQ ID NO: 288299 - DNA, 993 bp, Artificial Sequence
  derived and/or modified sequence
atgcgcagggatcccgcacccggtttctccatgctgctctttggggtatcacttgcctgctattcgccctccttgaaatcagtccaagaccaagcctacaaagcccctgtggtggtagaggggaaagtccagggactggttcccgcaggcggttcgagctccaactcaactagagagcctcctgcctccggtcgcgtggcactggtgaaggtacttgataagtggccattgcgaagtggagggctgcagcgtgagcaggttatctctgtggggagctgcgtcccactggaacggaatcagagatacatcttctttctggaaccaactgagcagcccctcgtgttcaagacagccttcgcacctctcgataccaatggcaagaatttgaagaaggaagtgggcaaaatcctctgtactgattgtgcaaccagacccaaactgaagaaaatgaaaagtcagaccggccaggtaggcgagaaacagtccttaaagtgtgaggccgcagcaggcaaccctcagccgagctacaggtggttcaaagacggcaaagagctaaaccgctcgagagacatccgaattaaatacggcaacgggaggaaaaattcacgcttacagttcaataaagtgaaggtcgaggacgccggtgagtacgtctgcgaggcagaaaacatactggggaaagataccgtcagggggcgtctctacgtcaatagcgtctccactacgctttccagctggtccggccacgctagaaaatgcaatgaaaccgccaagtcttattgcgtgaatggcggagtgtgttactatattgaaggaattaaccaactgtcgtgcaaatgccccaacgggttttttggtcaacgctgtctggaaaagctgcccttaaggctgtatatgcctgacccgaaacagagcgtattgtgggataccccgggtacaggagtatcctcctcccagtggtccacttctccttctaccctggatctgaactag

SEQ ID NO: 288300 - DNA, 1281 bp, Artificial Sequence
  derived and/or modified sequence
atgagacaggtgtgctgcagcgccctgccccccccccccctggagaagggcagatgcagcagctacagcgacagcagcagcagcagcagcgagagaagcagcagcagcagcagcagcagcagcgagagcggcagcagcagcagaagcagcagcaacaacagcagcatcagcagacccgccgccccccccgagcccagaccccagcagcagccccagcccagaagccccgccgccagaagagccgccgccagaagcagagccgccgccgccggcggcatgagaagagaccccgcccccggcttcagcatgctgctgttcggcgtgagcctggcctgctacagccccagcctgaagagcgtgcaggaccaggcctacaaggcccccgtggtggtggagggcaaggtgcagggcctggtgcccgccggcggcagcagcagcaacagcaccagagagccccccgccagcggcagagtggccctggtgaaggtgctggacaagtggcccctgagaagcggcggcctgcagagagagcaggtgatcagcgtgggcagctgcgtgcccctggagagaaaccagagatacatcttcttcctggagcccaccgagcagcccctggtgttcaagaccgccttcgcccccctggacaccaacggcaagaacctgaagaaggaggtgggcaagatcctgtgcaccgactgcgccaccagacccaagctgaagaagatgaagagccagaccggccaggtgggcgagaagcagagcctgaagtgcgaggccgccgccggcaacccccagcccagctacagatggttcaaggacggcaaggagctgaacagaagcagagacatcagaatcaagtacggcaacggcagaaagaacagcagactgcagttcaacaaggtgaaggtggaggacgccggcgagtacgtgtgcgaggccgagaacatcctgggcaaggacaccgtgagaggcagactgtacgtgaacagcgtgagcaccaccctgagcagctggagcggccacgccagaaagtgcaacgagaccgccaagagctactgcgtgaacggcggcgtgtgctactacatcgagggcatcaaccagctgagctgcaagtgccccaacggcttcttcggccagagatgcctggagaagctgcccctgagactgtacatgcccgaccccaagcagagcgtgctgtgggacacccccggcaccggcgtgagcagcagccagtggagcaccagccccaagcccagaagctgcaccagaagaggcagctag

SEQ ID NO: 288301 - DNA, 993 bp, Artificial Sequence
  derived and/or modified sequence
atgagaagagaccccgcccccggcttcagcatgctgctgttcggcgtgagcctggcctgctacagccccagcctgaagagcgtgcaggaccaggcctacaaggcccccgtggtggtggagggcaaggtgcagggcctggtgcccgccggcggcagcagcagcaacagcaccagagagccccccgccagcggcagagtggccctggtgaaggtgctggacaagtggcccctgagaagcggcggcctgcagagagagcaggtgatcagcgtgggcagctgcgtgcccctggagagaaaccagagatacatcttcttcctggagcccaccgagcagcccctggtgttcaagaccgccttcgcccccctggacaccaacggcaagaacctgaagaaggaggtgggcaagatcctgtgcaccgactgcgccaccagacccaagctgaagaagatgaagagccagaccggccaggtgggcgagaagcagagcctgaagtgcgaggccgccgccggcaacccccagcccagctacagatggttcaaggacggcaaggagctgaacagaagcagagacatcagaatcaagtacggcaacggcagaaagaacagcagactgcagttcaacaaggtgaaggtggaggacgccggcgagtacgtgtgcgaggccgagaacatcctgggcaaggacaccgtgagaggcagactgtacgtgaacagcgtgagcaccaccctgagcagctggagcggccacgccagaaagtgcaacgagaccgccaagagctactgcgtgaacggcggcgtgtgctactacatcgagggcatcaaccagctgagctgcaagtgccccaacggcttcttcggccagagatgcctggagaagctgcccctgagactgtacatgcccgaccccaagcagagcgtgctgtgggacacccccggcaccggcgtgagcagcagccagtggagcaccagccccagcaccctggacctgaactag

SEQ ID NO: 288302 - DNA, 572 bp, Artificial Sequence
  derived and/or modified sequence
gaagaagtggggtgacttaggggctgagcctcagcaactgggagagtttataagctgggatagcagacccctcagcaccacccattctcctcatccctctgctctctggcctccagcctcccagcagcatggctttcaccggcaagttcgagatggagagtgagaagaattatgatgagttcatgaagctccttgggatctccagcgatgtaatcgaaaaggcccgcaacttcaagatcgtcacggaggtgcagcaggatgggcaggacttcacttggtcccagcactactccgggggccacaccatgaccaacaagttcactgttggcaaggaaagcaacatacagacaatggggggcaagacgttcaaggccactgtgcagatggagggcgggaagctggtggtgaatttccccaactatcaccagacctcagagatcgtgggtgacaagctggtggaggtctccaccatcggaggcgtgacctatgagcgcgtgagcaagagactggcctaagcagccaggcccggcccagggagctacaaacccaccaataaaactgatataaggaca

SEQ ID NO: 288303 - DNA, 387 bp, Artificial Sequence
  derived and/or modified sequence
atggcctttactggaaaattcgaaatggaatcagaaaaaaattacgatgagtttatgaagcttttagggatctctagcgacgtgatcgagaaagctcggaacttcaaaattgtgactgaggtgcagcaagatggtcaggatttcacttggagtcaacattacagcggaggccatactatgacaaacaagtttactgtcggcaaggagtcaaacatccagactatgggaggcaaaaccttcaaggcaactgtgcaaatggagggaggcaagcttgtggttaatttcccaaattaccatcaaactagcgagattgtgggagacaaattggttgaagtcagcacaattggcggggttacgtatgaacgggtaagcaagagactcgcgtag

SEQ ID NO: 288304 - DNA, 387 bp, Artificial Sequence
  derived and/or modified sequence
atggccttcaccgggaagtttgagatggagagcgagaagaactatgatgagttcatgaagctgctgggcatcagcagtgatgtgattgagaaggccaggaacttcaagatcgtgacagaggtgcagcaggacggccaggacttcacctggagccagcactacagcggcggccacaccatgaccaacaagttcaccgtgggcaaggagagcaacatccagaccatgggcggcaagaccttcaaggccaccgtgcagatggagggcggcaagctggtggtgaacttccccaactaccaccagaccagcgagatcgtgggggacaagctggtggaggtgtccaccatcggcggcgtgacctatgaaagagtgtccaagaggctggcctag

SEQ ID NO: 288305 - DNA, 387 bp, Artificial Sequence
  derived and/or modified sequence
atggccttcaccggcaagttcgagatggagagcgagaagaactacgacgagtttatgaagctgctggggattagcagtgacgtaattgagaaggctcgcaatttcaagatcgtcaccgaagttcaacaggacgggcaagacttcacctggagtcaacactacagcggaggtcatactatgacgaacaagttcacagtgggtaaggagagcaacatacagacaatgggcggtaaaacattcaaagcaaccgtgcaaatggaaggcggcaagctggttgtcaactttccgaattaccaccaaacatctgagatcgtgggtgataagcttgtcgaagtgtccactattgggggcgttacctatgagagagtgagcaaacgcctggcttag

SEQ ID NO: 288306 - DNA, 387 bp, Artificial Sequence
  derived and/or modified sequence
atggcatttacaggcaaattcgagatggagagcgaaaaaaattatgacgagtttatgaagttactagggatttccagcgacgtgattgaaaaagcacgtaactttaaaatcgtcactgaggtgcagcaggatgggcaggacttcacctggtcccagcattactccggcggtcatactatgaccaacaaatttacggtgggaaaggagtccaacatccagactatgggcggaaaaacttttaaggccacagtgcagatggaggggggaaagttagttgtgaatttcccaaactatcatcagacgtccgaaattgttggagataaactggtcgaagtttccacaattggaggggtgacatatgaacgggtctcaaagagattagcctag

SEQ ID NO: 288307 - DNA, 387 bp, Artificial Sequence
  derived and/or modified sequence
atggccttcaccggcaagttcgagatggagagcgagaagaactacgacgagttcatgaagctgctgggcatcagcagcgacgtgatcgagaaggccagaaacttcaagatcgtgaccgaggtgcagcaggacggccaggacttcacctggagccagcactacagcggcggccacaccatgaccaacaagttcaccgtgggcaaggagagcaacatccagaccatgggcggcaagaccttcaaggccaccgtgcagatggagggcggcaagctggtggtgaacttccccaactaccaccagaccagcgagatcgtgggcgacaagctggtggaggtgagcaccatcggcggcgtgacctacgagagagtgagcaagagactggcctag

SEQ ID NO: 288308 - protein, 188 aa, Artificial Sequence
  derived and/or modified sequence
MTMVCHRPEGLEQLEAQTNFTKRELQVLYRGFKNECPSGVVNEDTFKQIYAQFFPHGDASTYAHYLFNAFDTTQTGSVKFEDFVTALSILLRGTVHEKLRWTFNLYDINKDGYINKEEMMDIVKAIYDMMGKYTYPVLKEDTPRQHVDVFFQKMDKNKDGIVTLDEFLESCQEDDNIMRSLQLFQNVM

SEQ ID NO: 288309 - protein, 159 aa, Artificial Sequence
  derived and/or modified sequence
MSDHRYGDGGSTFQSTTGHCVHMRGLPYRATENDIYNFFSPLNPVRVHIEIGPDGRVTGEADVEFATHEDAVAAMSKDKANMQHRYVELFLNSTAGASGGAYGSQMLGGMGLSNQSSYGGPASQQLSGGYGGGYGGQSSMSGYDQVLQENSSDFQSNIA

SEQ ID NO: 288310 - DNA, 150 bp, Artificial Sequence
  derived and/or modified sequence
atgatgctgggcaccgagggcggcgagggcttcgtggtgaaggtgagaggcctgccctggagctgcagcgccgacgaggtgcagagattcttcagcgactgcaagatccagaacggcgcccagggcatcagattcatctacaccagatag

SEQ ID NO: 288311 - DNA, 507 bp, Artificial Sequence
  derived and/or modified sequence
atgatgctgggcaccgagggcggcgagggcttcgtggtgaaggtgagaggcctgccctggagctgcagcgccgacgaggtgcagagattcttcagcgactgcaagatccagaacggcgcccagggcatcagattcatctacaccagagagggcagacccagcggcgaggccttcgtggagctggagagcgaggacgaggtgaagctggccctgaagaaggacagagagaccatgggccacagatacgtggaggtgttcaagagcaacaacgtggagatggactgggtgctgaagcacaccggccccaacagccccgacaccgccaacgacggcttcgtgagactgagaggcctgcccttcggctgcagcaaggaggagatcgtgcagttcttcagcggcctggagatcgtgcccaacggcatcaccctgcccgtggacttccagggcagaagcaccggcgaggccttcgtgcagttcgccagccaggagatcgccgagaaggcctag

SEQ ID NO: 288312 - DNA, 639 bp, Artificial Sequence
  derived and/or modified sequence
atgatgctgggcaccgagggcggcgagggcttcgtggtgaaggtgagaggcctgccctggagctgcagcgccgacgaggtgcagagattcttcagcgactgcaagatccagaacggcgcccagggcatcagattcatctacaccagagagggcagacccagcggcgaggccttcgtggagctggagagcgaggacgaggtgaagctggccctgaagaaggacagagagaccatgggccacagatacgtggaggtgttcaagagcaacaacgtggagatggactgggtgctgaagcacaccggccccaacagccccgacaccgccaacgacggcttcgtgagactgagaggcctgcccttcggctgcagcaaggaggagatcgtgcagttcttcagcggcctggagatcgtgcccaacggcatcaccctgcccgtggacttccagggcagaagcaccggcgaggccttcgtgcagttcgccagccaggagatcgccgagaaggccctgaagaagcacaaggagagaatcggccacagatacatcgagatcttcaagagcagcagagccgaggtgagaacccactacgacccccccagaaagctgatggccatgcagagacccggcccctacgacagatag

SEQ ID NO: 288313 - DNA, 480 bp, Artificial Sequence
  derived and/or modified sequence
atgagcgaccacagatacggcgacggcggcagcaccttccagagcaccaccggccactgcgtgcacatgagaggcctgccctacagagccaccgagaacgacatctacaacttcttcagccccctgaaccccgtgagagtgcacatcgagatcggccccgacggcagagtgaccggcgaggccgacgtggagttcgccacccacgaggacgccgtggccgccatgagcaaggacaaggccaacatgcagcacagatacgtggagctgttcctgaacagcaccgccggcgccagcggcggcgcctacggcagccagatgctgggcggcatgggcctgagcaaccagagcagctacggcggccccgccagccagcagctgagcggcggctacggcggcggctacggcggccagagcagcatgagcggctacgaccaggtgctgcaggagaacagcagcgacttccagagcaacatcgcctag

SEQ ID NO: 288314 - DNA, 492 bp, Artificial Sequence
  derived and/or modified sequence
atgatgctgggcaccgagggcggcgagggcttcgtggtgaaggtgagaggcctgccctggagctgcagcgccgacgaggtgcagagattcttcagcgactgcaagatccagaacggcgcccagggcatcagattcatctacaccagagagggcagacccagcggcgaggccttcgtggagctggagagcgaggacgaggtgaagctggccctgaagaaggacagagagaccatgggccacagatacgtggaggtgttcaagagcaacaacgtggagatggactgggtgctgaagcacaccggccccaacagccccgacaccgccaacgacggcttcgtgagactgagaggcctgcccttcggctgcagcaaggaggagatcgtgcagttcttcagcggcctggagatcgtgcccaacggcatcaccctgcccgtggacttccagggcagaagcaccggcgaggccttcgtgcagttcgccagccaggagtag

SEQ ID NO: 288315 - DNA, 393 bp, Artificial Sequence
  derived and/or modified sequence
atgatgctgggcaccgagggcggcgagggcttcgtggtgaaggtgagaggcctgccctggagctgcagcgccgacgaggtgcagagattcttcagcgactgcaagatccagaacggcgcccagggcatcagattcatctacaccagagagggcagacccagcggcgaggccttcgtggagctggagagcgaggacgaggtgaagctggccctgaagaaggacagagagaccatgggccacagatacgtggaggtgttcaagagcaacaacgtggagatggactgggtgctgaagcacaccggccccaacagccccgacaccgccaacgacggcttcgtgagactgagaggcctgcccttcggctgcagcaaggaggagatcgtgcagttctag

SEQ ID NO: 288316 - DNA, 255 bp, Artificial Sequence
  derived and/or modified sequence
atgatgctgggcaccgagggcggcgagggcttcgtggtgaaggtgagaggcctgccctggagctgcagcgccgacgaggtgcagagattcttcagcgactgcaagatccagaacggcgcccagggcatcagattcatctacaccagagagggcagacccagcggcgaggccttcgtggagctggagagcgaggacgaggtgaagctggccctgaagaaggacagagagaccatgggccacagatacgtggagtag

SEQ ID NO: 288317 - DNA, 348 bp, Artificial Sequence
  derived and/or modified sequence
atgatgctgggcaccgagggcggcgagggcttcgtggtgaaggtgagaggcctgccctggagctgcagcgccgacgaggtgcagagattcttcagcgactgcaagatccagaacggcgcccagggcatcagattcatctacaccagagagggcagacccagcggcgaggccttcgtggagctggagagcgaggacgaggtgaagctggccctgaagaaggacagagagaccatgggccacagatacgtggaggtgttcaagagcaacaacgtggagatggactgggtgctgaagcacaccggccccaacagccccgacaccgccaacgacggcttcgtgagactgtag

SEQ ID NO: 288318 - DNA, 87 bp, Artificial Sequence
  derived and/or modified sequence
atgatgctgggcaccgagggcggcgagggcttcgtggtgaaggtgagaggcctgccctggagctgcagcgccgacgaggtgcagtag

SEQ ID NO: 288319 - DNA, 150 bp, Artificial Sequence
  derived and/or modified sequence
atgatgctgggcaccgagggaggggagggcttcgtggtgaaggtccgaggactgccgtggagctgcagcgcggatgaggtgcagcgattcttcagtgactgtaagattcagaacggggcacagggtattcgcttcatttatacccggtag

SEQ ID NO: 288320 - DNA, 507 bp, Artificial Sequence
  derived and/or modified sequence
atgatgttgggcaccgagggcggagagggctttgtagtgaaagtccgcgggttgccctggtcctgcagcgccgacgaggtccaaagattcttcagcgattgtaaaatacagaatggcgcacagggtatccgtttcatctacacccgcgaggggcggccttccggagaggctttcgtcgagttagaaagcgaagacgaagtgaaactggctttaaagaaggaccgggagacgatgggccataggtacgtggaggtgtttaaatcaaataatgtcgagatggactgggtactgaagcacaccggccctaacagtcctgatacagccaacgacggatttgtgagattaaggggcctcccatttggttgctctaaggaggagatagtccagtttttctctggtttagagatagttcctaacggaatcactctgccagtggatttccaagggcggagcaccggcgaggcatttgtacaatttgctagtcaggaaatcgctgaaaaagcctag

SEQ ID NO: 288321 - DNA, 639 bp, Artificial Sequence
  derived and/or modified sequence
atgatgctcggcacagaaggaggagaggggttcgtagtaaaagtccgggggctcccctggtcatgttcggcggacgaggtccagaggttcttttccgactgtaagatacagaacggcgcccagggtatcagattcatttatactagagaggggcggccttcgggagaagcctttgttgagttggagagcgaggacgaggtcaaactggcattgaaaaaagatcgcgaaactatgggtcatcgctacgtcgaagtttttaagagcaataacgtggagatggattgggtgctcaagcacacaggacccaattccccagatacagctaatgatggattcgtccggctcagaggcctcccattcgggtgtagcaaggaggagatagttcagttttttagcggcctggagatcgtgcctaacggaatcacgcttcctgtggacttccaaggtagaagcacaggcgaagcctttgtgcaatttgcttctcaggaaattgcagagaaggccctgaagaagcataaagaaagaataggccatagatacattgaaatcttcaagagcagtagagcggaggttcgaacacactatgacccacctcgcaaattaatggcaatgcagcgcccagggccttatgacaggtag

SEQ ID NO: 288322 - DNA, 480 bp, Artificial Sequence
  derived and/or modified sequence
atgtccgatcataggtacggggacggcggaagcactttccagagcaccactggacattgcgtgcacatgcgaggactgccctacagggcgacggaaaacgatatttacaattttttctcccccctgaatcccgtgcgtgtccatatcgagatcggtccagacggcagagtcactggcgaagcagacgtggagttcgctacacacgaagacgcagttgccgcaatgagcaaggacaaagcaaacatgcaacatcgttacgtagagctgttcttgaattctaccgcaggagcttcaggcggcgcgtatggcagccagatgctcggcggaatggggctttcaaaccagtcaagttacggtgggccagcctctcagcagctgtccgggggctacggcgggggatatgggggccagagcagcatgagcggctatgatcaggtgctgcaggaaaacagctcggactttcagagcaacatcgcatag

SEQ ID NO: 288323 - DNA, 492 bp, Artificial Sequence
  derived and/or modified sequence
atgatgttgggcaccgaggggggtgagggcttcgttgttaaggtcaggggacttccgtggtcctgctccgccgacgaagtgcaacgtttcttttccgactgtaaaattcagaacggggctcagggtatccggttcatctacacaagagaaggacggcccagtggcgaagcatttgtcgagttggagtcagaagacgaggtgaaattggctcttaaaaaagacagagagaccatgggacacagatacgttgaagtgtttaagtccaacaacgtggaaatggattgggtcctcaagcacaccgggcccaacagcccggatactgccaacgacggctttgtacggctccgcggcctcccctttgggtgcagtaaagaggagatcgtgcagtttttttccggattagagatcgtacctaacggtatcaccctgcctgtggattttcagggcagaagtaccggggaagcttttgtgcagttcgccagccaggagtag

SEQ ID NO: 288324 - DNA, 393 bp, Artificial Sequence
  derived and/or modified sequence
atgatgctgggtacagagggtggcgaaggtttcgtggtgaaagtacgaggactgccctggtcctgcagcgctgatgaggtccagaggttcttttcggactgtaaaatccaaaacggggcccagggtataaggtttatctatacccgcgagggacgcccctcaggcgaggcatttgtggaactggaatccgaagacgaagttaaacttgccctaaagaaggatcgagaaactatgggtcaccgctatgtggaagtatttaaatctaataacgtcgaaatggactgggtcctaaaacacacaggccccaatagccccgacaccgccaacgacggctttgtacggctgagagggctaccttttggctgttccaaggaggagatagtgcagttctag

SEQ ID NO: 288325 - DNA, 255 bp, Artificial Sequence
  derived and/or modified sequence
atgatgttggggactgagggaggggaagggtttgttgtaaaggtcaggggcctgccttggagctgcagcgcagacgaagtgcagaggttcttttctgattgcaagatacagaatggagcccaaggaatcagatttatttacacaagagagggacggccaagcggggaagcttttgttgaactggaaagcgaagatgaagtgaaacttgccctgaagaaagatagagaaacaatggggcaccgatatgtggaatag

SEQ ID NO: 288326 - DNA, 348 bp, Artificial Sequence
  derived and/or modified sequence
atgatgctgggcacagagggtggggagggatttgtagtgaaggtgagaggcctgccttggtcctgctcggccgatgaggtgcaacgattctttagcgactgcaaaatccagaacggtgctcaggggatcaggtttatctacaccagagaggggaggccatccggcgaggcgttcgtggagctggagagcgaagacgaggtgaagctggctctgaaaaaggaccgggagacgatggggcataggtacgtggaggtttttaagagcaataatgttgagatggactgggtgttaaaacacaccggccctaatagcccagacaccgcaaacgacggttttgtgagactgtag

SEQ ID NO: 288327 - DNA, 87 bp, Artificial Sequence
  derived and/or modified sequence
atgatgctcgggaccgaggggggggagggattcgtggtcaaagtgaggggtttaccttggtcttgttccgcagatgaagtgcaatag

SEQ ID NO: 288328 - DNA, 150 bp, Artificial Sequence
  derived and/or modified sequence
atgatgctgggcacagaaggaggagagggctttgtggtgaaggtgcggggcctgccctggagctgcagcgcagatgaggtgcagcgcttcttcagtgactgcaagatccagaatggagcccagggcatccgcttcatctacaccaggtag

SEQ ID NO: 288329 - DNA, 507 bp, Artificial Sequence
  derived and/or modified sequence
atgatgctgggcacagaaggaggagagggctttgtggtgaaggtgcggggcctgccctggagctgcagcgcagatgaggtgcagcgcttcttcagtgactgcaagatccagaatggagcccagggcatccgcttcatctacacccgggagggccggcccagcggggaggcctttgtggagctggagagtgaagatgaggtgaagctggccctgaagaaggaccgggagaccatgggccaccgctacgtggaggtgttcaagagcaacaacgtggagatggactgggtgctgaagcacacaggccccaacagcccagacacagccaatgatggctttgtgcggctgcggggcctgcccttcggctgcagcaaggaggagatcgtgcagttcttcagcggcctggagatcgtgcccaacggcatcaccctgcctgtggacttccagggccgcagcactggagaggcctttgtgcagtttgccagccaggagattgctgagaaggcctag

SEQ ID NO: 288330 - DNA, 639 bp, Artificial Sequence
  derived and/or modified sequence
atgatgctgggcacagaaggaggagagggctttgtggtgaaggtgcggggcctgccctggagctgcagcgcagatgaggtgcagcgcttcttcagtgactgcaagatccagaatggagcccagggcatccgcttcatctacacccgggagggccggcccagcggggaggcctttgtggagctggagagtgaagatgaggtgaagctggccctgaagaaggaccgggagaccatgggccaccgctacgtggaggtgttcaagagcaacaacgtggagatggactgggtgctgaagcacacaggccccaacagcccagacacagccaatgatggctttgtgcggctgcggggcctgcccttcggctgcagcaaggaggagatcgtgcagttcttcagcggcctggagatcgtgcccaacggcatcaccctgcctgtggacttccagggccgcagcactggagaggcctttgtgcagtttgccagccaggagattgctgagaaggccctgaagaagcacaaggagcgcatcggccaccgctacatcgagatcttcaagagcagcagagctgaggtgaggacccactatgacccccccaggaagctgatggccatgcagaggcctggcccctatgacagatag

SEQ ID NO: 288331 - DNA, 480 bp, Artificial Sequence
  derived and/or modified sequence
atgtctgaccacagatatggagatggcggcagcaccttccagagcaccaccggccactgtgtgcacatgaggggcctgccctaccgggccacagaaaatgacatctacaacttcttcagccccctgaaccctgtgcgggtgcacattgaaattggaccagatggccgggtgactggagaggctgatgtggagtttgccacccatgaagatgctgtggccgccatgagcaaggacaaggccaacatgcagcaccgctacgtggagctgttcctgaacagcacagctggggccagcggcggggcctacggcagccagatgctgggcggcatgggcctgagcaaccagagcagctatggaggccctgccagccagcagctgagcggcggctacggcggcggctacggcggccagagctccatgagcggctatgaccaggtgctgcaggagaacagcagtgacttccagagcaacatcgcctag

SEQ ID NO: 288332 - DNA, 492 bp, Artificial Sequence
  derived and/or modified sequence
atgatgctgggcacagaaggaggagagggctttgtggtgaaggtgcggggcctgccctggagctgcagcgcagatgaggtgcagcgcttcttcagtgactgcaagatccagaatggagcccagggcatccgcttcatctacacccgggagggccggcccagcggggaggcctttgtggagctggagagtgaagatgaggtgaagctggccctgaagaaggaccgggagaccatgggccaccgctacgtggaggtgttcaagagcaacaacgtggagatggactgggtgctgaagcacacaggccccaacagcccagacacagccaatgatggctttgtgcggctgcggggcctgcccttcggctgcagcaaggaggagatcgtgcagttcttcagcggcctggagatcgtgcccaacggcatcaccctgcctgtggacttccagggccgcagcactggagaggcctttgtgcagtttgccagccaggagtag

SEQ ID NO: 288333 - DNA, 393 bp, Artificial Sequence
  derived and/or modified sequence
atgatgctgggcacagaaggaggagagggctttgtggtgaaggtgcggggcctgccctggagctgcagcgcagatgaggtgcagcgcttcttcagtgactgcaagatccagaatggagcccagggcatccgcttcatctacacccgggagggccggcccagcggggaggcctttgtggagctggagagtgaagatgaggtgaagctggccctgaagaaggaccgggagaccatgggccaccgctacgtggaggtgttcaagagcaacaacgtggagatggactgggtgctgaagcacacaggccccaacagcccagacacagccaatgatggctttgtgcggctgcggggcctgcccttcggctgcagcaaggaggagatcgtgcagttctag

SEQ ID NO: 288334 - DNA, 255 bp, Artificial Sequence
  derived and/or modified sequence
atgatgctgggcacagaaggaggagagggctttgtggtgaaggtgcggggcctgccctggagctgcagcgcagatgaggtgcagcgcttcttcagtgactgcaagatccagaatggagcccagggcatccgcttcatctacacccgggagggccggcccagcggggaggcctttgtggagctggagagtgaagatgaggtgaagctggccctgaagaaggaccgggagaccatgggccaccgctacgtggagtag

SEQ ID NO: 288335 - DNA, 348 bp, Artificial Sequence
  derived and/or modified sequence
atgatgctgggcacagaaggaggagagggctttgtggtgaaggtgcggggcctgccctggagctgcagcgcagatgaggtgcagcgcttcttcagtgactgcaagatccagaatggagcccagggcatccgcttcatctacacccgggagggccggcccagcggggaggcctttgtggagctggagagtgaagatgaggtgaagctggccctgaagaaggaccgggagaccatgggccaccgctacgtggaggtgttcaagagcaacaacgtggagatggactgggtgctgaagcacacaggccccaacagcccagacacagccaatgatggctttgtgcggctgtag

SEQ ID NO: 288336 - DNA, 87 bp, Artificial Sequence
  derived and/or modified sequence
atgatgctgggcacagaaggaggagagggctttgtggtgaaggtgcggggcctgccctggagctgcagcgcagatgaggtgcagtag

SEQ ID NO: 288337 - DNA, 150 bp, Artificial Sequence
  derived and/or modified sequence
atgatgctgggcaccgagggcggcgagggcttcgtggtgaaggtgcgaggcctgccttggagctgcagcgccgacgaggttcagagattcttcagcgactgcaagattcaaaatggtgcacaagggatcagatttatctacacgagatag

SEQ ID NO: 288338 - DNA, 507 bp, Artificial Sequence
  derived and/or modified sequence
atgatgctgggcaccgagggcggcgagggcttcgtggtgaaggtgagaggcctgccttggtcttgctctgcggacgaagtgcagcgctttttctctgattgtaagatccagaacggtgcccagggcataaggtttatctacacgagggaaggccggccttctggcgaagcattcgtagagttggaatctgaggacgaagtgaaattggctctgaagaaagatcgagagacaatgggacaccggtacgttgaagtcttcaagtcaaacaatgtggagatggattgggtgcttaagcacacgggtcctaacagtccagacacagcgaatgacggtttcgttcggctacgaggacttccattcggatgcagcaaggaggagatagtccagttcttcagcggattggagattgttccgaatggcatcactctgcctgtcgatttccagggaaggtctaccggtgaggccttcgtccaatttgcaagtcaggaaattgccgagaaagcctag

SEQ ID NO: 288339 - DNA, 639 bp, Artificial Sequence
  derived and/or modified sequence
atgatgctgggcaccgagggcggcgagggcttcgtggtgaaggtgcgtggcctgccctggagctgttccgccgatgaggtccagagattctttagtgattgcaaaatccagaatggcgcacaaggaatcagattcatttacacgagagaaggccgcccttctggagaagcttttgttgaattggagagcgaggatgaggtcaagttggccctgaagaaggaccgcgagaccatgggtcaccgatacgtcgaagtctttaagtctaacaatgtggaaatggactgggtgctgaaacacaccggtcccaactcacctgacacagctaacgacggctttgtgcgactgagagggctaccattcggttgctcaaaagaggagatagtgcaattcttcagcggcctcgagattgtgcccaatggaatcactctccctgttgactttcagggaagaagcacaggggaagcattcgttcaattcgcctcccaagagatcgccgagaaggctcttaagaagcataaagagaggattggtcataggtacatagaaatcttcaaatcatcacgcgctgaagtgaggacacattatgaccccccacgtaaattaatggcaatgcaacggccaggtccttatgacaggtag

SEQ ID NO: 288340 - DNA, 480 bp, Artificial Sequence
  derived and/or modified sequence
atgagcgaccaccggtacggcgacggcggcagcaccttccagagcaccacgggacattgcgtccacatgagaggccttccataccgcgccactgagaatgatatttacaacttcttctcgccccttaaccccgtcagagtgcacatcgagattgggcccgatggccgtgtgacaggcgaggctgacgttgagtttgctacccacgaagacgcagtggcggcaatgtccaaagacaaagctaacatgcagcaccgttacgtggaacttttcctgaactccacagctggggccagcggaggagcttacggatcgcagatgctggggggcatgggattgtcaaaccaaagtagctacggggggcccgcatctcagcagctcagtggcggttacggaggagggtacgggggacagtcatcaatgtcgggctatgatcaggtccttcaggagaactcttccgacttccagtccaacatagcatag

SEQ ID NO: 288341 - DNA, 492 bp, Artificial Sequence
  derived and/or modified sequence
atgatgctgggcaccgagggcggcgagggcttcgtggtgaaggtgcgggggcttccgtggtcatgctctgccgacgaggtgcagcgattcttctctgattgtaagatccagaacggcgcacagggcatacgattcatctatacccgcgaaggtaggccatcaggcgaggcgtttgtcgaactggaatctgaagacgaagtcaagctggcattgaaaaaagatagagaaacaatgggacacagatatgtggaagtgtttaagtcaaataatgtggagatggattgggtgctaaagcatacaggaccaaactcacccgacaccgccaacgacggcttcgtacggttaaggggcttgccgttcggttgttcaaaggaagagatcgtgcagttcttctctggcctggaaatcgtcccgaatggaataacgctgccagtagatttccaaggaagaagtaccggcgaagcgttcgtgcagttcgcctcacaggagtag

SEQ ID NO: 288342 - DNA, 393 bp, Artificial Sequence
  derived and/or modified sequence
atgatgctgggcaccgagggcggcgagggcttcgtggtgaaggtgagagggctcccttggtcttgcagtgccgatgaggtgcagcgatttttttcagactgtaaaatccaaaatggcgcccagggcatacgctttatctacaccagggagggaaggccgtcgggcgaggcattcgtggagctcgaaagcgaagatgaggtgaagttggcgctgaaaaaagaccgcgagactatgggccataggtacgtggaagtgtttaaatctaacaatgtcgaaatggactgggtcttgaaacacaccggcccaaattcacccgatacggcgaatgatgggttcgtccggctgagggggcttcctttcgggtgttctaaggaagagattgttcagttttag

SEQ ID NO: 288343 - DNA, 255 bp, Artificial Sequence
  derived and/or modified sequence
atgatgctgggcaccgagggcggcgagggcttcgtggtgaaggtgaggggcctgccttggtcctgttccgctgatgaggtgcagcggttctttagtgattgtaaaattcagaatggagcacagggcattcgatttatatacacacgcgaaggcaggccatccggggaagctttcgtggagctcgagtcagaagatgaagttaaactggcattgaagaaagaccgggagactatggggcaccggtacgtggaatag

SEQ ID NO: 288344 - DNA, 348 bp, Artificial Sequence
  derived and/or modified sequence
atgatgctgggcaccgagggcggcgagggcttcgtggtgaaggtgagaggacttccatggtcttgtagcgcagacgaagtgcagcgctttttctctgactgtaagatacagaacggggctcagggaatccggttcatatatacccgcgaggggagaccctccggcgaggcatttgtggaactggaatctgaggacgaggttaaactggctctgaagaaggatagagaaactatgggacaccggtatgttgaagtgtttaagtccaacaatgtggaaatggactgggtgctcaagcatacaggacctaacagccctgatactgccaacgacgggttcgttagactctag

SEQ ID NO: 288345 - DNA, 87 bp, Artificial Sequence
  derived and/or modified sequence
atgatgctgggcaccgagggcggcgagggcttcgtggtgaaggtgagaggtttaccatggagttgtagcgctgacgaggttcagtag

SEQ ID NO: 288346 - DNA, 150 bp, Artificial Sequence
  derived and/or modified sequence
atgatgcttggcaccgagggaggagaaggatttgtggtcaaggtcagagggcttccttggtcttgttccgcagatgaggtacagcggttctttagcgactgcaaaatccaaaatggagcacagggcatccggtttatctatactcgttag

SEQ ID NO: 288347 - DNA, 507 bp, Artificial Sequence
  derived and/or modified sequence
atgatgcttgggacagaaggaggcgaggggttcgtggtgaaagtgagaggactcccttggagttgcagcgcagatgaggttcaaagatttttttctgactgtaagatccagaacggggcacagggaattaggttcatctacacgagggaaggaaggccttccggagaggccttcgtggaactggagagcgaagatgaggttaagctagctctcaaaaaggacagggagacaatgggtcacaggtatgttgaggtgtttaagtccaataatgtggagatggattgggttctgaagcatacagggcctaatagtcccgacactgccaacgacgggttcgtgaggctgcgcggacttccatttggatgcagcaaagaggaaatagtgcagtttttttctgggcttgaaattgtccctaacggcatcaccctcccagtcgatttccaggggagatccacgggggaagcctttgtgcagtttgcgagccaagaaatcgcggagaaggcatag

SEQ ID NO: 288348 - DNA, 639 bp, Artificial Sequence
  derived and/or modified sequence
atgatgctaggcaccgaaggcggagagggatttgtcgtcaaagtcagaggcctaccatggtcatgttcagccgacgaggttcagcggtttttctccgactgtaaaatccagaacggtgcgcagggtattcgcttcatctacacgcgcgagggccgaccttccggcgaagcatttgtagagctagagagcgaggatgaggtgaaacttgcgctcaaaaaggaccgcgagacaatgggccatagatatgtggaagtgttcaaatccaacaacgtggaaatggactgggtgcttaaacacaccggcccaaattcaccggacactgctaacgatggctttgtccgactccggggactgccattcgggtgctccaaggaggagattgtgcagtttttttctggcctggaaatagtccctaacggtattacattaccagtggacttccagggaagatctacgggagaggccttcgtccagttcgcctctcaggagattgcagagaaggcccttaagaagcataaagagcgaataggacaccgctatattgaaattttcaaatcatccagagctgaggttcggacccattacgaccccccacggaagctgatggctatgcaacgtcctggcccatacgacaggtag

SEQ ID NO: 288349 - DNA, 480 bp, Artificial Sequence
  derived and/or modified sequence
atgtcggaccatcggtacggcgacggcggaagcacgttccagtccacaacgggtcattgcgtgcacatgcgagggctaccataccgcgcaacggaaaatgatatatacaatttcttctctcctctcaaccccgtgagggttcacatagaaatcggtccagacggcagggtaacgggggaagccgacgtcgaatttgctacccacgaggatgctgtggctgccatgtctaaagataaagccaacatgcagcatcgatacgtagagttattcttaaacagcactgcgggtgcgtctgggggagcctacggctctcagatgctgggtggaatgggcttaagtaaccaatcatcctatggtgggcctgcatctcagcagttatccggaggctatggaggcggttacggcggacagagtagcatgtctggatacgaccaagtcctccaggagaatagtagcgattttcaatcaaacattgcatag

SEQ ID NO: 288350 - DNA, 492 bp, Artificial Sequence
  derived and/or modified sequence
atgatgttgggcactgaaggaggagaaggtttcgttgtcaaggtgaggggccttccttggtcttgctctgcagacgaggttcagagattcttctccgattgtaaaattcagaatggcgcacagggaatccggtttatatatacaagggaaggcagaccctccggcgaggcgttcgtggagctcgagagtgaagacgaggtgaaactggctctgaaaaaggacagagagacaatgggccaccgatacgtggaagtgtttaagagcaacaacgtcgaaatggactgggtgctcaagcacacaggacccaactctccggatacagctaacgatggtttcgtcagactgcggggattgccttttggatgctcgaaagaggagatcgtgcagttctttagcggactggagatcgttcccaatgggatcacacttccagtcgacttccagggcaggagtacaggcgaggcgttcgtacagttcgccagtcaggaatag

SEQ ID NO: 288351 - DNA, 393 bp, Artificial Sequence
  derived and/or modified sequence
atgatgctgggaaccgaaggaggagagggctttgtggtgaaagtgcgcggattaccttggtcttgttctgctgatgaagtccaaagattctttagcgactgtaaaatccagaacggcgctcagggtatccgctttatctacaccagggaagggaggccaagcggtgaggcttttgtggagctggaatctgaggatgaggtcaagctcgcattaaagaaagaccgagaaacaatggggcatcgatatgtcgaagtgtttaaatccaataacgtcgaaatggattgggtgttaaagcacaccggccctaattcacctgataccgcgaatgacggcttcgtgcggctgcggggtctccctttcggatgttctaaggaagagatcgtgcagttctag

SEQ ID NO: 288352 - DNA, 255 bp, Artificial Sequence
  derived and/or modified sequence
atgatgcttggaacagagggcggagagggctttgttgtcaaggtgaggggactgccctggtcctgttcagcagatgaagtgcagagattcttcagtgactgcaagattcagaatggtgcccaggggatacggtttatctatacaagagaaggcaggccatctggtgaggcttttgtcgagctcgaatctgaggacgaggtgaagctggctcttaagaaagatagggaaacaatgggtcacaggtatgttgagtag

SEQ ID NO: 288353 - DNA, 348 bp, Artificial Sequence
  derived and/or modified sequence
atgatgctgggaaccgaaggcggagagggcttcgtcgtcaaggtgaggggcctgccgtggagctgcagcgcggacgaagttcagcgcttcttctctgactgcaagatccagaatggagcacagggcatacggtttatctatacaagggaaggacggcctagcggggaggctttcgtcgagctggagagcgaggacgaggtgaagctcgcactgaagaaggacagggaaactatgggacaccgatacgtggaagtgttcaagtccaacaatgtggaaatggattgggtcctgaaacatacggggccaaactcccccgatactgccaacgacggcttcgtcaggctgtag

SEQ ID NO: 288354 - DNA, 87 bp, Artificial Sequence
  derived and/or modified sequence
atgatgctaggcacagagggaggcgagggatttgtcgtgaaggtgagaggcctgccctggagttgtagtgctgacgaggtgcaatag

SEQ ID NO: 288355 - DNA, 569 bp, Artificial Sequence
  derived and/or modified sequence
ctcgaatgcagcgtctacgcctggtgaatggacgcactcttaccaattctgctctgggagatgcagcggtaacctaccgagcgcagaggccggcgcgcacccgtggagcccgcgctcgcgatccctcctcgtgccagggccccagggcagtcaaggcctgccgaccgttaggcgggtcaaggggtacacagggtgcgaattcgttaggcaaaagctgggtacaggcgcgagccacaggcacggaaacctcgcgccgaccggggccctaggcccgacgacggcagctgaccagcttcggccggtttggggataaagggaagacaggcggcgcggggagtgggaacgcctgaaggccgcgcccctcctttcaggtcggccaggagcgcgccgtttgtttcgacgccggaccgcgtaagagacgatgatgttgggcacggaaggtggagagggattcgtggtgaaggtccggggcttgccctggtcttgctcggccgatgaagtgcagaggtttttttctgactgcaaaattcaaaatggggctcaaggtattcgtttcatctacaccagag

SEQ ID NO: 288356 - DNA, 594 bp, Artificial Sequence
  derived and/or modified sequence
catttcgtcttagccacgcagaagtcgcgtgtctagttctggtcctccccgctttgcagtttgtttcgacgccggaccgcgtaagagacgatgatgttgggcacggaaggtggagagggattcgtggtgaaggtccggggcttgccctggtcttgctcggccgatgaagtgcagaggtttttttctgactgcaaaattcaaaatggggctcaaggtattcgtttcatctacaccagagaaggcagaccaagtggcgaggcttttgttgaacttgaatcagaagatgaagtcaaattggccctgaaaaaagacagagaaactatgggacacagatatgttgaagtattcaagtcaaacaacgttgaaatggattgggtgttgaagcatactggtccaaatagtcctgacacggccaatgatggctttgtacggcttagaggacttccctttggatgtagcaaggaagaaattgttcagttcttctcagggttggaaatcgtgccaaatgggataacattgccggtggacttccaggggaggagtacgggggaggccttcgtgcagtttgcttcacaggaaatagctgaaaaggct

SEQ ID NO: 288357 - DNA, 1155 bp, Artificial Sequence
  derived and/or modified sequence
acgcctggtgaatggacgcactcttaccaattctgctctgggagatgcagcggtaacctaccgagcgcagaggccggcgcgcacccgtggagcccgcgctcgcgatccctcctcgtgccagggccccagggcagtcaaggcctgccgaccgttaggcgggtcaaggggtacacagggtgcgaattcgttaggcaaaagctgggtacaggcgcgagccacaggcacggaaacctcgcgccgaccggggccctaggcccgacgacggcaggtaaggggaagtggaggcacacagggctgggacgtgccccaggcaccatacgggtggcttcgggcgcgggacgtccgcagccccgcagctcccaggacgttcgacaatctgcagctgaccagcttcggccggtttggggataaagggaagacaggcggcgcggggagtgggaacgcctgaaggccgcgcccctcctttcaggtcggccaggagcgcgccgtttgtttcgacgccggaccgcgtaagagacgatgatgttgggcacggaaggtggagagggattcgtggtgaaggtccggggcttgccctggtcttgctcggccgatgaagtgcagaggtttttttctgactgcaaaattcaaaatggggctcaaggtattcgtttcatctacaccagagaaggcagaccaagtggcgaggcttttgttgaacttgaatcagaagatgaagtcaaattggccctgaaaaaagacagagaaactatgggacacagatatgttgaagtattcaagtcaaacaacgttgaaatggattgggtgttgaagcatactggtccaaatagtcctgacacggccaatgatggctttgtacggcttagaggacttccctttggatgtagcaaggaagaaattgttcagttcttctcagggttggaaatcgtgccaaatgggataacattgccggtggacttccaggggaggagtacgggggaggccttcgtgcagtttgcttcacaggaaatagctgaaaaggctctaaagaaacacaaggaaagaatagggcacaggtatattgaaatctttaagagcagtagagctgaagttagaactcattatgatccaccacgaaagcttatggccatgcagcggccaggtccttatgacaga

SEQ ID NO: 288358 - DNA, 1134 bp, Artificial Sequence
  derived and/or modified sequence
ttcaggaatgtctgatcacagatacggggatggtggctctactttccagagcacaacaggacactgtgtacacatgcggggattaccttacagagctactgagaatgacatttataattttttttcaccgctcaaccctgtgagagtacacattgaaattggtcctgatggcagagtaactggtgaagcagatgtcgagttcgcaactcatgaagatgctgtggcagctatgtcaaaagacaaagcaaatatgcaacacagatatgtagaactcttcttgaattctacagcaggagcaagcggtggtgcttacggtagccaaatgctaggaggcatgggtttgtcaaaccagtccagctacgggggcccagccagccagcagctgagtgggggttacggaggcggctacggtggccagagcagcatgagtggatacgaccaagttttacaggaaaactccagtgattttcaatcaaacattgcataggtaaccaaggagcagtgaacagcagctactacagtagtggaagccgtgcatctatgggcgtgaacggaatgggagggttgtctagcatgtccagtatgagtggtggatggggaatgtaattgatcgatcctgatcactgactcttggtcaaccttttttttttttttttttttttctttaagaaaacttcagtttaacagtttctgcaatacaagcttgtgatttatgcttactctaagtggaaatcaggattgttatgaagacttaaggcccagtatttttgaatacaatactcatctaggatgtaacagtgaagctgagtaaactataactgttaaacttaagttccagcttttctcaagttagttataggatgtacttaagcagtaagcgtatttaggtaaaagcagttgaattatgttaaatgttgccctttgccacgttaaattgaacactgttttggatgcatgttgaaagacatgcttttatttttttgtaaaacaatataggagctgtgtctactattaaaagtgaaacattttggcatgtttgttaattctagtttcatttaataacctgtaaggcacgtaagtttaagctttttttttttttaagttaatgggaaaaatttgagacgcaataccaat

SEQ ID NO: 288359 - DNA, 805 bp, Artificial Sequence
  derived and/or modified sequence
ctcgaatgcagcgtctacgcctggtgaatggacgcactcttaccaattctgctctgggagatgcagcggtaacctaccgagcgcagaggccggcgcgcacccgtggagcccgcgctcgcgatccctcctcgtgccagggccccagggcagtcaaggcctgccgaccgttaggcgggtcaaggggtacacagggtgcgaattcgttaggcaaaagctgggtacaggcgcgagccacaggcacggaaacctcgcgccgaccggggccctaggcccgacgacggcagtttgtttcgacgccggaccgcgtaagagacgatgatgttgggcacggaaggtggagagggattcgtggtgaaggtccggggcttgccctggtcttgctcggccgatgaagtgcagaggtttttttctgactgcaaaattcaaaatggggctcaaggtattcgtttcatctacaccagagaaggcagaccaagtggcgaggcttttgttgaacttgaatcagaagatgaagtcaaattggccctgaaaaaagacagagaaactatgggacacagatatgttgaagtattcaagtcaaacaacgttgaaatggattgggtgttgaagcatactggtccaaatagtcctgacacggccaatgatggctttgtacggcttagaggacttccctttggatgtagcaaggaagaaattgttcagttcttctcagggttggaaatcgtgccaaatgggataacattgccggtggacttccaggggaggagtacgggggaggccttcgtgcagtttgcttcacaggaaa

SEQ ID NO: 288360 - DNA, 850 bp, Artificial Sequence
  derived and/or modified sequence
agggaccttatttaggttgcgcaggcgcccgctggccatttcgtcttagccacgcagaagtcgcgtgtctaggtgagtcgcggtgggtcctcgcttgcagttcagcgaccacggtgggtaccgtttttgcgaggattgtttgtccccatatctctgggagggccacggggaccttggcgagctgcaggctgccgtcgagagccgcgagtggttcgctgaatctcggcaccgccgctgaggcctgcaggccgcgccgactctattgtgtgagaagtcggaggaggcggagcggaagcggccgccgccatttcctttcctctacgctggctctcggcccgggcccccacggttcggggcgccgacagctgttgctcaggacagctttgggggtccggtcgccggacgaggaggtgttggagtcgccgggtttgtttcgacgccggaccgcgtaagagacgatgatgttgggcacggaaggtggagagggattcgtggtgaaggtccggggcttgccctggtcttgctcggccgatgaagtgcagaggtttttttctgactgcaaaattcaaaatggggctcaaggtattcgtttcatctacaccagagaaggcagaccaagtggcgaggcttttgttgaacttgaatcagaagatgaagtcaaattggccctgaaaaaagacagagaaactatgggacacagatatgttgaagtattcaagtcaaacaacgttgaaatggattgggtgttgaagcatactggtccaaatagtcctgacacggccaatgatggctttgtacggcttagaggacttccctttggatgtagcaaggaagaaattgttcagttctt

SEQ ID NO: 288361 - DNA, 690 bp, Artificial Sequence
  derived and/or modified sequence
acgcctggtgaatggacgcactcttaccaattctgctctgggagatgcagcggtaacctaccgagcgcagaggccggcgcgcacccgtggagcccgcgctcgcgatccctcctcgtgccagggccccagggcagtcaaggcctgccgaccgttaggcgggtcaaggggtacacagggtgcgaattcgttaggcaaaagctgggtacaggcgcgagccacaggcacggaaacctcgcgccgaccggggccctaggcccgacgacggcaggtcggccaggagcgcgccggtaagagcctgggggcaaggggtagaaagacgcccacctcatcacaacccagagctcgggactcctatacagtcccatagggaacaggcggccgccattcccctcccccacgctggcggtttgtttcgacgccggaccgcgtaagagacgatgatgttgggcacggaaggtggagagggattcgtggtgaaggtccggggcttgccctggtcttgctcggccgatgaagtgcagaggtttttttctgactgcaaaattcaaaatggggctcaaggtattcgtttcatctacaccagagaaggcagaccaagtggcgaggcttttgttgaacttgaatcagaagatgaagtcaaattggccctgaaaaaagacagagaaactatgggacacagatatgttgaag

SEQ ID NO: 288362 - DNA, 806 bp, Artificial Sequence
  derived and/or modified sequence
agtcccggttccccgccatcagcacgacctgtgtgagagcacagggtatctgggcagaaggaaaactaggggagcctcatccagcgctggagatggagaagctttgggcttctcgacggcgaggcacccggggaacggggagtcacttagaacctcaaagtagcctcgggcgagaacaagcgaagcaattccaagctctaccaggtcacggagggcgcgaaacccgccccgcgctccggccggccggcagggggcgcgcgctccccgaactcccgcgcaccgcggaggaggcggccctggcgcggggaagcagtgggaaaatcgcaaggaagccggcgctgctctgaagggagagtctgtgcagtggcacctgcgcgaagctggccaaagcctgcccagacggctcacctgtgcgggatggaacaaaagtttgtttcgacgccggaccgcgtaagagacgatgatgttgggcacggaaggtggagagggattcgtggtgaaggtccggggcttgccctggtcttgctcggccgatgaagtgcagaggtttttttctgactgcaaaattcaaaatggggctcaaggtattcgtttcatctacaccagagaaggcagaccaagtggcgaggcttttgttgaacttgaatcagaagatgaagtcaaattggccctgaaaaaagacagagaaactatgggacacagatatgttgaagtattcaagtcaaacaacgttgaaatggattgggtgttgaagcatactggtccaaatagtcctgacacggccaatgatggctttgtacggctta

SEQ ID NO: 288363 - DNA, 492 bp, Artificial Sequence
  derived and/or modified sequence
ctttcattttcagccctgctctttaaatactagacataccgtctggcgcatgtcgaggcgtgtattattttgatccagtgcgcgtgccgtatgtgacttggcttggcttcccctgaaagcagcggctgtggggagttgattcggaagtgaagggccctgggcgacccggcgagtagaggcaacaccaacactcctccttagcgaggggtctccccgccgcggtggctgcccggccccaaggacaggagggatttgtgcactgactcctgaccccgtcctccagcgctgctctgaagggagagtctgtgcagtggcacctgcgcgaagctggccaaagcctgcccagacggctcacctgtgcgggatggaacaaaagtttgtttcgacgccggaccgcgtaagagacgatgatgttgggcacggaaggtggagagggattcgtggtgaaggtccggggcttgccctggtcttgctcggccgatgaagtgcaga

SEQ ID NO: 288364 - protein, 359 aa, Artificial Sequence
  derived and/or modified sequence
MAPNGTASSFCLDSTACKITITVVLAVLILITVAGNVVVCLAVGLNRRLRNLTNCFIVSLAITDLLLGLLVLPFSAIYQLSCKWSFGKVFCNIYTSLDVMLCTASILNLFMISLDRYCAVMDPLRYPVLVTPVRVAISLVLIWVISITLSFLSIHLGWNSRNETSKGNHTTSKCKVQVNEVYGLVDGLVTFYLPLLIMCITYYRIFKVARDQAKRINHISSWKAATIREHKATVTLAAVMGAFIICWFPYFTAFVYRGLRGDDAINEVLEAIVLWLGYANSALNPILYAALNRDFRTGYQQLFCCRLANRNSHKTSLRSNASQLSRTQSREPRQQEEKPLKLQVWSGTEVTAPQGATDR

SEQ ID NO: 288365 - DNA, 4322 bp, Artificial Sequence
  derived and/or modified sequence
gcggcggcggcggcggcgtgtggagcgagggagcggcgcgagcggcggcatgacgcggaggcggagcaggccgagcggcggtgcgggcaggcgcgagcgggctcgggccgcggggccgcagaagccccaggcgcccgagcccccgccgccgccaagcctggaggcgggagcgggtgcaggccctccggaggcgccggcggagcccgaccacgacggccccagggaggatgacgaacccaacctggtgcccggcccgcaggtaggagcgagcggggagacttcggcggctcgggcgctttcaccttccccgagcgggagcgggagtggggcggggttggggatgggccatcctgccgcggctggggtagcagccttcccccgggtccggcgccgaagctttctcccccggggcgggaatggaggctggacccctctccccaaagccgaggctcggtccgcgctcctgcgactaggctgaagctgctcccctctccccgccgcctccgggcgttccggccgtacacccacactgggactgggactgggactgggctgtgatcccgaggccgcagctccgctctcggcccgccacctcccccgggcccacctgctccctcagccacaggccatctcggggctctgggactggacgactgcagcctcttccctctgcccccgggaacggctccactccgtcccctgcagcgcctgcagccgcggccccctcagcagctgtgtctcctggcgcctcctcgccatacccagcagagcagttggagcagacagccaggctgcccggaggagtttttggtggggtttctgcactgaggtggaaacccagcagaacctgcccttcttccctcccctgctccgcaaggcagcccaccccgaccttgagatcccaggtttggagaatcctgctgagagcgaacagtaggaggattccccaaagcttccagcttgccacctggaagaaggtcactttcttttgagcaaaggagataacgggaggtaccctgccaaagttcactgagaggcgggggtgacatgggccacggttgctctgggagggttgtggcactcggggctgggtggctctccctaagcttgctctgacaaaagagttttgagttggtcttttggctgagcctgcccaggaaggcaggctcctgcaggagtcttggagggtcggatgcggcgccggatgaggatgaggcgtggcggaagatgcgtttggctctgcagacactgcatcgggcagcaggggactctgggaggctggtgcagccagaaggcatggctcttgacagccttctagtagaatctctggaattgtgcatatgaagaaacagaaactcagagcaactaaacatttgcccaaatgactccaactgtaggtgtcagacaaaagaaaagaaaaggacttttaggtcccccccgcctccagccagcctgtgcagacttgctgcctgctgtgtcaccgggaacgcaaaggctgggaagaaggcccttctcaaaatggactggtgttgcagggtgagaagctgccccctgacttcatgccaaagctcgtcaagaatctcctaggcgagatgcctctgtgggtctgccagagttgccgaaagagcatggaggaagatgaaaggcagacaggtcgagaacatgcagtggcgatctccttgtcacacacatcctgcaaatcacagtcttgtggagatgactctcattcgtcctcgtcttcctcctcatcatcctcatcctcgtcctcctcttcctgccctgggaactcgggagactgggatcctagctcgttcctgtcggcacataagctctcgggcctctggaattccccacattccagtggggccatgccaggcagctctcttgggagtcctcctaccatccccggtgaggctttccccgtctcggagcaccaccagcactcagacctcactgctccccctaacagccccaccggccaccacccgcagccagcatctctaatcccgtctcaccccagctcctttggctccccaccccacccacacctgctgcccaccaccccggcagcacctttccctgcccaggcttcagagtgccctgttgctgctgccactgccccccacactccagggccatgtcagagctcccatctaccctccaccagcatgccgctcctgaagatgcccccaccattctcggggtgcagccacccctgcagcgggcactgtggtgggcactgcagtgggcctctcctcccacccccgagctctcagccactccctagcactcacagggatcccgggtgcaaggggcacaagtttgcacacagtggcctggcttgccagctgccccagccctgcgaggcagatgaggggctgggtgaggaagaggatagcagctctgagcgaagctcctgcacctcatcctccacccaccagagagatgggaagttctgtgactgctgctactgtgagttcttcggccacaatgcgccacccgctgccccgacgagtcggaactataccgagatccgggagaagctccgctcgaggctgaccaggcggaaagaggagctgcccatgaaggggggcaccctgggcgggatccctggggagcccgccgtggaccaccgagatgtggatgagctgctggaattcatcaacagcacggagcccaaagtccccaacagcgccagggccgccaagcgggcccggcacaagctgaaaaagaaggaaaaggagaaggcccagttggcagcagaagctctaaagcaggcaaatcgtgtttctggaagccgggagccaaggcctgccagggagaggctcttggagtggcccgaccgggaactggatcgggtcaacagcttcctgagcagccgtctgcaggagatcaaaaacactgtcaaagactccatccgtgccagcttcagtgtgtgtgagctcagcatggacagcaatggcttctctaaggagggggctgctgagcctgagcctcagagtctacccccctcaaacctcagtggctcctcagagcagcagcctgacatcaaccttgacctgtcccctttgactttgggctcccctcagaaccacacgttacaagctccaggcgagccagccccaccatgggcagaaatgagaggcccccacccaccatggacagaggtgagggggccccctcccggtatcgtccccgagaacgggctcgtgaggagactcaacaccgtgcccaacctatcccgggtgatctgggtcaagacacccaagccgggctaccccagctccgaggagccaagctcaaaggaagttcccagttgcaagcaggagctgcctgagcctgtgtcctcaggtgggaagccacagaagggcaagaggcagggcagtcaggccaagaagagcgaggcaagcccagccccccggcccccagccagcctagaggttcccagtgccaagggccaggtcgctggccccaagcagccaggcagggtcctagagcttcccaaagtaggcagctgtgctgaggctggagaggggagccgggggagccggccaggaccaggttgggctggcagtcccaaaactgagaaggagaagggcagctcctggcgaaactggccaggcgaggccaaggcacggcctcaggagcaggagtctgtgcagccctcaggcccagcaaggccacagagcttgccccagggcaagggccgcagccgccggagccgcaacaagcaggagaagccagcctcctccttggacgatgtgttcctgcccaaggacatggacggggtggagatggatgagactgaccgagaggtggagtactttaagaggttctgtttggattctgcaaagcagactcgtcagaaagttgctgtgaactggaccaacttcagcctcaagaaaaccactcctagcacagctcagtgaggccctgcccaggctgagctgcttcagggcgtcctgaggccctgactgccagctgaaggcgtataatttttccctccgtgtgccccacctacccgtccaagaccctctgtgctccccaccatcctggaccaaccaaaagctgaacggatgccacactgtgctggggccccttgacctcagcagagccgcttcctggtgctacgcagcctccacactcagagcccgtggactgggctggcctaagggccagggctgatggtactgctggcccaacactgctctctttgtgtttggtttttttgtttttgtttttattttgtttttttccaattctttacttttgatactgtgaagatctttcgtgccgaaagataaagcaacatttggacacag

SEQ ID NO: 288366 - protein, 789 aa, Artificial Sequence
  derived and/or modified sequence
MPKLVKNLLGEMPLWVCQSCRKSMEEDERQTGREHAVAISLSHTSCKSQSCGDDSHSSSSSSSSSSSSSSSSCPGNSGDWDPSSFLSAHKLSGLWNSPHSSGAMPGSSLGSPPTIPGEAFPVSEHHQHSDLTAPPNSPTGHHPQPASLIPSHPSSFGSPPHPHLLPTTPAAPFPAQASECPVAAATAPHTPGPCQSSHLPSTSMPLLKMPPPFSGCSHPCSGHCGGHCSGPLLPPPSSQPLPSTHRDPGCKGHKFAHSGLACQLPQPCEADEGLGEEEDSSSERSSCTSSSTHQRDGKFCDCCYCEFFGHNAPPAAPTSRNYTEIREKLRSRLTRRKEELPMKGGTLGGIPGEPAVDHRDVDELLEFINSTEPKVPNSARAAKRARHKLKKKEKEKAQLAAEALKQANRVSGSREPRPARERLLEWPDRELDRVNSFLSSRLQEIKNTVKDSIRASFSVCELSMDSNGFSKEGAAEPEPQSLPPSNLSGSSEQQPDINLDLSPLTLGSPQNHTLQAPGEPAPPWAEMRGPHPPWTEVRGPPPGIVPENGLVRRLNTVPNLSRVIWVKTPKPGYPSSEEPSSKEVPSCKQELPEPVSSGGKPQKGKRQGSQAKKSEASPAPRPPASLEVPSAKGQVAGPKQPGRVLELPKVGSCAEAGEGSRGSRPGPGWAGSPKTEKEKGSSWRNWPGEAKARPQEQESVQPSGPARPQSLPQGKGRSRRSRNKQEKPASSLDDVFLPKDMDGVEMDETDREVEYFKRFCLDSAKQTRQKVAVNWTNFSLKKTTPSTAQ

SEQ ID NO: 288367 - DNA, 2370 bp, Artificial Sequence
  derived and/or modified sequence
atgcccaagctggtgaagaacctgctgggcgagatgcccctgtgggtgtgccagagctgcagaaagagcatggaggaggacgagagacagaccggcagagagcacgccgtggccatcagcctgagccacaccagctgcaagagccagagctgcggcgacgacagccacagcagcagcagcagcagcagcagcagcagcagcagcagcagcagcagctgccccggcaacagcggcgactgggaccccagcagcttcctgagcgcccacaagctgagcggcctgtggaacagcccccacagcagcggcgccatgcccggcagcagcctgggcagcccccccaccatccccggcgaggccttccccgtgagcgagcaccaccagcacagcgacctgaccgccccccccaacagccccaccggccaccacccccagcccgccagcctgatccccagccaccccagcagcttcggcagccccccccacccccacctgctgcccaccacccccgccgcccccttccccgcccaggccagcgagtgccccgtggccgccgccaccgccccccacacccccggcccctgccagagcagccacctgcccagcaccagcatgcccctgctgaagatgcccccccccttcagcggctgcagccacccctgcagcggccactgcggcggccactgcagcggccccctgctgcccccccccagcagccagcccctgcccagcacccacagagaccccggctgcaagggccacaagttcgcccacagcggcctggcctgccagctgccccagccctgcgaggccgacgagggcctgggcgaggaggaggacagcagcagcgagagaagcagctgcaccagcagcagcacccaccagagagacggcaagttctgcgactgctgctactgcgagttcttcggccacaacgccccccccgccgcccccaccagcagaaactacaccgagatcagagagaagctgagaagcagactgaccagaagaaaggaggagctgcccatgaagggcggcaccctgggcggcatccccggcgagcccgccgtggaccacagagacgtggacgagctgctggagttcatcaacagcaccgagcccaaggtgcccaacagcgccagagccgccaagagagccagacacaagctgaagaagaaggagaaggagaaggcccagctggccgccgaggccctgaagcaggccaacagagtgagcggcagcagagagcccagacccgccagagagagactgctggagtggcccgacagagagctggacagagtgaacagcttcctgagcagcagactgcaggagatcaagaacaccgtgaaggacagcatcagagccagcttcagcgtgtgcgagctgagcatggacagcaacggcttcagcaaggagggcgccgccgagcccgagccccagagcctgccccccagcaacctgagcggcagcagcgagcagcagcccgacatcaacctggacctgagccccctgaccctgggcagcccccagaaccacaccctgcaggcccccggcgagcccgcccccccctgggccgagatgagaggcccccaccccccctggaccgaggtgagaggccccccccccggcatcgtgcccgagaacggcctggtgagaagactgaacaccgtgcccaacctgagcagagtgatctgggtgaagacccccaagcccggctaccccagcagcgaggagcccagcagcaaggaggtgcccagctgcaagcaggagctgcccgagcccgtgagcagcggcggcaagccccagaagggcaagagacagggcagccaggccaagaagagcgaggccagccccgcccccagaccccccgccagcctggaggtgcccagcgccaagggccaggtggccggccccaagcagcccggcagagtgctggagctgcccaaggtgggcagctgcgccgaggccggcgagggcagcagaggcagcagacccggccccggctgggccggcagccccaagaccgagaaggagaagggcagcagctggagaaactggcccggcgaggccaaggccagaccccaggagcaggagagcgtgcagcccagcggccccgccagaccccagagcctgccccagggcaagggcagaagcagaagaagcagaaacaagcaggagaagcccgccagcagcctggacgacgtgttcctgcccaaggacatggacggcgtggagatggacgagaccgacagagaggtggagtacttcaagagattctgcctggacagcgccaagcagaccagacagaaggtggccgtgaactggaccaacttcagcctgaagaagaccacccccagcaccgcccagtag

SEQ ID NO: 288368 - DNA, 2370 bp, Artificial Sequence
  derived and/or modified sequence
atgccaaagctcgtcaagaacctgttaggcgaaatgcccctctgggtatgtcagtcctgcagaaaatccatggaggaggatgagcggcagaccgggagagagcatgccgttgccatatccctgagccacactagctgcaaaagccaatcctgcggagatgactcccactcttcaagctcgtcctcttctagctcctcaagttcttcatctagctcttgccccgggaactcgggtgattgggacccctcttcctttctgtctgctcacaagctgtctgggttgtggaatagtccccatagttctggagctatgcctggctcctccctcgggagtccccctaccattcctggcgaggctttcccggtcagtgagcatcatcagcactcagacctcaccgcgcccccaaacagtcctacaggtcatcatccacagcccgcgagcctcattccgagccatccttcctcctttgggtcaccgcctcatccccacctacttccgactactccagcggcccccttcccagcacaggccagcgagtgccctgttgcagccgccactgctccccacaccccaggcccctgccagtcttcccacctgcctagtaccagcatgccactcttgaagatgcctccaccattttcagggtgcagccatccatgtagcggccactgtgggggacactgctccggcccgctcctgcctcccccaagttctcaacccttaccaagcactcaccgtgatccagggtgcaagggccacaagtttgctcatagtggtctggcgtgtcagctaccacagccttgcgaggccgatgaggggctgggcgaggaggaggatagctcctcagagaggagttcctgcacctcgtcaagcacccatcagcgggacggtaagttctgtgattgctgttattgtgagtttttcggacacaacgcccctcccgccgcgccgacctctagaaactacacagaaattcgagagaagcttcggagccgacttacacggagaaaagaagagctgccaatgaagggcggcactctgggcggcattccaggggagccggccgtagaccaccgggatgtggacgaactgctggagtttatcaatagtactgagcctaaggttcccaattcagctagagcagcgaagagggcaaggcacaaactgaagaagaaagagaaggagaaggcccaactcgccgctgaggcgctaaaacaggcaaatcgtgtgtcaggctctcgggaacccaggccagcacgggagagactattagaatggccggatcgtgaactcgatagagtcaactccttcctcagttccaggctgcaagagatcaaaaacacagtaaaagactccattagggcatcgttctccgtatgtgaacttagtatggatagcaacgggttttccaaggagggagctgccgaacccgagccgcagtcactgcctccatcgaacctgtccggaagtagcgagcagcaaccggatatcaacctggatctgtcgcccctaaccctgggcagcccccagaaccatacactccaggccccaggggagccagctccaccatgggccgaaatgcgcggtcctcaccccccttggacagaagttcgaggaccacctcccggtatcgtgccagaaaacggactcgtcaggcggcttaatactgttccaaacctgtctagggtgatctgggtaaaaacccctaagcccggatatccaagctctgaagaaccctctagtaaggaggtaccttcatgtaaacaggagctacccgaaccagtctcgtcaggagggaagcctcagaagggaaagcgacagggatcacaggccaagaagagcgaagccagccccgctccaagaccaccagctagcttggaggtaccaagcgccaaaggacaagtggccggcccaaagcagcccggcagggtcttagaactccctaaagtagggtcctgtgctgaggcaggggaagggtcgcgcggaagtcgacccgggcctggatgggccggctctcctaagaccgagaaagaaaagggttcctcttggaggaattggcccggcgaagccaaggccagacctcaagagcaggaatctgtacagccctcgggccctgcccgtccacagagtttacctcaggggaaggggaggagtcgcagaagtaggaacaagcaggagaagccagcctcttctttggatgatgtgttcttgcctaaagatatggacggcgtggaaatggacgagaccgatagagaagttgagtactttaagaggttctgtctggacagcgctaagcagactaggcagaaagtagcagtgaattggacaaacttctcactgaagaaaactactccgtcgactgctcagtag

SEQ ID NO: 288369 - DNA, 2370 bp, Artificial Sequence
  derived and/or modified sequence
atgcccaagctggtgaagaacctgctgggggagatgcccctgtgggtgtgccagagctgcaggaagtccatggaggaggatgagcggcagacaggccgggagcacgctgtggccatcagcctgagccacaccagctgcaagagccagagctgtggagatgacagccacagcagcagcagcagcagcagcagcagcagcagcagcagcagcagcagctgccccggcaacagcggggactgggaccccagcagcttcctgagcgcccacaagctgagcggcctgtggaacagcccccacagcagcggggccatgcctggcagcagcctgggcagcccccccaccatccctggagaggccttccctgtgtctgagcaccaccagcacagcgacctgacagccccacccaacagccccaccggccaccacccccagcctgccagcctcatccccagccaccccagcagctttggcagccccccccacccccacctgctgcccaccaccccagctgcccccttccctgcccaggcctctgaatgtcctgtggccgccgccacagccccccacaccccaggcccctgccagagcagccacctgcccagcacctccatgcccctgctgaagatgcccccacccttcagcggctgcagccacccctgcagcggccactgcggcggccactgcagcggccccctgctgcccccacccagcagccagcccctgcccagcacccaccgggaccccggctgcaagggccacaagtttgcccacagcggcctggcctgccagctgccccagccctgtgaggctgatgagggcctgggggaggaggaggacagcagcagcgagaggagcagctgcaccagcagcagcacccaccagagagatggcaagttctgtgactgctgctactgtgagttcttcggccacaatgcccctcctgctgcccccaccagcaggaactacacagagatccgggagaagctgcggagccggctgaccaggaggaaggaggagctgcccatgaagggcggcaccctgggcggcatccctggagagcctgctgtggaccacagagatgtggatgagctgctggagttcatcaacagcacagagcccaaggtgcccaacagcgcccgggccgccaagagggcccggcacaagctgaagaagaaggagaaggagaaggcccagctggccgctgaggccctgaagcaggccaacagagtgtctggcagccgggagcccaggcctgcccgggagcggctgctggagtggccagaccgggagctggacagagtgaacagcttcctgagcagccggctgcaggagatcaagaacacagtgaaggacagcatccgggccagcttctctgtgtgtgagctgtccatggacagcaatggcttcagcaaggagggcgctgctgagcctgagccccagagcctgccccccagcaacctgagcggcagcagcgagcagcagcctgacatcaacctggacctgagccccctgaccctgggcagcccccagaaccacaccctgcaggcccctggagagcccgccccaccctgggccgagatgaggggcccccaccccccctggacagaggtgcggggccccccacctggcatcgtgcctgaaaatggcctggtgcggcggctgaacacagtgcccaacctgagcagggtcatctgggtgaagacccccaagccaggctaccccagcagcgaggagcccagcagcaaggaggtgcccagctgcaagcaggagctgcctgagcctgtgtcctctgggggcaagccccagaagggcaagaggcagggcagccaggccaagaagtctgaggccagccctgccccccggcccccagccagcctggaggtgcccagcgccaagggccaggtggccggccccaagcagcccggccgggtgctggagctgcccaaggtgggcagctgtgccgaggccggggagggcagccggggcagcaggcctggccctggctgggccggcagccccaagacagagaaggagaagggcagctcctggaggaactggccaggagaggccaaggcccggccccaggagcaggagagcgtgcagcccagcggccctgcccggccccagagcctgccccagggcaagggccgcagcagaagaagcaggaacaagcaggagaagccagccagcagcctggatgatgtgttcctgcccaaggacatggatggagtggagatggatgaaacagaccgggaggtggagtacttcaagcgcttctgcctggacagcgccaagcagacccggcagaaggtggccgtgaactggaccaacttcagcctgaagaagaccacccccagcacagcccagtag

SEQ ID NO: 288370 - DNA, 2370 bp, Artificial Sequence
  derived and/or modified sequence
atgcccaagctggtgaagaacctgctgggcgagatgcccctgtgggtttgccagagttgtaggaagtccatggaagaggacgagaggcagacaggccgcgagcacgcggtggcgatttcactctctcacacctcctgtaagagtcagtcatgtggcgacgactcccattctagctcttccagctcttcgtcatcctcctcaagttcctcctctagttgccctgggaattccggagactgggacccttcttctttcctctccgcccacaagctttccggattatggaattccccgcactcgagtggtgcaatgccagggtcctctctcgggtcgccaccgacaatacctggggaagcattcccagtgagtgaacaccaccagcatagtgatcttaccgcgccccctaacagcccaacagggcaccaccctcagcccgcatcactcattccttctcatccctcgagctttggcagcccgcctcatccacatctcctaccgacaaccccggctgctccatttccagcccaagcgtcagaatgcccggtagccgccgccacggcgccacacacaccaggaccttgccagtcaagccacctgcctagcaccagtatgccgctcctgaagatgccccccccattctcaggttgctcacacccctgttcaggtcattgcggaggtcactgtagcggacccctacttccaccacctagcagccaacccctccctagcacacatcgcgatcctggctgcaaaggtcataaatttgctcactcggggctggcctgtcagctcccgcagccatgtgaagccgacgaagggctcggcgaggaagaggactccagcagtgaacgatctagctgcacctcttcaagcactcatcagagagacgggaagttttgtgactgttgttactgtgaattcttcgggcacaatgcaccgccggcagcccctacaagccggaattataccgaaatacgggagaaactgaggtctagactcacccggcgtaaagaggagctcccaatgaagggcggaacactaggagggattcccggtgaacccgcggtggatcacagggatgtggacgagctgctggagttcattaattctactgagcctaaggtcccaaacagcgcgagagccgcgaaaagagccagacataagctgaagaagaaggaaaaggagaaagcccagttagcggctgaagcgctgaaacaagctaacagggtgagtggtagcagagagccacggcccgctagggaaagactactggagtggccagaccgggaactcgaccgcgttaatagttttctcagtagcagactacaagagatcaagaatactgtaaaagatagtattcgggcatcattttccgtgtgtgaacttagcatggactctaatgggttctctaaggaaggcgccgctgaaccagagccacagtcccttccgccttcaaatttaagtggctcatcagagcagcagcctgacattaatctagacctgagccctctcaccctcgggtctccccagaatcacacacttcaagcgcccggagagcccgcacccccatgggcagaaatgcggggcccccatccaccatggacagaggtccgagggcccccaccaggcattgtgcctgaaaacggtctcgtccgccgactcaacacagtccccaatctctcgagagtgatttgggtgaaaacgcctaaacctggataccctagttccgaggaacctagctccaaggaggtgccaagctgtaaacaagaattgccagagccggtgtccagcggcgggaagccacagaagggtaagagacaaggctcacaggccaagaagtctgaagcctcccctgcacctcgcccccccgctagcttggaggtcccatctgcgaagggccaggtggctggaccaaaacagcctggacgcgtactggagctaccaaaagtgggcagctgtgccgaagccggagagggctctagggggtcaagaccaggtcccggatgggccgggagtcccaagacagaaaaggaaaaaggaagctcctggcgcaattggcccggcgaggctaaagcccgcccccaagagcaggagtctgtccagccctcaggacctgcccgtccacaatctttgcctcagggcaaggggcgtagccggcgaagtaggaacaagcaggagaaacccgctagctccttggacgatgtgttcctgcctaaggacatggacggcgtcgaaatggacgaaaccgacagagaagtggagtacttcaaaaggttctgtctggacagcgccaagcagacccggcagaaagtggccgttaactggacaaacttcagtctgaaaaagactacaccctctactgctcagtag

SEQ ID NO: 288371 - DNA, 2370 bp, Artificial Sequence
  derived and/or modified sequence
atgccaaagttagtgaagaacctgctaggagagatgcccttgtgggtttgtcagtcatgtcgcaaatccatggaagaggacgaacgccagactggtagagagcatgctgtggcaatctctttgtcacacacaagctgtaaatcccagagctgcggagatgactcacactcgtccagttctagttcctcatcttccagtagttcctcatcaagcagctgcccagggaactccggagattgggaccccagttcctttttaagcgcacacaaactgtccggactgtggaacagtccgcactcttccggagctatgcctgggagttctttgggctcccctccaaccatccctggcgaggctttccctgtgtcagagcaccaccagcactcagatctcacagcccctcccaacagtccaactggtcatcatccccagccggctagcctgatcccgtcccaccctagttcatttgggtctcctcctcatccccatctgctgcccacaacaccagctgctccatttccagctcaggctagtgaatgccctgtggccgcagccacagcacctcatactccaggaccctgccagagtagccatttaccgagtacgagcatgcctctgctcaaaatgcctccccctttctcagggtgctcacacccatgttccgggcactgtgggggacactgtagcggcccacttctgcctcccccaagctctcagcctttgccatctacccatcgtgaccccggttgtaaaggccacaaatttgcccatagtggcctggcttgtcagctcccccaaccatgcgaggccgacgaaggcctgggtgaggaagaagatagcagttctgaacgctcctcatgtaccagcagctctacacaccagcgcgacggtaagttttgcgactgttgttattgcgagttcttcggtcataatgcgccacccgcagctcccacttctagaaattacacagagatacgcgaaaagctacgcagccgccttacgcggagaaaagaagaattgcctatgaagggtggcaccttagggggaatcccgggagaacccgctgtggatcacagggacgtcgatgaattgcttgagttcatcaatagtaccgaacctaaggtgcctaatagtgctcgtgcggcaaagcgcgcacggcataaactcaaaaagaaggaaaaagaaaaggcccagcttgccgctgaagccttaaagcaagccaatagagtctcgggcagccgagaacctagacctgccagggagcgtttacttgaatggcctgacagggagctggaccgggtgaatagctttctcagtagccgcctgcaggagataaaaaacactgtcaaagattctattcgggctagcttctcagtttgcgagctgagcatggactctaacggcttttctaaagagggtgctgctgaacccgaacctcagagtctgccaccctcaaatctgagtggctcgtccgagcagcagcccgatatcaaccttgatctttccccgctcactctaggcagccctcagaaccatacgcttcaggccccaggcgagcccgcacccccttgggccgagatgcgtgggcctcacccaccttggaccgaagtacgaggacctcccccagggatcgtgcctgagaacggcctggttaggcgtctcaacaccgttcccaacctgagccgggtgatatgggttaagactcccaagcctggttatccctcgagcgaggaaccttctagcaaggaagtgccgtcctgcaagcaagaattacctgagccggtgtccagcggtggtaagcctcagaaggggaaacgtcagggaagtcaagccaaaaagagtgaagcgagccctgcccctcggccacccgcatccctggaggtgccctctgccaaaggccaggtggccggaccaaagcagcctggcagggtgttggaactccccaaggtaggctcgtgcgccgaggctggagagggatcccgagggtctagacctgggccaggctgggcaggttcccctaagacggagaaagagaagggtagcagctggcgcaactggccaggagaggctaaggctagacctcaggaacaagagagcgtgcaaccttcaggacccgctcgccctcagagtctcccacagggaaagggacgctccagacgcagccggaataagcaggaaaagcccgcttcatccctcgacgatgtatttctacctaaggacatggacggggtggagatggacgagacagatcgggaggtggagtactttaagcgcttttgtcttgactcagccaagcagacaaggcagaaggtggccgtgaattggaccaattttagcctcaaaaaaacaaccccaagcaccgcccagtag

SEQ ID NO: 288372 - DNA, 1347 bp, Artificial Sequence
  derived and/or modified sequence
atgaagggcggcaccctgggcggcatccccggcgagcccgccgtggaccacagagacgtggacgagctgctggagttcatcaacagcaccgagcccaaggtgcccaacagcgccagagccgccaagagagccagacacaagctgaagaagaaggagaaggagaaggcccagctggccgccgaggccctgaagcaggccaacagagtgagcggcagcagagagcccagacccgccagagagagactgctggagtggcccgacagagagctggacagagtgaacagcttcctgagcagcagactgcaggagatcaagaacaccgtgaaggacagcatcagagccagcttcagcgtgtgcgagctgagcatggacagcaacggcttcagcaaggagggcgccgccgagcccgagccccagagcctgccccccagcaacctgagcggcagcagcgagcagcagcccgacatcaacctggacctgagccccctgaccctgggcagcccccagaaccacaccctgcaggcccccggcgagcccgcccccccctgggccgagatgagaggcccccaccccccctggaccgaggtgagaggccccccccccggcatcgtgcccgagaacggcctggtgagaagactgaacaccgtgcccaacctgagcagagtgatctgggtgaagacccccaagcccggctaccccagcagcgaggagcccagcagcaaggaggtgcccagctgcaagcaggagctgcccgagcccgtgagcagcggcggcaagccccagaagggcaagagacagggcagccaggccaagaagagcgaggccagccccgcccccagaccccccgccagcctggaggtgcccagcgccaagggccaggtggccggccccaagcagcccggcagagtgctggagctgcccaaggtgggcagctgcgccgaggccggcgagggcagcagaggcagcagacccggccccggctgggccggcagccccaagaccgagaaggagaagggcagcagctggagaaactggcccggcgaggccaaggccagaccccaggagcaggagagcgtgcagcccagcggccccgccagaccccagagcctgccccagggcaagggcagaagcagaagaagcagaaacaagcaggagaagcccgccagcagcctggacgacgtgttcctgcccaaggacatggacggcgtggagatggacgagaccgacagagaggtggagtacttcaagagattctgcctggacagcgccaagcagaccagacagaaggtggccgtgaactggaccaacttcagcctgaagaagaccacccccagcaccgcccagtag

SEQ ID NO: 288373 - DNA, 1347 bp, Artificial Sequence
  derived and/or modified sequence
atgaagggcgggaccctcggaggcatacccggggagcccgctgtggatcatagagatgttgatgagctcctggagttcataaatagtacagagcctaaagtgcctaacagcgcgagagctgcgaagagggcccgacacaaactgaagaagaaagagaaggagaaagctcagctcgccgcagaggccctcaaacaagctaacagagtgtcgggatctagagagcccaggcccgcccgggagagacttctcgagtggccagacagagagctggacagagtgaatagcttcctatcctctaggctacaggaaattaagaacactgtgaaagatagtataagggcctccttctctgtgtgcgagctctcgatggacagtaacggattttccaaggaaggtgccgccgagccagagcctcagagtcttcccccgagcaatttgagcggctcgtctgagcagcaaccagacattaatctcgatctaagccctctgacccttgggtcaccccagaaccacacccttcaggctcctggcgaacccgcccccccatgggctgagatgaggggaccccaccccccctggaccgaagtcaggggacccccccccggaattgtcccagagaacgggctggttagacggttgaacaccgtacctaatctgtcgcgagtgatatgggtgaagacgcccaagcccggttatcctagcagcgaagaaccatcttctaaggaagtgccttcatgtaaacaggagctgccagaacctgtgagctcgggcggtaaaccgcagaaaggcaaacggcaaggcagccaggctaagaagtcagaggcgtctcctgcaccccggcctcccgcatcgctagaagttcctagtgcgaagggccaagtggccgggcccaaacagcctgggcgtgtgctcgagctgcctaaggtcgggtcctgtgccgaagcaggcgaaggaagccgtggatccagaccaggcccaggatgggctggttctccaaagaccgagaaggagaaaggctcctcctggcgtaactggcctggggaagcgaaagctaggccgcaggaacaggagagcgttcagcccagcggcccagccagaccccaaagtctgccccaggggaaagggcggtcacggagaagcaggaataagcaggaaaagcctgcaagcagcctggatgacgtgtttctgcccaaagacatggatggggttgaaatggacgagaccgatagggaggtggagtacttcaagaggttctgtctggattccgccaagcaaacaagacagaaagtcgccgtgaattggacaaatttttctctgaaaaaaacaacccccagcacggctcagtag

SEQ ID NO: 288374 - DNA, 1347 bp, Artificial Sequence
  derived and/or modified sequence
atgaagggcggcaccctgggcggcatccctggagagcctgctgtggaccacagagatgtggatgagctgctggagttcatcaacagcacagagcccaaggtgcccaacagcgcccgggccgccaagagggcccggcacaagctgaagaagaaggagaaggagaaggcccagctggccgctgaggccctgaagcaggccaacagagtgtctggcagccgggagcccaggcctgcccgggagcggctgctggagtggccagaccgggagctggacagagtgaacagcttcctgagcagccggctgcaggagatcaagaacacagtgaaggacagcatccgggccagcttctctgtgtgtgagctgtccatggacagcaatggcttcagcaaggagggcgctgctgagcctgagccccagagcctgccccccagcaacctgagcggcagcagcgagcagcagcctgacatcaacctggacctgagccccctgaccctgggcagcccccagaaccacaccctgcaggcccctggagagcccgccccaccctgggccgagatgaggggcccccaccccccctggacagaggtgcggggccccccacctggcatcgtgcctgaaaatggcctggtgcggcggctgaacacagtgcccaacctgagcagggtcatctgggtgaagacccccaagccaggctaccccagcagcgaggagcccagcagcaaggaggtgcccagctgcaagcaggagctgcctgagcctgtgagcagcggcggcaagccccagaagggcaagaggcagggcagccaggccaagaagtctgaggccagccctgccccccggcccccagccagcctggaggtgcccagcgccaagggccaggtggccggccccaagcagcccggccgggtgctggagctgcccaaggtgggcagctgtgccgaggccggggagggcagccggggcagccggcccggccctggctgggccggcagccccaagacagagaaggagaagggcagctcctggaggaactggccaggagaggccaaggcccggccccaggagcaggagagcgtgcagcccagcggccctgcccggccccagagcctgccccagggcaagggccgcagccgccgcagcaggaacaagcaggagaagccagccagcagcctggatgatgtgttcctgcccaaggacatggatggagtggagatggatgaaacagaccgggaggtggagtacttcaagcgcttctgcctggacagcgccaagcagacccggcagaaggtggccgtgaactggaccaacttcagcctgaagaagaccacccccagcacagcccagtag

SEQ ID NO: 288375 - DNA, 1347 bp, Artificial Sequence
  derived and/or modified sequence
atgaagggcggcaccctgggcggcatccccggcgagcccgccgtggaccacagagacgtagatgaactgctggagtttatcaattcaaccgaaccgaaggttccaaacagtgctcgcgcagcaaagcgcgcaagacataagctgaagaaaaaggagaaggaaaaagcacaactggcggccgaggcgcttaaacaggcgaatagggtcagcggttcccgggaacctaggcccgcacgcgagaggctgctggaatggcccgatagggagcttgatcgcgttaatagctttttaagtagcagactgcaagaaatcaagaacaccgtgaaagatagtatcagagcttccttcagcgtctgcgagctgagtatggactctaacggcttcagtaaagaaggcgctgcagaacccgaaccacagtctctccccccatccaatctcagcggaagcagtgaacagcaaccagatatcaacctggacctgagtcctttaacactgggaagcccacagaaccacactctgcaggcccccggggagcccgccccaccatgggccgagatgaggggaccgcaccccccgtggaccgaggtaaggggacccccaccaggaattgtgccagaaaatgggctggtgagaagactgaataccgtgcctaacctttctagggtcatttgggtaaaaacaccaaagcctggctacccttccagtgaggagccctcctctaaggaagtgccgagctgcaagcaggagttacccgagccggtaagcagcgggggcaagcctcagaaaggaaagcgccaaggctcccaggcaaagaagtcggaagcttcccccgctccccggccacctgccagcctggaggtaccgagcgccaagggacaggtggcaggcccaaaacagccgggacgtgtgttggaactgcctaaggtgggatcttgcgctgaagcaggcgagggcagtagaggatcaagaccagggccaggatgggccggttcccccaaaacagaaaaagaaaaaggctctagctggagaaattggcccggcgaggccaaggcccgcccccaagaacaggagtctgtccagccttctggacccgcgcgccctcaaagtctgccccagggaaaaggaagatcaagacgcagcaggaacaagcaggaaaaaccagcgagttctctagacgacgtgtttttgcctaaagacatggatggtgtggaaatggacgagactgatcgagaagtagagtactttaaacgcttctgtctggatagcgcaaagcagactcggcaaaaagttgctgttaattggacaaactttagcttgaaaaagaccacgccatccacggcacagtag

SEQ ID NO: 288376 - DNA, 1347 bp, Artificial Sequence
  derived and/or modified sequence
atgaaagggggaacattggggggaattcccggagagccggcagtggatcacagagacgtggacgagttgctggagtttatcaatagtacagaaccaaaggttcccaattcagcccgtgctgctaagagagccaggcacaaactcaagaaaaaagagaaagaaaaagcgcaactggccgcagaggccctaaagcaggcaaatagggtatcaggcagccgggagccccgaccagcaagagagagactgctcgaatggccagacagggaactggatcgcgtgaacagctttctgagctctcgtttgcaggaaatcaaaaacaccgtcaaggactctatccgggcatccttctcagtgtgtgagctgtctatggattctaacggttttagtaaggagggggcagctgagcccgagccgcaaagtctgccaccgagcaacctgtctggtagctctgaacaacagcccgacatcaatctagacttatcaccactcaccctggggagcccgcagaaccacaccttgcaagccccaggagagcctgcccctccatgggcagagatgagggggccacaccccccttggaccgaagtccgcggtccaccgcctggaatcgttccagaaaacggcctcgttaggagacttaacaccgtgcccaaccttagccgagtaatttgggtgaagaccccaaagcctggctaccccagctcagaagaaccttcctcaaaggaggtccccagttgcaagcaggaacttcctgaacccgtgtcgtctggtggcaagcctcagaagggcaagcgccaaggatcacaggccaaaaagtccgaagcatctccagctccacgccctccggcaagcttggaggttccctccgccaagggccaggtcgccggtccaaagcagcctggtcgcgttttggagctgcccaaggttggatcttgtgccgaggctggggaaggctctagaggttcccgccctgggcctgggtgggccggatcaccaaagacggaaaaggaaaaggggagctcatggcgcaactggccaggggaagccaaagctagaccacaagaacaggaatccgtgcagccttctggtcccgcaaggccccaaagtcttccacagggaaagggacgctctcgaaggagtcgcaacaagcaggaaaaacccgctagctctctggacgacgtgtttcttcccaaagatatggatggagtggagatggatgaaacagacagagaagttgagtatttcaaaagattttgcctcgactctgccaagcagactagacagaaagtggctgtcaattggacaaatttctccctcaagaagactaccccaagtaccgcccaatag

SEQ ID NO: 288377 - DNA, 537 bp, Artificial Sequence
  derived and/or modified sequence
atgctgctgatcctgctgtctgtggccctgctggccctgagcagcgctgagagcagcagtgaagatgtgtcccaggaggagagcctcttcctgatcagcggcaagccagagggcagaagaccccagggcggcaaccagccccagaggcctcctcctcctcctgggaagccccagggccccccaccccagggcggcaaccagagccagggccccccacctcctcctgggaagccagagggccggcccccccagggcggcaaccagagccagggccccccaccccaccctgggaagccagagcggcccccaccccagggcggcaaccagagccagggcaagccccagggccccccccagcaggagggcaacaagccccagggccccccacctcctgggaagccccagggccccccacctgctgggggcaacccccagcagccccaggcccccccagctgggaagccccagggccccccacctccaccccagggcggccggccccccaggcctgcccagggccagcagcccccccagtag

SEQ ID NO: 288378 - DNA, 933 bp, Artificial Sequence
  derived and/or modified sequence
atgtacagcgacgtgtggaagcagctgaaggaggagaagaaggtgagactggagctggagaaggagctggagctgcagatcggcatgaagaccgagatggagatcgccatgaagctgctggagaaggacacccacgagaagcaggacaccctggtggccctgagacagcagctggaggaggtgaaggccatcaacctgcagatgttccacaaggcccagaacgccgagagcagcctgcagcagaagaacgaggccatcaccagcttcgagggcaagaccaaccaggtgatgagcagcatgaagcagatggaggagagactgcagcacagcgagagagccagacagggcgccgaggagagaagccacaagctgcagcaggagctgggcggcagaatcggcgccctgcagctgcagctgagccagctgcacgagcagtgcagcagcctggagaaggagctgaagagcgagaaggagcagagacaggccctgcagagagagctgcagcacgagaaggacaccagcagcctgctgagaatggagctgcagcaggtggagggcctgaagaaggagctgagagagctgcaggacgagaaggccgagctgcagaagatctgcgaggagcaggagcaggccctgcaggagatgggcctgcacctgagccagagcaagctgaagatggaggacatcaaggaggtgaaccaggccctgaagggccacgcctggctgaaggacgacgaggccacccactgcagacagtgcgagaaggagttcagcatcagcagaagaaagcaccactgcagaaactgcggccacatcttctgcaacacctgcagcagcaacgagctggccctgcccagctaccccaagcccgtgagagtgtgcgacagctgccacaccctgctgctgcagagatgcagcagcaccgccagctag

SEQ ID NO: 288379 - DNA, 933 bp, Artificial Sequence
  derived and/or modified sequence
atgtactccgacgtatggaagcagttaaaagaagagaagaaagtgcgtctggagttggaaaaggaacttgaacttcaaattgggatgaagacagaaatggagatcgcaatgaagttactggagaaggacacccatgaaaagcaggatacgttggtcgccctgagacaacagctagaggaggtcaaggcgatcaatctccaaatgttccataaggcccagaacgcagaatcttccttgcagcaaaagaacgaggcaatcacgtctttcgagggcaaaaccaaccaggtcatgtcaagtatgaagcagatggaggaacgactgcaacattcagagcgagcaagacagggagccgaggaaaggtcacataagttgcaacaggagctcggcggcaggattggcgctttacagcttcagctatctcagttgcacgaacagtgctcaagtctcgaaaaggagttaaagagtgaaaaggaacaaaggcaggccctgcaaagggagttgcagcacgaaaaagacacgtcttcactgctcaggatggaacttcaacaggtcgaaggcctaaaaaaagagctgagagaactgcaggacgagaaggcggagttgcaaaagatatgcgaggagcaagagcaggctcttcaagagatgggactgcatctgtcccaatctaagttgaagatggaggatattaaagaggttaaccaggccctcaaagggcacgcgtggctcaaggatgatgaggccacacactgccgccaatgtgaaaaagaattttccatctctcggaggaaacatcactgccgcaactgcggccacatcttttgcaacacttgttcatcaaatgagttggctctccccagctaccctaagccagttcgcgtgtgtgactcatgccacaccctcctgctgcaaaggtgctcctctactgccagttag

SEQ ID NO: 288380 - DNA, 933 bp, Artificial Sequence
  derived and/or modified sequence
atgtacagtgatgtgtggaagcagctgaaggaggagaagaaggtgcggctggagctggagaaggagctggagctgcagatcggcatgaagacagagatggagatcgccatgaagctgctggagaaggacacccatgagaagcaggacaccctggtggccctgcggcagcagctggaggaggtgaaggccatcaacctgcagatgttccacaaggcccagaatgctgagagcagcctgcagcagaagaatgaggccatcaccagctttgagggcaagaccaaccaggtgatgagctccatgaagcagatggaggagcggctgcagcacagcgagcgggcccggcagggcgctgaggagaggagccacaagctgcagcaggagctgggcggccgcatcggggccctgcagctgcagctgagccagctgcacgagcagtgcagcagcctggagaaggagctgaagtctgagaaggagcagaggcaggccctgcagcgggagctgcagcacgagaaggacaccagcagcctgctgaggatggagctgcagcaggtggagggcctgaagaaggagctgcgggagctgcaggatgagaaggccgagctgcagaagatctgtgaggagcaggagcaggccctgcaggagatgggcctgcacctgagccagagcaagctgaagatggaggacatcaaggaggtgaaccaggccctgaagggccacgcctggctgaaggatgatgaggccacccactgccggcagtgtgagaaggagttcagcatcagcaggaggaagcaccactgcaggaactgtggccacatcttctgcaacacctgcagcagcaatgagctggccctgcccagctaccccaagcctgtgcgggtgtgtgacagctgccacaccctgctgctgcagcgctgcagcagcacagccagctag

SEQ ID NO: 288381 - DNA, 933 bp, Artificial Sequence
  derived and/or modified sequence
atgtacagcgacgtgtggaagcagctgaaggaggagaagaaggtgagactggagctggagaaggagctcgaactgcaaattgggatgaagacagagatggaaatcgctatgaagctgctcgaaaaggatacacacgaaaaacaggatacattagtggcgctgcggcagcagcttgaggaagtgaaggccattaacctccaaatgttccataaagcccagaatgccgagtcaagtcttcagcagaagaatgaagctatcacaagctttgaaggcaaaaccaatcaggtgatgtcgtcgatgaaacagatggaggagcgtttgcagcactcggaaagagcgaggcagggtgccgaggagcggagccataaactgcagcaggagctgggaggccgcataggagcactccaactccaattgtcgcagctgcacgaacagtgcagctcgctcgagaaagagctaaagagcgagaaggagcagcgccaggccctgcagcgagaactccagcatgagaaagatacgagttctctgttgcgaatggagttgcagcaggtggagggattaaagaaggaacttagggagttgcaggatgagaaggcggaattgcagaaaatatgtgaggagcaggaacaggcgctgcaggaaatgggactacatctgagtcagtctaagctgaaaatggaggatatcaaggaggtaaaccaagctctgaaaggtcatgcatggctaaaggacgatgaagccactcattgccggcagtgtgaaaaggagtttagtatatctaggcgtaaacatcactgccgtaactgtgggcacatcttctgcaatacctgtagcagcaacgagttagccctgccaagctatccgaaaccagttagagtctgtgatagctgccacacgctgctgctacaaaggtgctcctcaacagccagctag

SEQ ID NO: 288382 - DNA, 933 bp, Artificial Sequence
  derived and/or modified sequence
atgtattctgacgtatggaagcagctcaaagaagaaaaaaaggtccgcctggaattagagaaggagctcgaactccagatcggaatgaaaaccgagatggaaatagccatgaaactgctcgagaaagatacccacgagaaacaggataccctggtggctctgagacagcagctcgaagaggtcaaggccatcaacctgcagatgtttcacaaagctcagaatgctgagagttctcttcagcagaaaaatgaggctattacaagcttcgaaggtaagacaaatcaggtcatgtccagtatgaaacagatggaagagcgactgcagcattccgagagagccaggcagggcgcagaagagcgatcacacaaactccagcaagaactcggaggcagaatcggcgcactccagctacaactgtcacagttacatgaacagtgctcgtcgttagagaaagaacttaagagcgaaaaagaacaaagacaggccttacaaagggagctgcagcatgaaaaagatacctcttcccttcttaggatggagctacagcaggtggagggcctcaagaaagaactccgcgagttgcaagacgaaaaggccgagctgcagaagatttgcgaggaacaagaacaggccctgcaagagatgggcctgcacctgtcccagtctaaactgaagatggaagacatcaaagaagtaaaccaggcactgaaaggccatgcctggttgaaagacgacgaggcgactcattgcaggcaatgcgaaaaagagttcagcatatcaaggagaaaacatcactgcaggaattgcggccacatcttctgcaatacctgcagctctaatgaactggccctgccctcgtacccgaaaccagtgcgtgtgtgtgatagctgccatacattgctgctccagcggtgctcgtctacagctagctag

SEQ ID NO: 288383 - DNA, 2560 bp, Artificial Sequence
  derived and/or modified sequence
aacaacccagtcttcagaatgcaaaggtgccttgcttatgtcagaaagggcctctcactgcggtccctgcccacatcactctcagaccacctggatcccttggacggggactcccttcatggcctgtgggcctttgcatgccaaagttcctactcgttcttcagcatccactcacctgccatggcctcccaaagtgctgggattacagtcatgagccaccgcacccggccaagtcttgttctgttttaaagaaaattaaatttaaattgctttatcaatgtaactttttttttttttggaaacagagtcttgctgtcacccaggctggaatgtagtggcgtgatcttagctcactgcaacctccacctcccggattcaagcgattttcctgcctcagcctcccaagtagctggaattataggcacatgccaccacacccgactaatttttgtatttttagtagagacagggtttcaccatgttggccaggctggtgtcaaactcctgacctcaagtgatctcccgccttggccttccaaagtgctgggattacaggcatgagccaccacacccagcctatgaacttaacttttcaaatatctattgacttattctcattcttcttttttttgtttttttttggtggggggatggagtcttgccctgtcgcccaggctggagtgcaatggcacgatcttggctcactgcaagctctgcctcccgggttcacgccattctcctgcctcagcctcccaagtagctgggactacaggcgcccaccaccacgcccagctaattgtttgtgtttttagtagagacggggtttcaccatgttagccaggatggtctcgatcgcctgacctcgtgatccgcccgcctcggcctcccaaagtgctgggattacaggcgtgagccaatgcgcccagccaagttttaacctttttctaccatgcttaaaaaataaaaattaccttacattttttaaaattgtggtatattttgaaatacttcataattagcttgctttccataagcaaacaattcctcttggtgtccttgtttgatacagataacaaaacaggataccaaagttgagctggagacttacaagcaaactcggcaaggtctggatgaaatgtacagtgatgtgtggaagcagctaaaagaggagaagaaagtccggttggaactggaaaaagaactggagttacaaattggaatgaaaaccgaaatggaaattgcaatgaagttactggaaaaggacacccacgagaagcaggacacactagttgccctccgccagcagctggaagaagtcaaagcgattaatttacagatgtttcacaaagctcagaatgcagagagcagtttgcagcagaagaatgaagccatcacatcctttgaaggaaaaaccaaccaagttatgtccagcatgaaacaaatggaagaaaggttgcagcactcggagcgggcgaggcagggggctgaggagcggagccacaagctgcagcaggagctgggcgggaggatcggcgccctgcagctgcagctctcccagctgcacgagcaatgctcaagcctggagaaagaattgaaatcagaaaaagagcaaagacaggctcttcagcgcgaattacagcacgagaaagacacttcctctctactcaggatggagctgcaacaagtggaaggactgaaaaaggagttgcgggagcttcaggacgagaaggcagagctgcagaagatctgcgaggagcaggaacaagccctccaggaaatgggcctgcacctcagccagtccaagctgaagatggaagatataaaagaagtgaaccaggcactgaagggccacgcctggctgaaagatgacgaagcgacacactgtaggcagtgtgagaaggagttctccatttcccggagaaagcaccactgccggaactgtggccacatcttctgcaacacctgctccagcaacgagctggccctgccctcctaccccaagccggtgcgagtgtgcgacagctgccacaccctgctcctgcagcgctgctcctccacggcctcctgaacgtccgtcctcaggagcacagcctcacggacagtgccaaaccctgtgggtctccaggggcttgggaaatgtgttctttcccaagagtatcaaaggaaagaatcaaatttcttgcccggtcactggcactccagaagacagcgtgccggaaccggcagctctcacctttctgtgacttgttcggaattaactcctctggatggaaacttccatcttacttggttacatcacggctctggttcagatacaacttcatgattttgctactatcatttttcacttttcaaagaatttaacctattttacagcagttcagttctgctagtgagtagttttcctctcctaccttccttctaaaaacctgattcatgcacagcgtttgacacacatggagtctgccagtgtgccttctctgcttcagacaagagatctgccatttcatgcccttgtgactacctatcattggccctgcaataaaatcatttatttttc

SEQ ID NO: 288384 - DNA, 2771 bp, Artificial Sequence
  derived and/or modified sequence
atggccgaccgggaaggcggctgcgctgctgggcgggggcgggagctggagccggagctggagccggggccggggcccgggtcagcgcttgagccgggagaagagtttgagatcgtggaccgaagccagctgcccggcccaggcgacctgcggagcgcaacgaggccgcgggcggccgagggctggtcggcgcccatcctgaccctggcacgcagggccaccgggaacctgtcggcgagctgcgggagcgcgctgcgcgcggccgcggggctgggcggcggggacagcggggacggcacggcgcgcgcagcttctaagtgccagatgatggaggagcgtgccaacctgatgcacatgatgaaactcagcatcaaggtgttgctccagtcggctctgagcctgggccgcagcctggatgcggaccatgcccccttgcagcagttctttgtagtgatggagcactgcctcaaacatgggctgaaagttaagaagagttttattggccaaaataaatcattctttggtcctttggagctggtggagaaactttgtccagaagcatcagatatagcgactagtgtcagaaatcttccagaattaaagacagctgtgggaagaggccgagcgtggctttatcttgcactcatgcaaaagaaactggcagattatctgaaagtgcttatagacaataaacatctcttaagcgagttctatgagcctgaggctttaatgatggaggaagaagggatggtgattgttggtctgctggtgggactcaatgttctcgatgccaatctctgcttgaaaggagaagacttggattctcaggttggagtaatagatttttccctctaccttaaggatgtgcaggatcttgatggtggcaaggagcatgaaagaattactgatgtccttgatcaaaaaaattatgtggaagaacttaaccggcacttgagctgcacagttggggatcttcaaaccaagatagatggcttggaaaagactaactcaaagcttcaagaagaggaagagagaatgaaaggacaggacaaaggagggctgagccgaggaagagagcttgctgccagctgcccggcagtctccttgctggacacatcttgtctcctgttagcaggaggggggtgctcagcccttctgaggctttccacagctttcagctgcaacagaccgaatttgctcacttcaagaagaacagcagcagttaagagaacaaaatgaattaattcgagaaagaagtgaaaagagtgtagagataacaaaacaggataccaaagttgagctggagacttacaagcaaactcggcaaggtctggatgaaatgtacagtgatgtgtggaagcagctaaaagaggagaagaaagtccggttggaactggaaaaagaactggagttacaaattggaatgaaaaccgaaatggaaattgcaatgaagttactggaaaaggacacccacgagaagcaggacacactagttgccctccgccagcagctggaagaagtcaaagcgattaatttacagatgtttcacaaagctcagaatgcagagagcagtttgcagcagaagaatgaagccatcacatcctttgaaggaaaaaccaaccaagttatgtccagcatgaaacaaatggaagaaaggttgcagcactcggagcgggcgaggcagggggctgaggagcggagccacaagctgcagcaggagctgggcgggaggatcggcgccctgcagctgcagctctcccagctgcacgagcaatgctcaagcctggagaaagaattgaaatcagaaaaagagcaaagacaggctcttcagcgcgaattacagcacgagaaagacacttcctctctactcaggatggagctgcaacaagtggaaggactgaaaaaggagttgcgggagcttcaggacgagaaggcagagctgcagaagatctgcgaggagcaggaacaagccctccaggaaatgggcctgcacctcagccagtccaagctgaagatggaagatataaaagaagtgaaccaggcactgaagggccacgcctggctgaaagatgacgaagcgacacactgtaggcagtgtgagaaggagttctccatttcccggagaaagcaccactgccggaactgtggccacatcttctgcaacacctgctccagcaacgagctggccctgccctcctaccccaagccggtgcgagtgtgcgacagctgccacaccctgctcctgcagcgctgctcctccacggcctcctgaacgtccgtcctcaggagcacagcctcacggacagtgccaaaccctgtgggtctccaggggcttgggaaatgtgttctttcccaagagtatcaaaggaaagaatcaaatttcttgcccggtcactggcactccagaagacagcgtgccggaaccggcagctctcacctttctgtgacttgttcggaattaactcctctggatggaaacttccatcttacttggttacatcacggctctggttcagatacaacttcatgattttgctactatcatttttcacttttcaaagaatttaacctattttacagcagttcagttctgctagtgagtagttttcctctcctaccttccttctaaaaacctgattcatgcacagcgtttgacacacatggagtctgccagtgtgccttctctgcttcagacaagagatctgccatttcatgcccttgtgactacctatcattggccctgcaataaaatcatttatttttcactctgg

SEQ ID NO: 288385 - DNA, 369 bp, Artificial Sequence
  derived and/or modified sequence
atggtggtggttgagaaaggggcgtccctgatgagtcgcgcgtcccttatgccggcccaggctcgagcaccgtttcagcggttgcgtgattgtcgcggccctgccgactcaagtcacgctttcaaactacagtgctttccgagccactgcagacggcccccctgggtgataagcaggaaggggagagcaattaacaagtactctatatgtataagctgcgtagcgctgcacctcgagattagcttcatatggcaacttctgcaaaacgagcccaatctcgagggcggcttaggacgatttatgcttgccagtttatcactccagcaggtgatttcaattctagccttcaccagagtgaagcagctgtag

SEQ ID NO: 288386 - DNA, 1503 bp, Artificial Sequence
  derived and/or modified sequence
atgggcattggattatccgcccaaggggtgaatatgaacaggctgcccggctgggacaagcattcttatggctatcatggggacgatggccatagtttctgctcatcaggcacaggccaaccttacggccccactttcaccacaggagatgtaatcggatgctgcgtgaatctgataaataacacctgcttctataccaagaacgggcactccttggggatagccttcacagatttgcccccaaatttataccctacagtcggtctgcagacaccaggggaagttgtggacgcaaatttcggacagcacccctttgttttcgatatagaagactatatgcgtgagtggaggacgaaaatccaagcacagattgacaggttcccaataggcgacagagagggggaatggcagactatgattcagaagatggtgtcaagttatctggttcaccatggatattgcgcgaccgccgaagcatttgcaagatccacggaccaaaccgtgctggaagagctcgcctctattaaaaaccgacaaaggatacagaagttggtgttggccggtcgcatgggagaagcgattgagacaacgcagcagctgtacccttcactgttagagcgcaaccccaacctgctgttcactctcaaagtaagacagttcattgaaatggtgaatggtactgactcagaagtgagatgtctcggtggtagatcaccgaaatcacaggactcctatcctgtctcacctaggccattcagcagccctagtatgtcccctagtcacgggatgaacatacataacctggcctccgggaaaggctcaacagcccacttctctggttttgagtcatgttctaatggagtcatatctaataaggcacatcaatcatactgccacagtaataagcaccagtcttcaaaccttaacgtgccagaactgaactctattaacatgagcaggtcccaacaggtgaacaacttcaccagcaacgacgtcgacatggagactgatcactactccaacggggtgggagagacctctagcaacggattccttaacggaagcagcaagcacgaccacgagatggaagactgtgatacggaaatggaagtagacagctcacaattacgaaggcaactctgtgggggtagtcaggccgccattgaacgcatgatccacttcggacgggagttgcaggctatgtcagaacaactgaggcgggactgtgggaagaataccgccaataagaagatgttaaaggacgctttttccttgctcgcgtatagtgacccctggaattcgcccgtcgggaatcaactggatcctatacaaagagagcccgtttgctcggccctgaacagcgccatcctcgagacgcacaacctccctaaacagcctccacttgcgctagctatgggccaagctacccaatgcttgggattgatggctcgcagcgggatcggatcatgtgcattcgcgactgtagaggattaccttcactag

SEQ ID NO: 288387 - DNA, 1503 bp, Artificial Sequence
  derived and/or modified sequence
atgggcatcggcctgagcgcccagggcgtgaacatgaaccggctgcccggctgggacaagcacagctatggctaccatggagatgatggccacagcttctgcagcagcggcaccggccagccctacggccccaccttcaccactggagatgtgattggctgctgcgtgaacctgatcaacaacacctgcttctacaccaagaatggccacagcctgggcatcgccttcacagacctgccccccaacctgtaccccaccgtgggcctgcagaccccaggagaggtggtggatgccaactttggccagcacccctttgtgtttgatattgaggactacatgagggagtggaggaccaagatccaggcccagattgaccgcttccccatcggggaccgggagggggagtggcagaccatgatccagaagatggtgagcagctacctggtgcaccacggctactgtgccacagctgaggcctttgcccggagcacagaccagacagtgctggaggagctggccagcatcaagaaccggcagaggatccagaagctggtgctggccggccgcatgggagaggccatcgagaccacccagcagctgtaccccagcctgctggagaggaaccccaacctgctcttcaccctgaaggtgcggcagttcatcgagatggtgaatggaacagattctgaggtgcgctgcctgggcggccgcagccccaagagccaggacagctaccctgtgagcccccggcccttcagcagccccagcatgagccccagccacggcatgaacatccacaacctggccagcggcaagggcagcacagcccacttcagcggctttgagagctgcagcaatggagtcatcagcaacaaggcccaccagagctactgccacagcaacaagcaccagagcagcaacctgaatgtgcctgagctgaacagcatcaacatgagccgcagccagcaggtgaacaacttcaccagcaatgatgtggacatggagacagaccactacagcaatggagtgggggagaccagcagcaatggcttcctgaatggcagcagcaagcatgaccacgagatggaggactgtgacacagagatggaggtggacagcagccagctgcggcggcagctgtgtggcggcagccaggccgccatcgagaggatgatccacttcggccgggagctgcaggccatgtctgagcagctgcggcgggactgtgggaagaacacagccaacaagaagatgctgaaggatgccttcagcctgctggcctacagcgacccctggaacagccctgtgggcaaccagctggaccccatccagcgggagcctgtgtgcagcgccctgaacagcgccatcctggagacccacaacctgcccaagcagccccccctggccctggccatgggccaggccacccagtgcctgggcctgatggcccggtctggaattggcagctgtgcctttgccaccgtggaggactacctgcactag

SEQ ID NO: 288388 - DNA, 1503 bp, Artificial Sequence
  derived and/or modified sequence
atgggcatcggcctgagcgcccagggcgtgaacatgaaccggctgccagggtgggacaagcattcctacggttatcatggcgatgatggccatagtttctgcagttccggcaccggacaaccatacggccctacattcactactggggacgtcataggctgctgtgtcaatctgatcaataacacgtgtttttatacaaaaaacggacattcgcttggaatcgcattcacggacctgcctcctaacttatatccgacagtggggctccagactcccggcgaggtcgtagatgccaattttggacagcatcccttcgtgtttgacattgaggattatatgcgggaatggcgtacaaagatccaagcccagatagaccgtttccctattggtgacagggaaggggagtggcagactatgattcaaaagatggtgtctagttacctcgttcaccatggatactgcgccactgctgaggcctttgcaagatccacggatcagactgtcctcgaggagctggcctcaatcaaaaatcgccagcggatacagaagctggtgctggctggaaggatgggcgaagccatcgagacgactcagcagctgtacccttcactacttgagcgaaatcctaacctgctgttcacactgaaagtgcggcagttcattgaaatggtcaatggcactgattccgaagtacggtgtcttggtggcaggtcaccgaagagccaggattcttatccggttagtcctcgccctttctcttcccctagtatgtcccctagtcacgggatgaacattcataacttggcgagcggaaaggggagtacagcacatttttctggctttgaaagttgtagtaatggcgtcatttctaacaaggctcaccagtcctactgtcattccaataagcaccagtcctctaatctcaatgtgcccgagcttaatagtatcaacatgtccagaagtcagcaggtaaacaatttcactagcaatgacgtcgacatggaaaccgaccattacagcaacggtgttggcgagaccagctctaacgggtttcttaatgggtcttctaagcatgaccatgaaatggaggattgtgacacagagatggaagtcgatagctcacaacttaggcgtcagctctgcggagggagccaggctgccattgaacgcatgatccatttcgggagagagctccaagcaatgagtgaacagctgaggcgcgattgtggcaaaaatacggccaacaaaaaaatgttgaaggacgcattctcactgcttgcctatagcgacccatggaactcgccagtgggcaaccaattggaccccatccagcgagagcctgtgtgttccgcactcaatagcgccattctagaaacccacaacttgcccaagcagccgccattggccttggcaatggggcaagccacccagtgtctcggactaatggcccggagcggcatcggttcttgtgccttcgcaacagtggaagactacctgcattag

SEQ ID NO: 288389 - DNA, 1503 bp, Artificial Sequence
  derived and/or modified sequence
atgggtatcgggttgtccgcccagggtgtcaatatgaaccgattgcctggttgggataagcatagttatggctatcacggtgacgacggacattccttctgttcttctgggactggccagccgtatgggccaacttttaccactggtgacgtcatcggctgttgtgtcaacctgataaacaacacatgtttttacactaagaatggacacagtctggggatagccttcacagacctgccccctaatttatatcctaccgtaggcttacagacaccaggcgaggttgtggacgcgaacttcgggcagcaccctttcgtttttgatatcgaagactacatgcgcgaatggcgtacaaaaatccaggcccagatcgacaggtttcccattggcgatagggagggggaatggcaaacaatgatccaaaaaatggtttccagctaccttgtgcaccacggctactgcgccactgctgaagctttcgcgagaagtaccgatcagacagttttagaagagcttgcttccattaaaaatagacaaaggatacaaaagcttgtactcgctgggagaatgggggaagctattgagacaactcagcagttgtacccttccttgctggaaaggaaccctaacctgttgttcacactcaaagttagacagttcatcgagatggtcaatgggaccgattctgaagttaggtgtctgggcggtagaagtccgaaatcacaggactcttacccggtgtctcctcgccctttcagtagcccatcaatgtcccctagccacggtatgaacattcacaacttggcctctggcaaaggatcgactgcccacttttccggctttgagtcttgttctaacggagtaattagcaataaagctcaccaatcctactgtcattccaacaaacatcaatccagcaatctgaacgtgccagagctgaatagcatcaacatgtcgcgatcccagcaggtcaataatttcacaagtaacgatgtggacatggagactgaccactacagcaatggcgtcggagagacatcctctaatggtttcctgaatggcagtagcaagcacgaccacgaaatggaggactgcgataccgagatggaggtggacagcagccaactcaggcgccagctgtgcggtggctcccaggccgcaattgagcgaatgatccatttcggcagagagctgcaggccatgtctgagcagctgcgccgtgactgtgggaagaacaccgcaaacaaaaagatgcttaaggatgcattcagtctacttgcttatagcgacccttggaacagcccagtcggcaatcaacttgatccaatacagcgtgagcccgtgtgttccgctctgaattccgccatcttggagacacataacctgcccaagcagcccccactcgctctggccatggggcaagctacacagtgtttagggctgatggcacggagcgggataggaagctgcgccttcgccaccgtcgaagactacctccattag

SEQ ID NO: 288390 - DNA, 1503 bp, Artificial Sequence
  derived and/or modified sequence
atgggcatcggcctgagcgcccagggcgtgaacatgaacagactgcccggctgggacaagcacagctacggctaccacggcgacgacggccacagcttctgcagcagcggcaccggccagccctacggccccaccttcaccaccggcgacgtgatcggctgctgcgtgaacctgatcaacaacacctgcttctacaccaagaacggccacagcctgggcatcgccttcaccgacctgccccccaacctgtaccccaccgtgggcctgcagacccccggcgaggtggtggacgccaacttcggccagcaccccttcgtgttcgacatcgaggactacatgagagagtggagaaccaagatccaggcccagatcgacagattccccatcggcgacagagagggcgagtggcagaccatgatccagaagatggtgagcagctacctggtgcaccacggctactgcgccaccgccgaggccttcgccagaagcaccgaccagaccgtgctggaggagctggccagcatcaagaacagacagagaatccagaagctggtgctggccggcagaatgggcgaggccatcgagaccacccagcagctgtaccccagcctgctggagagaaaccccaacctgctgttcaccctgaaggtgagacagttcatcgagatggtgaacggcaccgacagcgaggtgagatgcctgggcggcagaagccccaagagccaggacagctaccccgtgagccccagacccttcagcagccccagcatgagccccagccacggcatgaacatccacaacctggccagcggcaagggcagcaccgcccacttcagcggcttcgagagctgcagcaacggcgtgatcagcaacaaggcccaccagagctactgccacagcaacaagcaccagagcagcaacctgaacgtgcccgagctgaacagcatcaacatgagcagaagccagcaggtgaacaacttcaccagcaacgacgtggacatggagaccgaccactacagcaacggcgtgggcgagaccagcagcaacggcttcctgaacggcagcagcaagcacgaccacgagatggaggactgcgacaccgagatggaggtggacagcagccagctgagaagacagctgtgcggcggcagccaggccgccatcgagagaatgatccacttcggcagagagctgcaggccatgagcgagcagctgagaagagactgcggcaagaacaccgccaacaagaagatgctgaaggacgccttcagcctgctggcctacagcgacccctggaacagccccgtgggcaaccagctggaccccatccagagagagcccgtgtgcagcgccctgaacagcgccatcctggagacccacaacctgcccaagcagccccccctggccctggccatgggccaggccacccagtgcctgggcctgatggccagaagcggcatcggcagctgcgccttcgccaccgtggaggactacctgcactag

SEQ ID NO: 288391 - protein, 145 aa, Artificial Sequence
  derived and/or modified sequence
MGVEGTGRGGCRLGGPDGKGKGWAPVDATARLPHPQRLSLPLLQLQPEPCFSLVAQMRPWWSPDYLHSLGKARTAQVQKDARIGEAEAKRDAGIREAKAKQEKVSAQYLSEIEMAKAQRDYELKKAAYDIEVNTRRAQADLAYQL

SEQ ID NO: 288392 - protein, 238 aa, Artificial Sequence
  derived and/or modified sequence
MRPWWSPVKIQGQNKEMLAAACQMFLGKTEAEIAHIALETLEGHQRAIMAHMTVEEIYKDRQKFSEQVFKVASSDLVNMGISVVSYTLKDIHDDQDYLHSLGKARTAQVQKDARIGEAEAKRDAGIREAKAKQEKVSAQYLSEIEMAKAQRDYELKKAAYDIEVNTRRAQADLAYQLQVAKTKQQIEEQRVQVQVVERAQQVAVQEQEIARREKELEARVRKPAEAERYKLERLAEAE

SEQ ID NO: 288393 - protein, 90 aa, Artificial Sequence
  derived and/or modified sequence
  misc_feature (1)..(1): Xaa can be any naturally occurring amino acid
XAKKAEAFQLYQEAAQLDMLLEKLPQVAEEISGPLTSANKITLVSSGSGTMGAAKVTGEVLDILTRLPESVERLTGVSISQVNHKPLRTA

SEQ ID NO: 288394 - protein, 138 aa, Artificial Sequence
  derived and/or modified sequence
VKIQGQNKEMLAAACQMFLGKTEAEIAHIALETLEGHQRAIMAHMTVEEIYKDRQKFSEQVFKVASSDLVNMGISVVSYTLKDIHDDQDYLHSLGKARTAQVQKDARIGEAEAKRDAGIREAKAKQEKVSAQYLSEIE

SEQ ID NO: 288395 - protein, 115 aa, Artificial Sequence
  derived and/or modified sequence
MGVEGTGRGGCRLGGPDGKGKGWAPVDATARLPHPQRLSLPLLQLQPEPCFSLVAQMRPWWSPDYLHSLGKARTAQVQKDARIGEAEAKRDAGIREAKAKQEKVSAQYLSEIEMA

SEQ ID NO: 288396 - protein, 186 aa, Artificial Sequence
  derived and/or modified sequence
VAKTKQQIEEQRVQVQVVERAQQVAVQEQEIARREKELEARVRKPAEAERYKLERLAEAEKSQLIMQAEAEAASVRMRGEAEAFAIGARARAEAEQMAKKAEAFQLYQEAAQLDMLLEKLPQVAEEISGPLTSANKITLVSSGSGTMGAAKVTGEVLDILTRLPESVERLTGVSISQVNHKPLRTA

SEQ ID NO: 288397 - protein, 147 aa, Artificial Sequence
  derived and/or modified sequence
MRPWWSPVKIQGQNKEMLAAACQMFLGKTEAEIAHIALETLEGHQRAIMAHMTVEEIYKDRQKFSEQVFKVASSDLVNMGISVVSYTLKDIHDDQDYLHSLGKARTAQVQKDARIGEAEAKRDAGIREAKAKQEKVSAQYLSEIEMA

SEQ ID NO: 288398 - protein, 115 aa, Artificial Sequence
  derived and/or modified sequence
VKIQGQNKEMLAAACQMFLGKTEAEIAHIALETLEGHQRAIMAHMTVEEIYKDRQKFSEQVFKVASSDLVNMGISVVSYTLKDIHDDQDYLHSLGKARTAQVQKDARIGEAEAKR

SEQ ID NO: 288399 - protein, 357 aa, Artificial Sequence
  derived and/or modified sequence
VKIQGQNKEMLAAACQMFLGKTEAEIAHIALETLEGHQRAIMAHMTVEEIYKDRQKFSEQVFKVASSDLVNMGISVVSYTLKDIHDDQDYLHSLGKARTAQVQKDARIGEAEAKRDAGIREAKAKQEKVSAQYLSEIEMAKAQRDYELKKAAYDIEVNTRRAQADLAYQLQVAKTKQQIEEQRVQVQVVERAQQVAVQEQEIARREKELEARVRKPAEAERYKLERLAEAEKSQLIMQAEAEAASVRMRGEAEAFAIGARARAEAEQMAKKAEAFQLYQEAAQLDMLLEKLPQVAEEISGPLTSANKITLVSSGSGTMGAAKVTGEVLDILTRLPESVERLTGVSISQVNHKPLRTA

SEQ ID NO: 288400 - protein, 286 aa, Artificial Sequence [sequence omitted]

SEQ ID NO: 288401 - DNA, 457 bp, Artificial Sequence
  derived and/or modified sequence
agggaaaagccttagcggacccatgggtgtagaagggacgggccgtggcggatgcagactgggagggcctgacgggaaagggaaaggatgggcccctgtggacgccacagcgcgccttccccatccgcaaaggctttccctccctctcctccagctccagcctgaaccatgtttttcacttgtggcccaaatgaggccatggtggtctccggactatttgcactctttggggaaggctcgaacagctcaagtccaaaaagatgcacggattggagaagcagaggccaagagagatgctgggatccgggaagctaaagccaagcaggaaaaggtgtctgctcagtacctgagtgagatcgagatggccaaggcacagagagattacgaactgaagaaggccgcctatgacatcgaggtcaacacccgccgagcacaggctgacctggcctatcagctt

SEQ ID NO: 288402 - DNA, 856 bp, Artificial Sequence
  derived and/or modified sequence
gatgcagactgggagggcctgacgggaaagggaaaggatgggcccctgtggacgccacagcgcgccttccccatccgcaaaggctttccctccctctcctccagctccagcctgaaccatgtttttcacttgtggcccaaatgaggccatggtggtctccggtaaaaatccaggggcagaacaaggagatgttggcggccgcctgtcagatgttcctggggaagacggaggctgagattgcccacattgccctggagacgttagagggccaccagagggccatcatggcccacatgactgtggaggagatctataaggacaggcagaaattctcagaacaggttttcaaagtggcctcctcagacctggtcaacatgggcatcagtgtggttagctacactctgaaggacattcacgatgaccaggactatttgcactctttggggaaggctcgaacagctcaagtccaaaaagatgcacggattggagaagcagaggccaagagagatgctgggatccgggaagctaaagccaagcaggaaaaggtgtctgctcagtacctgagtgagatcgagatggccaaggcacagagagattacgaactgaagaaggccgcctatgacatcgaggtcaacacccgccgagcacaggctgacctggcctatcagcttcaggtggccaagactaagcagcagattgaggagcagcgggtgcaggtgcaggtggtggagcgggcccagcaggtggcagtgcaggagcaggagatcgcccggcgggagaaggagctggaggcccgggtgcggaagccagcggaagcggagcgctacaagctggagcgcctagccgaggcagagaa

SEQ ID NO: 288403 - DNA, 678 bp, Artificial Sequence
  derived and/or modified sequence
ggccaagaaggcagaagccttccagctgtaccaagaggctgctcagctggacatgctgctagagaagctgccccaggtggcagaggagatcagtggtcccttgacttcagccaataagatcacactggtgtccagcggcagtgggaccatgggggcagccaaagtgactggggaagtactggacattctaactcgcctgccagagagtgtggaaagactcacaggcgtgagcatctcccaggtgaatcacaagcctttgagaacagcctgagccttcagccctcacagatgcccagcctcatagctgaagttgcctgaatgatcctcctgttgcatgtaacccactggcctccctgagcatgtccattgacagtgaggtcccacccctcatctctccttgccaaatagtttgtgccttgtcttgaagggggttgctccccttgccaacctcacactgctatgattgccaactccagcggtcccatgtcagccttctgatgatcccactccaccccacctcaacttatttaacttcctaattaaatcagactgtttgagcctgttgtctagaatattttcctgaccaagactgagggatgggctggaggttttcaactttgctacccaaataaattgctgtaagtaagtactaataaaacagaagcaactggaaattaa

SEQ ID NO: 288404 - DNA, 416 bp, Artificial Sequence
  derived and/or modified sequence
gtaaaaatccaggggcagaacaaggagatgttggcggccgcctgtcagatgttcctggggaagacggaggctgagattgcccacattgccctggagacgttagagggccaccagagggccatcatggcccacatgactgtggaggagatctataaggacaggcagaaattctcagaacaggttttcaaagtggcctcctcagacctggtcaacatgggcatcagtgtggttagctacactctgaaggacattcacgatgaccaggactatttgcactctttggggaaggctcgaacagctcaagtccaaaaagatgcacggattggagaagcagaggccaagagagatgctgggatccgggaagctaaagccaagcaggaaaaggtgtctgctcagtacctgagtgagatcgagat

SEQ ID NO: 288405 - DNA, 367 bp, Artificial Sequence
  derived and/or modified sequence
agggaaaagccttagcggacccatgggtgtagaagggacgggccgtggcggatgcagactgggagggcctgacgggaaagggaaaggatgggcccctgtggacgccacagcgcgccttccccatccgcaaaggctttccctccctctcctccagctccagcctgaaccatgtttttcacttgtggcccaaatgaggccatggtggtctccggactatttgcactctttggggaaggctcgaacagctcaagtccaaaaagatgcacggattggagaagcagaggccaagagagatgctgggatccgggaagctaaagccaagcaggaaaaggtgtctgctcagtacctgagtgagatcgagatggcc

SEQ ID NO: 288406 - DNA, 968 bp, Artificial Sequence
  derived and/or modified sequence
gtggccaagactaagcagcagattgaggagcagcgggtgcaggtgcaggtggtggagcgggcccagcaggtggcagtgcaggagcaggagatcgcccggcgggagaaggagctggaggcccgggtgcggaagccagcggaagcggagcgctacaagctggagcgcctagccgaggcagagaagtcccaactaattatgcaggcggaggcagaagccgcgtctgtgcggatgcgtggggaagctgaggcctttgccataggggcccgagcccgagccgaggctgagcagatggccaagaaggcagaagccttccagctgtaccaagaggctgctcagctggacatgctgctagagaagctgccccaggtggcagaggagatcagtggtcccttgacttcagccaataagatcacactggtgtccagcggcagtgggaccatgggggcagccaaagtgactggggaagtactggacattctaactcgcctgccagagagtgtggaaagactcacaggcgtgagcatctcccaggtgaatcacaagcctttgagaacagcctgagccttcagccctcacagatgcccagcctcatagctgaagttgcctgaatgatcctcctgttgcatgtaacccactggcctccctgagcatgtccattgacagtgaggtcccacccctcatctctccttgccaaatagtttgtgccttgtcttgaagggggttgctccccttgccaacctcacactgctatgattgccaactccagcggtcccatgtcagccttctgatgatcccactccaccccacctcaacttatttaacttcctaattaaatcagactgtttgagcctgttgtctagaatattttcctgaccaagactgagggatgggctggaggttttcaactttgctacccaaataaattgctgtaagtaagtactaataaaacagaagcaactggaaattaa

SEQ ID NO: 288407 - DNA, 581 bp, Artificial Sequence
  derived and/or modified sequence
gatgcagactgggagggcctgacgggaaagggaaaggatgggcccctgtggacgccacagcgcgccttccccatccgcaaaggctttccctccctctcctccagctccagcctgaaccatgtttttcacttgtggcccaaatgaggccatggtggtctccggtaaaaatccaggggcagaacaaggagatgttggcggccgcctgtcagatgttcctggggaagacggaggctgagattgcccacattgccctggagacgttagagggccaccagagggccatcatggcccacatgactgtggaggagatctataaggacaggcagaaattctcagaacaggttttcaaagtggcctcctcagacctggtcaacatgggcatcagtgtggttagctacactctgaaggacattcacgatgaccaggactatttgcactctttggggaaggctcgaacagctcaagtccaaaaagatgcacggattggagaagcagaggccaagagagatgctgggatccgggaagctaaagccaagcaggaaaaggtgtctgctcagtacctgagtgagatcgagatggcc

SEQ ID NO: 288408 - DNA, 547 bp, Artificial Sequence
  derived and/or modified sequence
gtaaaaatccaggggcagaacaaggagatgttggcggccgcctgtcagatgttcctggggaagacggaggctgagattgcccacattgccctggagacgttagagggccaccagagggccatcatggcccacatgactgtggaggagatctataaggacaggcagaaattctcagaacaggttttcaaagtggcctcctcagacctggtcaacatgggcatcagtgtggttagctacactctgaaggacattcacgatgaccaggactatttgcactctttggggaaggctcgaacagctcaagtccaaaaagatgcacggattggagaagcagaggccaagagagatgctgggatccgggaagctaaagccaagcaggaaaaggtgtctgctcagtacctgagtgagatcgagatggccaaggcacagagagattacgaactgaagaaggccgcctatgacatcgaggtcaacacccgccgagcacaggctgacctggcctatcagcttcaggtggccaagactaagcagcagattgaggagcagc

SEQ ID NO: 288409 - DNA, 347 bp, Artificial Sequence
  derived and/or modified sequence
gtaaaaatccaggggcagaacaaggagatgttggcggccgcctgtcagatgttcctggggaagacggaggctgagattgcccacattgccctggagacgttagagggccaccagagggccatcatggcccacatgactgtggaggagatctataaggacaggcagaaattctcagaacaggttttcaaagtggcctcctcagacctggtcaacatgggcatcagtgtggttagctacactctgaaggacattcacgatgaccaggactatttgcactctttggggaaggctcgaacagctcaagtccaaaaagatgcacggattggagaagcagaggccaagagaga

SEQ ID NO: 288410 - DNA, 495 bp, Artificial Sequence
  derived and/or modified sequence
gtaaaaatccaggggcagaacaaggagatgttggcggccgcctgtcagatgttcctggggaagacggaggctgagattgcccacattgccctggagacgttagagggccaccagagggccatcatggcccacatgactgtggaggagatctataaggacaggcagaaattctcagaacaggttttcaaagtggcctcctcagacctggtcaacatgggcatcagtgtggttagctacactctgaaggacattcacgatgaccaggactatttgcactctttggggaaggctcgaacagctcaagtccaaaaagatgcacggattggagaagcagaggccaagagagatgctgggatccgggaagctaaagccaagcaggaaaaggtgtctgctcagtacctgagtgagatcgagatggccaaggcacagagagattacgaactgaagaaggccgcctatgacatcgaggtcaacacccgccgagcacaggctgac

SEQ ID NO: 288411 - DNA, 246 bp, Artificial Sequence
  derived and/or modified sequence
gactatttgcactctttggggaaggctcgaacagctcaagtccaaaaagatgcacggattggagaagcagaggccaagagagatgctgggatccgggaagctaaagccaagcaggaaaaggtgtctgctcagtacctgagtgagatcgagatggccaaggcacagagagattacgaactgaagaaggccgcctatgacatcgaggtcaacacccgccgagcacaggctgacctggcctatcagctt

SEQ ID NO: 288412 - DNA, 182 bp, Artificial Sequence
  derived and/or modified sequence
gtggccaagactaagcagcagattgaggagcagcgggtgcaggtgcaggtggtggagcgggcccagcaggtggcagtgcaggagcaggagatcgcccggcgggagaaggagctggaggcccgggtgcggaagccagcggaagcggagcgctacaagctggagcgcctagccgaggcagagaa

SEQ ID NO: 288413 - DNA, 1481 bp, Artificial Sequence
  derived and/or modified sequence
gtaaaaatccaggggcagaacaaggagatgttggcggccgcctgtcagatgttcctggggaagacggaggctgagattgcccacattgccctggagacgttagagggccaccagagggccatcatggcccacatgactgtggaggagatctataaggacaggcagaaattctcagaacaggttttcaaagtggcctcctcagacctggtcaacatgggcatcagtgtggttagctacactctgaaggacattcacgatgaccaggactatttgcactctttggggaaggctcgaacagctcaagtccaaaaagatgcacggattggagaagcagaggccaagagagatgctgggatccgggaagctaaagccaagcaggaaaaggtgtctgctcagtacctgagtgagatcgagatggccaaggcacagagagattacgaactgaagaaggccgcctatgacatcgaggtcaacacccgccgagcacaggctgacctggcctatcagcttcaggtggccaagactaagcagcagattgaggagcagcgggtgcaggtgcaggtggtggagcgggcccagcaggtggcagtgcaggagcaggagatcgcccggcgggagaaggagctggaggcccgggtgcggaagccagcggaagcggagcgctacaagctggagcgcctagccgaggcagagaagtcccaactaattatgcaggcggaggcagaagccgcgtctgtgcggatgcgtggggaagctgaggcctttgccataggggcccgagcccgagccgaggctgagcagatggccaagaaggcagaagccttccagctgtaccaagaggctgctcagctggacatgctgctagagaagctgccccaggtggcagaggagatcagtggtcccttgacttcagccaataagatcacactggtgtccagcggcagtgggaccatgggggcagccaaagtgactggggaagtactggacattctaactcgcctgccagagagtgtggaaagactcacaggcgtgagcatctcccaggtgaatcacaagcctttgagaacagcctgagccttcagccctcacagatgcccagcctcatagctgaagttgcctgaatgatcctcctgttgcatgtaacccactggcctccctgagcatgtccattgacagtgaggtcccacccctcatctctccttgccaaatagtttgtgccttgtcttgaagggggttgctccccttgccaacctcacactgctatgattgccaactccagcggtcccatgtcagccttctgatgatcccactccaccccacctcaacttatttaacttcctaattaaatcagactgtttgagcctgttgtctagaatattttcctgaccaagactgagggatgggctggaggttttcaactttgctacccaaataaattgctgtaagtaagtactaataaaacagaagcaactggaaattaa

SEQ ID NO: 288414 - DNA, 695 bp, Artificial Sequence
  derived and/or modified sequence
gtaaaaatccaggggcagaacaaggagatgttggcggccgcctgtcagatgttcctggggaagacggaggctgagattgcccacattgccctggagacgttagagggccaccagagggccatcatggcccacatgactgtggaggagatctataaggacaggcagaaattctcagaacaggttttcaaagtggcctcctcagacctggtcaacatgggcatcagtgtggttagctacactctgaaggacattcacgatgaccaggactatttgcactctttggggaaggctcgaacagctcaagtccaaaaagatgcacggattggagaagcagaggccaagagagatgctgggatccgggaagctaaagccaagcaggaaaaggtgtctgctcagtacctgagtgagatcgagatggccaaggcacagagagattacgaactgaagaaggccgcctatgacatcgaggtcaacacccgccgagcacaggctgacctggcctatcagcttcaggtggccaagactaagcagcagattgaggagcagcgggtgcaggtgcaggtggtggagcgggcccagcaggtggcagtgcaggagcaggagatcgcccggcgggagaaggagctggaggcccgggtgcggaagccagcggaagcggagcgctacaagctggagcgcctagccgaggcagagaa

SEQ ID NO: 288415 - DNA, 1199 bp, Artificial Sequence
  derived and/or modified sequence
aggagatctataaggacaggcagaaattctcagaacaggttttcaaagtggcctcctcagacctggtcaacatgggcatcagtgtggttagctacactctgaaggacattcacgatgaccaggactatttgcactctttggggaaggctcgaacagctcaagtccaaaaagatgcacggattggagaagcagaggccaagagagatgctgggatccgggaagctaaagccaagcaggaaaaggtgtctgctcagtacctgagtgagatcgagatggccaaggcacagagagattacgaactgaagaaggccgcctatgacatcgaggtcaacacccgccgagcacaggctgacctggcctatcagcttcaggtggccaagactaagcagcagattgaggagcagcgggtgcaggtgcaggtggtggagcgggcccagcaggtggcagtgcaggagcaggagatcgcccggcgggagaaggagctggaggcccgggtgcggaagccagcggaagcggagcgctacaagctggagcgcctagccgaggcagagaagtcccaactaattatgcaggcggaggcagaagccgcgtctgtgcggatgcgtggggaagctgaggcctttgccataggggcccgagcccgagccgaggctgagcagatggccaagaaggcagaagccttccagctgtaccaagaggctgctcagctggacatgctgctagagaagctgccccaggtggcagaggagatcagtggtcccttgacttcagccaataagatcacactggtgtccagcggcagtgggaccatgggggcagccaaagtgactggggaagtactggacattctaactcgcctgccagagagtgtggaaagactcacaggcgtgagcatctcccaggtgaatcacaagcctttgagaacagcctgagccttcagccctcacagatgcccagcctcatagctgaagttgcctgaatgatcctcctgttgcatgtaacccactggcctccctgagcatgtccattgacagtgaggtcccacccctcatctctccttgccaaatagtttgtgccttgtcttgaagggggttgctccccttgccaacctcacactgctatgattgccaactccagcggtcccatgtcagccttctgatgatcccactccaccccacctcaacttatttaacttccta

SEQ ID NO: 288416 - DNA, 438 bp, Artificial Sequence
  derived and/or modified sequence
atgggagtcgaggggaccggccggggaggatgtcgtctgggcggcccagatggaaagggtaagggttgggctcctgtagatgcgaccgcacggctgccccacccccaacgcctcagtctgcctctgctccagctgcaacctgaaccatgtttctccttagtggcacaaatgaggccctggtggtcaccagactacttacactctctgggaaaggctcggacagctcaagtgcagaaagacgctaggatcggcgaagccgaggcaaagagggatgcaggaatccgcgaggcgaaagcaaagcaagagaaggtgagcgctcagtacctgtctgaaatcgaaatggccaaagctcagagggattatgagctgaagaaggccgcctatgacatcgaagtcaatactcggagagctcaagccgacctagcctatcaattgtag

SEQ ID NO: 288417 - DNA, 717 bp, Artificial Sequence
  derived and/or modified sequence
atgagaccttggtggtctcctgtgaaaatccagggacagaacaaggaaatgctcgccgccgcttgccagatgtttttgggcaaaactgaagcggagattgcacacattgctctagagacgctcgaagggcaccagcgcgcaatcatggctcatatgaccgtcgaggaaatctacaaagaccgccaaaaattcagcgaacaagtgttcaaggtggcctcatcggatctagtcaatatgggtatcagcgtggtgagctacacacttaaggacattcacgacgaccaggattacttgcatagcctcggcaaggcgagaacggctcaagtgcagaaggacgcccgaatcggcgaggcagaggccaagcgcgacgcggggattagggaagctaaggctaagcaggagaaggtgtccgcacagtatctaagcgagatcgagatggcaaaagcccagagagactatgagcttaagaaggctgcatacgacattgaagtaaatactaggcgggcgcaggctgatctggcctaccagctccaggtggccaaaacaaagcaacagatcgaagaacagcgtgttcaggtgcaggtggtcgagcgcgctcagcaagtggcggtgcaggaacaagagatcgcaagacgagagaaagagcttgaagcacgggtccggaaaccggccgaggcggaacggtataagcttgagagacttgcggaagctgaatag

SEQ ID NO: 288418 - DNA, 438 bp, Artificial Sequence
  derived and/or modified sequence
atgggcgtagaggggaccggcaggggtggctgcaggctaggtggcccggacggcaaagggaaaggttgggcaccggtcgatgcaaccgctagactcccccatccacagcgactgtctctgccattgctgcagcttcagccagagccctgtttcagcctcgtggcccagatgcggccctggtggagcccagactacctgcacagtctcgggaaggctcggactgctcaggtgcagaaggacgcgagaattggcgaggcagaggctaaacgggatgccggaattcgggaggccaaggcaaaacaggagaaggtgtccgcacagtacctgtcagaaatcgagatggcaaaggctcagcgtgattatgaattaaagaaagcagcctacgatattgaagtgaataccagaagggcccaggctgatctggcttatcaactgtag

SEQ ID NO: 288419 - DNA, 273 bp, Artificial Sequence
  derived and/or modified sequence
taggccaagaaagccgaagcctttcagttataccaggaagcggcccaactcgacatgctgctggaaaagcttcctcaggtggcagaggaaatttccggtcccttgaccagtgcaaacaagattaccctcgtgagttcagggtctgggactatgggagcagcaaaggtcactggtgaagtgctggatatcctaacaagactgcccgaatcagtcgagagattaactggagtgagtatcagccaggtaaatcataaaccgctgcgaaccgcctag

SEQ ID NO: 288420 - DNA, 717 bp, Artificial Sequence
  derived and/or modified sequence
atgcgaccatggtggtcacctgtcaagatccaagggcaaaataaagagatgcttgccgccgcctgtcaaatgtttctcggtaaaacagaggccgagatagcgcacatagctctggagacacttgagggccaccagcgcgccatcatggcgcacatgaccgtggaggagatttacaaagataggcagaaattcagcgagcaggtgtttaaagtggctagcagtgatctcgtcaacatgggcatctctgtggtatcgtatacactcaaggatattcacgatgatcaggactacctgcacagtctgggaaaggcaaggactgcacaggttcagaaggatgcaagaattggagaggcagaggccaagcgcgatgctgggattcgggaagctaaggctaagcaggaaaaggttagtgctcagtacttatccgagatcgaaatggcaaaagctcagcgcgactacgagctcaaaaaggccgcctacgacatcgaagttaacacccgccgggcccaggccgacctggcttatcaacttcaggtcgccaaaactaagcagcagattgaggagcaacgcgttcaggtccaggtcgtggagcgggcacagcaagtagccgtccaggagcaagaaattgcgcgccgggagaaggagctcgaagctagggtgcggaagcccgctgaggccgagcgctataaactggagaggttggccgaggccgaatag

SEQ ID NO: 288421 - DNA, 417 bp, Artificial Sequence
  derived and/or modified sequence
gtgaaaatccagggacagaacaaggaaatgctagcggcagcctgccagatgtttttgggtaagaccgaagctgaaatagcacatattgcactggaaaccctagaagggcaccagcgcgctattatggctcacatgacggtggaagagatttataaagacagacaaaagttttcagaacaagtttttaaggtggcctcgagtgaccttgtgaatatgggcatcagcgtcgttagctacactctgaaggatattcatgatgaccaggattatctgcattctctgggcaaggctagaacagcccaggtccagaaagacgcacggatcggtgaggccgaggccaagagggatgcaggcattcgagaggctaaagctaagcaagaaaaggtctcggcccagtaccttagtgagattgaatag

SEQ ID NO: 288422 - DNA, 348 bp, Artificial Sequence
  derived and/or modified sequence
atgggagtggaagggacaggacggggcggctgtaggctcggaggcccagatgggaagggtaaagggtgggcaccagtcgatgcaaccgcccgacttccccatccccaacgtcttagcctgcccctgttacagttgcagcccgagccctgcttcagcctggtggcccagatgcgaccgtggtggtcccctgattatttacacagtctgggtaaggctcgaacagcccaggttcagaaggatgcacgaatcggcgaggcagaagccaagagggatgctggtatccgcgaggcaaaggctaaacaggaaaaggtgtccgctcagtatctctccgagatcgagatggcatag

SEQ ID NO: 288423 - DNA, 561 bp, Artificial Sequence
  derived and/or modified sequence
gtggctaagactaagcaacagattgaggaacagagagtgcaagtccaggtcgtcgaacgtgctcagcaggtggccgtccaggagcaagaaattgccagaagggagaaagaactagaggcccgcgtgcgtaaacctgccgaagcggaacggtataagctggagcgcctcgcggaggcggagaaatctcagctgattatgcaggcagaagcagaggcggctagcgtgcgaatgagaggagaagctgaagctttcgctatcggggcccgcgcaagagccgaggcagagcagatggcaaagaaggccgaggcttttcagctttaccaagaagcggctcagctggacatgctgctggagaaacttccacaagtcgccgaagaaatcagtggcccacttacctctgcgaacaagatcacgttggtgagtagcgggtcaggaaccatgggtgccgccaaagttaccggtgaggttctggatatccttaccagactgccagagagcgtcgagcgattgaccggtgtgtctatttcacaggtcaaccacaaaccattacgcaccgcatag

SEQ ID NO: 288424 - DNA, 438 bp, Artificial Sequence
  derived and/or modified sequence
atgggagtggagggaaccgggcggggtggttgcaggctggggggacccgatggcaagggcaagggctgggcgcccgtggacgctactgctcgtctgccccatccacagaggctgtccctgcccctcttacagctgcagcctgaaccctgctttagtctggtcgcccagatgagaccctggtggagccctgactacctgcacagtctgggcaaggctcggactgcgcaggtccaaaaagacgccagaatcggcgaggccgaggcgaagagggacgcgggaattcgcgaggccaaagccaaacaggagaaagtcagcgcacagtatctgtccgagattgagatggccaaggctcaacgagactatgagctaaagaaagctgcttacgatatagaagtcaatactagaagagctcaagctgacctcgcttatcagctttag

SEQ ID NO: 288425 - DNA, 444 bp, Artificial Sequence
  derived and/or modified sequence
atgcgcccctggtggagtccagtgaaaatacagggccagaacaaagagatgctagccgccgcatgccaaatgtttctaggaaagaccgaggccgagattgcccacattgccttggaaacactggaggggcaccaaagagctataatggctcacatgactgtggaggagatctataaggaccggcagaaattcagtgagcaggtgtttaaggtggcgtcgtcagatcttgtcaacatgggcatcagcgttgtcagttacacgctaaaggacatccacgacgaccaggactatctgcactctttgggtaaggctcgcactgcccaggtgcagaaagacgcacgcatcggcgaagcggaagctaaaagggacgcagggattagggaggcaaaggcaaagcaggagaaggtatcagcccagtaccttagcgaaattgagatggcttag

SEQ ID NO: 288426 - DNA, 549 bp, Artificial Sequence
  derived and/or modified sequence
gttaagattcagggccagaacaaagagatgctggcagctgcctgtcagatgttcctcggcaagaccgaagcagaaattgcccacatagcgctggaaacacttgaagggcaccagcgtgcgatcatggcacatatgactgtcgaggagatctacaaagatagacagaaattttctgagcaggttttcaaggtggcatcgagcgatctggtgaacatggggatctctgtggtttcatatacacttaaggacattcacgatgatcaggactatctgcatagcctgggaaaggcccggactgcccaggtgcagaaggatgccagaattggagaggcagaagccaagcgcgacgcaggcatccgagaggccaaagctaagcaggagaaagtgtcagcgcaatatttgtccgagatcgaaatggctaaagcccagagagactacgagctgaagaaagccgcctatgatatagaagtgaacacccggcgcgctcaggctgacctagcttatcagttacaggtcgccaaaacgaagcagcagatcgaggaacagtag

SEQ ID NO: 288427 - DNA, 348 bp, Artificial Sequence
  derived and/or modified sequence
gtgaaaattcagggacagaacaaggagatgctcgcagccgcgtgtcaaatgttcctgggtaagactgaggcagaaattgctcatattgctctcgaaacactagagggtcaccagagagctattatggctcacatgaccgtcgaggagatttacaaagataggcagaagtttagtgagcaggtcttcaaggtggcctcttcggatctggtgaacatggggatctcagtggtttcttacacactgaaagacatccacgatgaccaggattacttgcactcactggggaaagcacgcactgcccaagtgcagaaagacgcgcgtatcggggaggccgaagctaaaagatag

SEQ ID NO: 288428 - DNA, 498 bp, Artificial Sequence
  derived and/or modified sequence
gtcaagatccaaggccagaataaagaaatgttggctgcagcctgccagatgtttcttggcaagacagaggcagagattgcccacatcgccttggaaacactggagggccaccagagggctattatggcccatatgacagttgaggaaatctataaagaccgccagaaattctccgaacaggtatttaaagttgcatcaagtgatctcgtgaacatgggcattagcgtggtgtcctacaccctgaaggatattcatgacgaccaagactacctgcacagcctaggtaaagcccgtactgcgcaagtccaaaaggatgccaggatcggcgaagccgaagccaagcgggatgccggcatccgcgaagctaaggctaagcaggaaaaagtcagcgcccaatacctgagcgagatagaaatggccaaggctcagagggactacgaattgaaaaaggccgcctacgacatcgaagtgaatactcgtcgagcccaggccgactag

SEQ ID NO: 288429 - DNA, 438 bp, Artificial Sequence
  derived and/or modified sequence
atgggggtagaggggaccggccgcggaggctgcagacttggaggccccgatgggaagggcaaaggttgggcacctgtggacgctactgctcgactcccccaccctcagcggctgtccctccccttgttgcagctacagcctgagccatgtttttcactcgttgcgcaaatgcgtccttggtggtcccccgattacctgcacagtctcggcaaggcaagaacagcacaagttcaaaaggacgcacgcatcggtgaagcagaggcaaaaagagacgcaggcatcagggaagctaaagcaaaacaagaaaaagtctctgcgcagtacctaagcgagatcgaaatggctaaggcccagagagactacgagctgaaaaaggctgcctacgacatcgaggtgaatactcgccgagcccaggccgatctagcatatcagctgtag

SEQ ID NO: 288430 - DNA, 249 bp, Artificial Sequence
  derived and/or modified sequence
gactacttacattcactgggaaaggccaggacagctcaagtccaaaaggacgccaggatcggtgaggccgaggctaaacgagacgcgggcataagggaagcgaaggccaaacaggaaaaagtgagcgcccagtacttatctgagatcgagatggccaaagcacagagggactatgagctgaagaaggcggcatatgacatcgaggttaacacaaggcgggcccaggctgatctggcataccagctgtag

SEQ ID NO: 288431 - DNA, 717 bp, Artificial Sequence
  derived and/or modified sequence
atgcggccatggtggtcacccgttaagattcagggccagaacaaggaaatgctggcggcggcatgccagatgttcctcggtaagacagaagcagaaatcgctcacattgccctagaaacactggaaggtcatcaacgcgccatcatggcgcatatgacagttgaggagatttataaagatcgtcaaaagtttagtgagcaggttttcaaggtcgcatcctccgacttagtgaacatgggcatctctgtggtgtcttacacactcaaggacattcacgatgaccaagactacctccactcactgggcaaggcaagaacagctcaggttcagaaggatgccagaattggcgaagccgaagcaaagagagacgcgggaatccgggaggcaaaggcaaaacaagaaaaggtctcagcacagtatctgtcggagattgaaatggctaaagcgcaacgggactacgagcttaagaaagccgcgtacgatatcgaggtgaacactcggcgcgcacaggcagatctggcctatcagcttcaggttgcgaaaaccaaacagcagatcgaagagcagcgggtgcaggtgcaagtagtagagcgcgctcaacaagtggcagttcaggagcaagaaatagcgcgacgggagaaggaactggaggctcgtgtgcggaagcctgcagaagccgagcgatacaagctggagagattggccgaagccgaatag

SEQ ID NO: 288432 - DNA, 183 bp, Artificial Sequence
  derived and/or modified sequence
gtggctaagacaaagcagcaaatcgaagagcaaagagtgcaggttcaggtggtggaacgcgcccagcaggttgcggtccaagaacaggagatcgcccgcagagagaaggagctagaggcccgtgtgagaaagcctgccgaagccgagcgctataaacttgagaggcttgctgaggccgagtag

SEQ ID NO: 288433 - DNA, 717 bp, Artificial Sequence
  derived and/or modified sequence
atgagaccctggtggtcacctgtgaaaattcagggccagaacaaggaaatgcttgcagccgcttgtcaaatgttcctgggtaagactgaagcagagatcgctcacatcgctcttgagaccctcgagggccatcagcgagcaattatggctcatatgaccgtggaggagatatacaaggaccggcagaagttttccgagcaagtgttcaaagtggcatcaagtgatctcgtgaacatgggaataagcgtggtctcttacacactgaaggacatccacgacgaccaggattacctgcattcattggggaaagcccgtacggctcaagtccagaaagatgcccgcattggtgaagcagaggctaagagagatgccgggattcgcgaggcaaaagccaaacaagagaaggtctcggctcaatatctctcagaaatcgagatggccaaagctcagagagactacgagctcaaaaaagctgcatacgacatcgaggtgaatacccgcagggctcaggcggacctagcataccagctgcaggtagccaaaaccaagcagcagatcgaggagcaaagagtccaggttcaggtggtggaaagagcgcagcaagtggccgttcaagagcaagaaatcgctcggcgcgagaaagagctggaagccagggtgcggaaacccgctgaagctgaaaggtataaattggagagactggccgaagccgagtag

SEQ ID NO: 288434 - DNA, 1074 bp, Artificial Sequence
  derived and/or modified sequence
gtgaaaatccaaggccaaaataaagagatgctcgccgcagcgtgtcagatgtttctcggcaaaactgaggccgagattgcccacatcgccctggagactcttgaggggcaccaacgagcaatcatggcgcacatgacagtggaagagatttataaagaccgccagaaatttagcgagcaggttttcaaggtcgcaagttccgaccttgtaaacatgggaatatccgtagtctcgtataccctcaaagacatacatgacgaccaggactacctgcactcgctgggaaaggctaggactgcgcaggtgcagaaggacgcacgcataggtgaggcagaagccaagcgagacgcagggattagggaggctaaggccaaacaggaaaaggtgagcgcacagtacttatccgaaatagagatggccaaggcccagcgagactacgagcttaaaaaagccgcctatgacatagaagtaaacaccagacgagcccaggcagatctcgcctatcagctgcaagtggccaagaccaaacagcagatcgaggaacagagagtacaggtccaagtggtagaacgtgcccaacaggtggccgttcaggagcaggaaattgcccggagggagaaggaactggaggcccgggttcgaaaacccgccgaagccgagcgttacaagttagagaggctggcagaagcggagaagtcacaactaattatgcaggccgaagccgaagccgcctccgttagaatgaggggcgaggcagaagccttcgcgatcggagcacgcgcgcgagctgaggcagaacagatggcaaagaaggccgaagctttccaactgtaccaagaggcagcccagctcgacatgctccttgagaagcttccgcaggtggcagaagaaataagtggccccttgaccagcgccaacaagattacactggtgtcatccggaagtgggaccatgggggccgccaaagtcactggagaggttcttgatatcctgactcgcctgccggagtccgtggagagacttaccggagtctccatttcccaggtcaaccataagccactccgcacagcctag

SEQ ID NO: 288435 - DNA, 438 bp, Artificial Sequence
  derived and/or modified sequence
atgggcgtggaggggaccggcaggggcgggtgcagattgggaggacccgacggaaagggcaaagggtgggcccccgttgacgcaacagcccgtcttccccaccctcagcgactctccctgccattactgcaacttcagcccgagccgtgctttagcctggtggcccaaatgcgcccctggtggtcccccgattacctgcattcactcggcaaggcccggacagcccaggtccagaaagatgccaggattggggaagctgaggctaagcgggacgctggtatcagggaggccaaagcgaaacaggaaaaggtctctgcgcagtatctgagtgagattgagatggcaaaggcccaacgcgattacgagcttaagaaggctgcttatgacatagaggtaaatacccgtagggctcaagccgatttggcgtatcagctttag

SEQ ID NO: 288436 - DNA, 717 bp, Artificial Sequence
  derived and/or modified sequence
atgcggccctggtggtcgcccgtgaaaatccagggacaaaacaaggaaatgcttgcagccgcatgtcagatgttcctgggaaaaacagaggctgaaatagcccatatagccctagagactctcgaggggcaccagagggctataatggcacacatgaccgtcgaggaaatatataaggatcggcagaagttttcagagcaagtgttcaaagtcgcatcctcggacctcgtcaatatgggtatctccgtggtgtcgtacacactcaaagacattcacgatgatcaggactatctccactctttggggaaagcgcgcactgcccaggtccaaaaggacgcacgtattggcgaggctgaggccaaaagggacgctggaattcgtgaagctaaggctaagcaagagaaagtttcagctcagtatctgtcagaaattgaaatggcaaaagcccaaagggactacgaattgaaaaaggccgcctacgacatcgaagtcaatactcgaagagcccaggctgatctggcatatcaactgcaagttgctaaaacaaaacaacaaattgaggagcagcgtgtgcaggtccaggttgtagagagggcacagcaggtggccgtccaggaacaggagatcgcccggcgagaaaaggaactcgaagcgagggtgcgcaagcccgcagaagcagagaggtataagctggagcggttggcagaggcagagtag

SEQ ID NO: 288437 - DNA, 696 bp, Artificial Sequence
  derived and/or modified sequence
gtaaagatccagggccagaataaagaaatgttggctgcagcctgtcaaatgtttttgggaaaaaccgaggccgaaatcgctcacatcgccctggagacactagagggtcaccaacgtgccataatggcccatatgactgtggaagaaatatacaaggacagacagaagttcagcgagcaggtttttaaggtggcctcgagcgacttggtcaacatgggtatatccgtcgtgagctacactcttaaggatatccacgacgatcaagattatctccacagtctaggtaaagcgaggaccgcacaggtgcagaaagatgcccggatcggagaggccgaggccaaaagggatgcaggaattcgagaagccaaagcaaagcaggaaaaggtgagtgcccagtatttaagcgagatagaaatggctaaagctcaaagagactatgagctgaaaaaggccgcatacgatattgaagtgaacacaaggcgcgcccaagccgacctagcttaccaactgcaggtggcaaagacgaagcagcagatcgaggagcaaagagtgcaggttcaggtggtcgaacgcgcccaacaggtggccgtgcaggaacaagagatcgctcgacgggagaaggaactggaagcacgtgttcgcaaacctgctgaggccgaacgctacaaactggaacgcctcgctgaggccgaatag

SEQ ID NO: 288438 - DNA, 861 bp, Artificial Sequence
  derived and/or modified sequence
atgggcatcagcgtggtgagctacactctcaaagacatccacgatgaccaggattacttacacagcctggggaaagctaggaccgcccaagtgcagaaggacgccagaattggggaggctgaggcaaagagggatgctgggatacgggaggccaaagcgaagcaggaaaaggtgtcagcgcagtatctgtctgagattgaaatggcaaaggcacagcgagattacgaactaaaaaaggctgcctatgacatcgaggtgaatactcggcgagctcaggcggaccttgcctatcagttgcaggtggccaagacgaagcagcagatcgaggagcagcgggtgcaggttcaggtcgtggagcgggcccagcaggtagcagttcaggaacaagagatcgctcgaagggagaaggagctcgaggcacgcgtccggaagcctgctgaggccgagcgttacaagttagaacggctcgctgaagcagagaagtcccagttaatcatgcaggccgaggctgaagcggcttccgtaagaatgcgcggggaggccgaagcatttgccatcggagctagagcaagggctgaagctgagcagatggccaaaaaggccgaggctttccagctctatcaggaagccgctcagctcgacatgcttcttgagaagttgccccaggtcgcggaggaaatctctggcccactgactagcgccaataaaatcactctggtgagctcggggtcgggtacgatgggggcagccaaggtcacaggtgaggttctcgatatcctgacacgcctccccgaaagcgtggagaggctgactggggtcagcatctctcaggtcaatcacaaacccttgagaactgcatag

SEQ ID NO: 288439 - DNA, 438 bp, Artificial Sequence
  derived and/or modified sequence
atgggcgtggagggcaccggccggggcggctgccgcctgggcggcccagatggcaagggcaagggctgggcccctgtggatgccacagcccggctgccccacccccagaggctgagcctgcccctgctgcagctgcagcctgagccctgcttcagcctggtggcccagatgaggccctggtggagcccagactacctgcacagcctgggcaaggccaggacagcccaggtgcagaaggatgccagaattggagaggccgaggccaagagagatgctggcatccgggaggccaaggccaagcaggagaaggtgtctgcccagtacctgtctgaaattgagatggccaaggcccagagggactatgagctgaagaaggccgcctatgacatcgaggtgaacacccggcgggcccaggccgacctggcctaccagctgtag

SEQ ID NO: 288440 - DNA, 717 bp, Artificial Sequence
  derived and/or modified sequence
atgaggccctggtggagccctgtgaagatccagggccagaacaaggagatgctggccgccgcctgccagatgttcctgggcaagacagaagctgagatcgcccacatcgccctggagaccctggagggccaccagagggccatcatggcccacatgacagtggaggagatctacaaggaccggcagaagttcagcgagcaggtgttcaaggtggccagcagtgacctggtgaacatgggcatctctgtggtgtcctacaccctgaaggacatccatgatgaccaggactacctgcacagcctgggcaaggccaggacagcccaggtgcagaaggatgccagaattggagaggccgaggccaagagagatgctggcatccgggaggccaaggccaagcaggagaaggtgtctgcccagtacctgtctgaaattgagatggccaaggcccagagggactatgagctgaagaaggccgcctatgacatcgaggtgaacacccggcgggcccaggccgacctggcctaccagctgcaggtggccaagaccaagcagcagatcgaggagcagagggtgcaggtgcaggtggtggagcgggcccagcaggtggccgtgcaggagcaggagatcgcccggcgggagaaggagctggaggcccgggtgaggaagccagctgaggccgagcgctacaagctggagcggctggccgaggccgagtag

SEQ ID NO: 288441 - DNA, 273 bp, Artificial Sequence
  derived and/or modified sequence
tgagccaagaaggccgaggccttccagctgtaccaggaggccgcccagctggacatgctgctggagaagctgccccaggtggccgaggagatcagcggccccctgaccagcgccaacaagatcaccctggtgagcagcggcagcggcaccatgggcgccgccaaggtgactggagaggtgctggacatcctgacccggctgcctgagagcgtggagcggctgactggagtgtccatcagccaggtgaaccacaagcccctgaggacagcctag

SEQ ID NO: 288442 - DNA, 417 bp, Artificial Sequence
  derived and/or modified sequence
gtgaagatccagggccagaacaaggagatgctggccgccgcctgccagatgttcctgggcaagacagaggccgagatcgcccacatcgccctggagaccctggagggccaccagagggccatcatggcccacatgacagtggaggagatctacaaggaccggcagaagttcagcgagcaggtgttcaaggtggccagcagtgacctggtgaacatgggcatctctgtggtgtcctacaccctgaaggacatccatgatgaccaggactacctgcacagcctgggcaaggccaggacagcccaggtgcagaaggatgcccgcatcggggaggccgaggccaagagagatgctggcatccgggaggccaaggccaagcaggagaaggtgtctgcccagtacctgtctgaaattgaatag

SEQ ID NO: 288443 - DNA, 348 bp, Artificial Sequence
  derived and/or modified sequence
atgggcgtggagggcaccggccggggcggctgccgcctgggcggcccagatggcaagggcaagggctgggcccctgtggatgccacagcccggctgccccacccccagaggctgagcctgcccctgctgcagctgcagcctgagccctgcttcagcctggtggcccagatgaggccctggtggagcccagactacctgcacagcctgggcaaggccaggacagcccaggtgcagaaggatgccagaattggagaggccgaggccaagagagatgctggcatccgggaggccaaggccaagcaggagaaggtgtctgcccagtacctgtctgaaattgagatggcctag

SEQ ID NO: 288444 - DNA, 561 bp, Artificial Sequence
  derived and/or modified sequence
gtggccaagaccaagcagcagatcgaggagcagagggtgcaggtgcaggtggtggagcgggcccagcaggtggccgtgcaggagcaggagatcgcccggcgggagaaggagctggaggcccgggtgaggaagccagctgaggccgagcgctacaagctggagcggctggccgaggccgagaagagccagctgatcatgcaggccgaggccgaggccgcctctgtgaggatgagaggagaggccgaggcctttgccatcggggcccgggcccgggcagaggccgagcagatggccaagaaggccgaggccttccagctgtaccaggaggccgcccagctggacatgctgctggagaagctgccccaggtggccgaggagatcagcggccccctgaccagcgccaacaagatcaccctggtgagcagcggcagcggcaccatgggcgccgccaaggtgactggagaggtgctggacatcctgacccggctgcctgagagcgtggagcggctgactggagtgtccatcagccaggtgaaccacaagcccctgaggacagcctag

SEQ ID NO: 288445 - DNA, 444 bp, Artificial Sequence
  derived and/or modified sequence
atgaggccctggtggagccctgtgaagatccagggccagaacaaggagatgctggccgccgcctgccagatgttcctgggcaagacagaagctgagatcgcccacatcgccctggagaccctggagggccaccagagggccatcatggcccacatgacagtggaggagatctacaaggaccggcagaagttcagcgagcaggtgttcaaggtggccagcagtgacctggtgaacatgggcatctctgtggtgtcctacaccctgaaggacatccatgatgaccaggactacctgcacagcctgggcaaggccaggacagcccaggtgcagaaggatgccagaattggagaggccgaggccaagagagatgctggcatccgggaggccaaggccaagcaggagaaggtgtctgcccagtacctgtctgaaattgagatggcctag

SEQ ID NO: 288446 - DNA, 549 bp, Artificial Sequence
  derived and/or modified sequence
gtgaagatccagggccagaacaaggagatgctggccgccgcctgccagatgttcctgggcaagacagaggccgagatcgcccacatcgccctggagaccctggagggccaccagagggccatcatggcccacatgacagtggaggagatctacaaggaccggcagaagttcagcgagcaggtgttcaaggtggccagcagtgacctggtgaacatgggcatctctgtggtgtcctacaccctgaaggacatccatgatgaccaggactacctgcacagcctgggcaaggccaggacagcccaggtgcagaaggatgcccgcatcggggaggccgaggccaagagagatgctggcatccgggaggccaaggccaagcaggagaaggtgtctgcccagtacctgtctgaaattgagatggccaaggcccagagggactatgagctgaagaaggccgcctatgacatcgaggtgaacacccggcgggcccaggccgacctggcctaccagctgcaggtggccaagaccaagcagcagatcgaggagcagtag

SEQ ID NO: 288447 - DNA, 348 bp, Artificial Sequence
  derived and/or modified sequence
gtgaagatccagggccagaacaaggagatgctggccgccgcctgccagatgttcctgggcaagacagaggccgagatcgcccacatcgccctggagaccctggagggccaccagagggccatcatggcccacatgacagtggaggagatctacaaggaccggcagaagttcagcgagcaggtgttcaaggtggccagcagtgacctggtgaacatgggcatctctgtggtgtcctacaccctgaaggacatccatgatgaccaggactacctgcacagcctgggcaaggccaggacagcccaggtgcagaaggatgcccgcatcggggaggccgaggccaagaggtag

SEQ ID NO: 288448 - DNA, 498 bp, Artificial Sequence
  derived and/or modified sequence
gtgaagatccagggccagaacaaggagatgctggccgccgcctgccagatgttcctgggcaagacagaggccgagatcgcccacatcgccctggagaccctggagggccaccagagggccatcatggcccacatgacagtggaggagatctacaaggaccggcagaagttcagcgagcaggtgttcaaggtggccagcagtgacctggtgaacatgggcatctctgtggtgtcctacaccctgaaggacatccatgatgaccaggactacctgcacagcctgggcaaggccaggacagcccaggtgcagaaggatgcccgcatcggggaggccgaggccaagagagatgctggcatccgggaggccaaggccaagcaggagaaggtgtctgcccagtacctgtctgaaattgagatggccaaggcccagagggactatgagctgaagaaggccgcctatgacatcgaggtgaacacccggcgggcccaggccgactag

SEQ ID NO: 288449 - DNA, 249 bp, Artificial Sequence
  derived and/or modified sequence
gactacctgcacagcctgggcaaggccaggacagcccaggtgcagaaggatgcccgcatcggggaggccgaggccaagagagatgctggcatccgggaggccaaggccaagcaggagaaggtgtctgcccagtacctgtctgaaattgagatggccaaggcccagagggactatgagctgaagaaggccgcctatgacatcgaggtgaacacccggcgggcccaggccgacctggcctaccagctgtag

SEQ ID NO: 288450 - DNA, 183 bp, Artificial Sequence
  derived and/or modified sequence
gtggccaagaccaagcagcagatcgaggagcagagggtgcaggtgcaggtggtggagcgggcccagcaggtggccgtgcaggagcaggagatcgcccggcgggagaaggagctggaggcccgggtgaggaagccagctgaggccgagcgctacaagctggagcggctggccgaggccgagtag

SEQ ID NO: 288451 - DNA, 1074 bp, Artificial Sequence
  derived and/or modified sequence
gtgaagatccagggccagaacaaggagatgctggccgccgcctgccagatgttcctgggcaagacagaggccgagatcgcccacatcgccctggagaccctggagggccaccagagggccatcatggcccacatgacagtggaggagatctacaaggaccggcagaagttcagcgagcaggtgttcaaggtggccagcagtgacctggtgaacatgggcatctctgtggtgtcctacaccctgaaggacatccatgatgaccaggactacctgcacagcctgggcaaggccaggacagcccaggtgcagaaggatgcccgcatcggggaggccgaggccaagagagatgctggcatccgggaggccaaggccaagcaggagaaggtgtctgcccagtacctgtctgaaattgagatggccaaggcccagagggactatgagctgaagaaggccgcctatgacatcgaggtgaacacccggcgggcccaggccgacctggcctaccagctgcaggtggccaagaccaagcagcagatcgaggagcagagggtgcaggtgcaggtggtggagcgggcccagcaggtggccgtgcaggagcaggagatcgcccggcgggagaaggagctggaggcccgggtgaggaagccagctgaggccgagcgctacaagctggagcggctggccgaggccgagaagagccagctgatcatgcaggccgaggccgaggccgcctctgtgaggatgagaggagaggccgaggcctttgccatcggggcccgggcccgggcagaggccgagcagatggccaagaaggccgaggccttccagctgtaccaggaggccgcccagctggacatgctgctggagaagctgccccaggtggccgaggagatcagcggccccctgaccagcgccaacaagatcaccctggtgagcagcggcagcggcaccatgggcgccgccaaggtgactggagaggtgctggacatcctgacccggctgcctgagagcgtggagcggctgactggagtgtccatcagccaggtgaaccacaagcccctgaggacagcctag

SEQ ID NO: 288452 - DNA, 696 bp, Artificial Sequence
  derived and/or modified sequence
gtgaagatccagggccagaacaaggagatgctggccgccgcctgccagatgttcctgggcaagacagaggccgagatcgcccacatcgccctggagaccctggagggccaccagagggccatcatggcccacatgacagtggaggagatctacaaggaccggcagaagttcagcgagcaggtgttcaaggtggccagcagtgacctggtgaacatgggcatctctgtggtgtcctacaccctgaaggacatccatgatgaccaggactacctgcacagcctgggcaaggccaggacagcccaggtgcagaaggatgcccgcatcggggaggccgaggccaagagagatgctggcatccgggaggccaaggccaagcaggagaaggtgtctgcccagtacctgtctgaaattgagatggccaaggcccagagggactatgagctgaagaaggccgcctatgacatcgaggtgaacacccggcgggcccaggccgacctggcctaccagctgcaggtggccaagaccaagcagcagatcgaggagcagagggtgcaggtgcaggtggtggagcgggcccagcaggtggccgtgcaggagcaggagatcgcccggcgggagaaggagctggaggcccgggtgaggaagccagctgaggccgagcgctacaagctggagcggctggccgaggccgagtag

SEQ ID NO: 288453 - DNA, 861 bp, Artificial Sequence
  derived and/or modified sequence
atgggcatctctgtggtgtcctacaccctgaaggacatccatgatgaccaggactacctgcacagcctgggcaaggccaggacagcccaggtgcagaaggatgccagaattggagaggccgaggccaagagagatgctggcatccgggaggccaaggccaagcaggagaaggtgtctgcccagtacctgtctgaaattgagatggccaaggcccagagggactatgagctgaagaaggccgcctatgacatcgaggtgaacacccggcgggcccaggccgacctggcctaccagctgcaggtggccaagaccaagcagcagatcgaggagcagagggtgcaggtgcaggtggtggagcgggcccagcaggtggccgtgcaggagcaggagatcgcccggcgggagaaggagctggaggcccgggtgaggaagccagctgaggccgagcgctacaagctggagcggctggccgaggccgagaagagccagctgatcatgcaggccgaggccgaggccgcctctgtgaggatgagaggagaggccgaggcctttgccatcggggcccgggcccgggcagaggccgagcagatggccaagaaggccgaggccttccagctgtaccaggaggccgcccagctggacatgctgctggagaagctgccccaggtggccgaggagatcagcggccccctgaccagcgccaacaagatcaccctggtgagcagcggcagcggcaccatgggcgccgccaaggtgactggagaggtgctggacatcctgacccggctgcctgagagcgtggagcggctgactggagtgtccatcagccaggtgaaccacaagcccctgaggacagcctag

SEQ ID NO: 288454 - DNA, 438 bp, Artificial Sequence
  derived and/or modified sequence
atgggcgtggagggcaccggccggggcggctgccggctgggcggccctgacggaaaggggaaaggatgggcccccgtggacgctactgcacgcctcccacacccccaaaggctttcgttgccgctactgcaactgcagcccgagccctgtttctcactggtggcccagatgaggccatggtggagcccggattacctgcactctctgggaaaggcccgcacggctcaggttcagaaagatgcccggattggtgaagcggaagcaaagcgggatgcaggtattcgcgaagccaaagctaagcaagaaaaggtgtcagctcagtacctgtcggagatcgagatggctaaggcccagcgagactatgagcttaaaaaagctgcttatgatatcgaggtgaatacccgaagggctcaggccgacttggcttatcagctgtag

SEQ ID NO: 288455 - DNA, 717 bp, Artificial Sequence
  derived and/or modified sequence
atgcggccctggtggagccccgtgaagatccagggccagaacaaggaaatgcttgccgcagcttgtcagatgttccttgggaaaacggaagcagagatcgcccatatcgcccttgagacactcgaaggtcaccagcgcgctataatggcccatatgacagtcgaggaaatctataaggacaggcagaaattttctgaacaggtgtttaaggtagcttcctctgatcttgtcaatatgggtatcagtgtggttagttacaccttgaaggacatccatgacgatcaagattatttgcacagtttgggaaaggctcggaccgctcaagtccaaaaggatgctaggatcggagaggcagaggccaaacgcgatgccgggatccgcgaagccaaagctaaacaagaaaaggtatccgcgcagtacctgtcagaaattgaaatggccaaggcccaaagggattacgaattgaaaaaagccgcatatgatattgaagtgaataccagacgagctcaggccgatctggcttaccagctgcaggtggcaaagaccaagcagcaaatcgaggagcaaagagtgcaggtgcaggtggtcgagcgagcccaacaggtggccgtacaggaacaggaaatcgcgcgccgggagaaagaactcgaagcgcgggtccgcaaacctgccgaggctgaaagatacaagcttgagcgacttgccgaagcagagtag

SEQ ID NO: 288456 - DNA, 438 bp, Artificial Sequence
  derived and/or modified sequence
atgggcgtggagggcaccggccggggcggctgccggctgggcggcccagatggcaagggcaagggatgggcccctgtagacgcaacggcacgactgccccacccacagcgcctttctctgccgctcttacagttacaacctgaaccctgcttttcacttgtggcccagatgcggccatggtggtcgcccgattacctgcactctcttggtaaggcccgtactgcacaggtccagaaggatgcccgcataggggaggccgaggcaaaacgagacgcaggcattcgcgaggcaaaggcaaaacaagagaaagtttccgcacagtatctctccgagatcgagatggccaaagcccaacgggattacgagctgaaaaaagctgcctatgacatagaggtaaacacccgaagggcccaggccgacttggcataccagttgtag

SEQ ID NO: 288457 - DNA, 273 bp, Artificial Sequence
  derived and/or modified sequence
tgagccaagaaggccgaggccttccagctgtaccaggaggccgcccagctggatatgctgctggagaagctgccccaagttgcggaggagatctctggacccctcacttctgcgaacaagataacgcttgtgtcctctgggagcggcacaatgggtgcagcaaaggtgacgggtgaggtgctagacatcttgacacggctgcccgagagtgtggagaggctgaccggcgttagcatctctcaagtaaatcacaagcctttgagaaccgcatag

SEQ ID NO: 288458 - DNA, 717 bp, Artificial Sequence
  derived and/or modified sequence
atgcggccctggtggagccccgtgaagatccagggccagaacaaggaaatgctagccgcagcctgccagatgttccttggaaagaccgaggctgagattgctcatatagccctggagacactcgagggtcaccagcgagctatcatggcccacatgacagtcgaggagatatataaagatagacaaaagttctccgagcaggtgtttaaggtggcctctagtgacctcgtgaatatgggaatttccgtggtgtcctatacccttaaggatatacacgatgaccaggattacctgcactcattgggcaaggcccgcactgcccaagtgcagaaggatgcccgcatcggagaggcagaagccaagcgagacgcgggcatcagagaggccaaggcgaaacaggaaaaggtgagtgctcaatacctctcagagatcgagatggcgaaagcgcagcgcgactacgagcttaagaaagccgcctacgatatcgaggtaaacactagacgtgctcaggctgacctagcataccagttacaggtggcaaaaaccaaacaacagatcgaagagcaaagagtgcaggtgcaagtggtcgagcgggcccagcaggttgcggtgcaggagcaagagatcgctcgccgggaaaaagagctcgaggcccgggtgcgcaagcccgccgaggcggagagatacaagttggaacgcctggctgaggccgaatag

SEQ ID NO: 288459 - DNA, 417 bp, Artificial Sequence
  derived and/or modified sequence
gtgaagatccagggccagaacaaggagatgctggccgccgcctgccagatgttcttgggtaaaacggaggccgaaatcgcccatatcgctcttgagacccttgagggtcatcagagggccatcatggcgcacatgacggtcgaggaaatatacaaggaccgccaaaaattttccgagcaggttttcaaggtggcaagctccgatctggtaaacatgggcatctccgtggtttcatacaccctaaaagacattcacgatgatcaggactacctgcacagccttggcaaagctaggaccgctcaggtccagaaagatgccaggataggggaagcggaagcgaagagagacgctgggataagagaagcaaaggccaagcaggagaaggtgtccgcacagtatctgagcgagattgagtag

SEQ ID NO: 288460 - DNA, 348 bp, Artificial Sequence
  derived and/or modified sequence
atgggcgtggagggcaccggccggggcggctgccggctgggcggccctgacggcaagggtaagggttgggctccagtggacgctactgcccggctgcctcatccccagcggctctcgctgccactgctgcaattgcaacctgagccctgcttcagcttggtggctcagatgcgaccatggtggtccccggattaccttcactcactaggaaaagcccgcaccgctcaagtgcagaaagatgctcggatcggcgaggctgaggctaagcgcgatgcaggcattcgggaagcaaaggctaaacaagaaaaggtttctgcacaatacctgtctgaaattgagatggcttag

SEQ ID NO: 288461 - DNA, 561 bp, Artificial Sequence
  derived and/or modified sequence
gtggccaagaccaagcagcagatcgaggagcagcgggtgcaggtgcaggtggttgaaagggcacagcaggtagcggtccaggagcaagaaattgcacggagagaaaaagagctcgaggctagagtaaggaagcctgccgaggcggaacggtataagcttgagagactggctgaggccgagaaaagccaacttatcatgcaggccgaggctgaggcagccagtgtcagaatgcgaggagaggcggaggcgtttgccatcggagcgcgtgcgagggccgaagcagagcagatggctaaaaaggctgaagcatttcaattatatcaagaggcagcgcagttggacatgctgctggaaaaactcccacaggtggcagaagagatatcagggccacttacttctgctaacaagattaccctggtttcttccggctctggcactatgggagcagccaaggtgacaggagaggtcctggacattctcactagactccccgaaagtgtcgaacgcctgaccggagtaagcatttctcaagtaaatcacaagcctctgcggactgcctag

SEQ ID NO: 288462 - DNA, 438 bp, Artificial Sequence
  derived and/or modified sequence
atgggcgtggagggcaccggccggggcggctgccggctgggcggcccagacggcaaagggaagggctgggctccagtcgacgcaaccgccagattacctcatccacagaggctgagcttgcctctgttacaactccagcctgagccgtgcttcagtttggttgcccaaatgcgcccttggtggtcccctgactatttgcatagtttggggaaagcccgtacagcccaagtgcagaaggacgccaggattggcgaggctgaggccaagagagatgccggaatcagggaagccaaagcgaaacaggagaaagtttctgcacaatatctcagcgagattgaaatggctaaagctcaaagagactacgaacttaaaaaggccgcatacgatatcgaagtgaacaccaggcgggcccaggccgatctggcatatcagttgtag

SEQ ID NO: 288463 - DNA, 444 bp, Artificial Sequence
  derived and/or modified sequence
atgcggccctggtggagccccgtgaagatccagggccagaacaaggagatgctcgccgctgcctgccagatgttcctcggaaaaactgaggccgaaatcgcccacatcgctctggagaccctggaagggcaccagcgggcaattatggctcatatgactgtggaggaaatatacaaagacagacagaagttctccgaacaagtgttcaaagtggccagctctgacttggttaatatgggaataagcgtggttagctatactctgaaagatatacatgacgatcaggactacttgcattccctagggaaagctaggacagcccaggtgcaaaaggatgcccggataggcgaggctgaggctaagcgggacgccggcattagagaggcgaaagccaaacaggaaaaggtgagcgcccagtatctgtctgaaattgaaatggcgtag

SEQ ID NO: 288464 - DNA, 549 bp, Artificial Sequence
  derived and/or modified sequence
gtgaagatccagggccagaacaaggagatgctggccgccgcctgccagatgtttctgggaaagaccgaggctgaaatcgcacatattgctctggaaaccctggaaggccaccagagggcaatcatggcacacatgactgtggaagaaatatacaaggaccggcagaagttttcagagcaggtttttaaggtggccagttcagacctcgtgaacatggggataagcgtcgtgtcctacaccctgaaggacattcatgatgatcaagactatctgcacagcctgggcaaggcccgcactgcccaggtacagaaggacgctcggatcggagaagcagaggcaaaaagggatgcaggaattagagaagcaaaggccaaacaggaaaaagtcagcgcccaatatctgtccgaaattgagatggccaaagcgcaaagagactatgagctgaagaaggcggcctacgatatcgaggttaacacgaggagggcccaggcagaccttgcttaccagctgcaagtcgccaagacaaaacaacagatcgaagaacagtag

SEQ ID NO: 288465 - DNA, 348 bp, Artificial Sequence
  derived and/or modified sequence
gtgaagatccagggccagaacaaggagatgctggccgccgcctgccagatgtttctggggaagacagaggccgagatcgcccatattgccctcgaaacgctcgagggacatcaacgagctattatggcccatatgaccgtcgaagaaatatacaaagatcgacagaagttttcagaacaggtcttcaaggtggcaagcagcgatctagtgaatatgggcatctccgtagtttcgtacaccctgaaagacattcacgatgaccaggattacctacatagtctgggcaaagcacgcaccgcacaggttcagaaagatgccagaattggggaggctgaagctaagaggtag

SEQ ID NO: 288466 - DNA, 498 bp, Artificial Sequence
  derived and/or modified sequence
gtgaagatccagggccagaacaaggagatgctggccgccgcctgccaaatgtttttgggcaagaccgaggcggaaatcgcccatatcgctctagagacgctggaaggccaccagcgagcaatcatggcacacatgaccgtggaggagatttacaaggaccgccaaaaattttcagaacaggtattcaaagttgctagtagcgatctggtgaatatgggcatctccgtcgtctcttacactctgaaagacatccatgacgatcaagattatctgcactccttaggcaaggctaggaccgcacaggtgcagaaagatgcccgaattggcgaggccgaagcaaagcgggacgcaggaattcgggaggccaaagccaagcaagagaaggtgtccgcacaatacctctccgagatagagatggccaaagctcagcgcgactatgagttgaagaaagcggcctatgatatcgaagtgaacaccaggagggctcaagccgactag

SEQ ID NO: 288467 - DNA, 438 bp, Artificial Sequence
  derived and/or modified sequence
atgggcgtggagggcaccggccggggcggctgccggctgggcggccccgacggtaagggcaagggctgggccccagtcgacgccacggcaaggctgccccacccacagcggctcagcctacccctcctgcagctccagcctgaaccgtgtttctctctggtggcccaaatgcgtccttggtggtctccagattacctgcactccctcgggaaagcaaggacagctcaggttcagaaagatgcccggatcggtgaggcagaggccaaaagggatgccggaattcgtgaggccaaagcgaagcaagagaaggtcagcgctcagtatctgtctgagatagaaatggcaaaggcgcagcgtgattacgaactgaagaaagccgcctacgatatcgaggtgaacactcggagggctcaggccgacctggcatatcaattgtag

SEQ ID NO: 288468 - DNA, 249 bp, Artificial Sequence
  derived and/or modified sequence
gactacctgcacagcctgggcaaggcccggaccgcccaggtgcagaaggatgctcggataggtgaggccgaggcaaaacgtgacgcaggcataagggaagcgaaggcaaaacaggagaaagtctcggctcaatacctctccgaaatcgagatggcaaaagcccaaagagattacgaactcaaaaaggccgcttatgacatcgaggtgaatacaagacgtgcccaggccgatctcgcataccaactgtag

SEQ ID NO: 288469 - DNA, 717 bp, Artificial Sequence
  derived and/or modified sequence
atgcggccctggtggagccccgtgaagatccagggccagaacaaggaaatgctggcagctgcatgtcaaatgtttctggggaagactgaggccgaaatcgcccatatcgccttagagactttggagggacaccagcgcgccattatggcgcacatgacagtagaagagatctacaaagatcgacagaagttttctgagcaggtattcaaggtggcatcgagcgatctggtgaacatgggcattagcgtggtgtcttacactctgaaagatattcatgacgaccaggactatcttcacagccttggcaaagctaggactgctcaagttcagaaagacgccagaataggggaagcggaagccaaacgagatgcaggcattagggaggcgaaggcgaagcaagaaaaggtttctgctcagtacctgtcagaaatcgaaatggccaaagctcagcgcgactatgagctgaagaaagccgcctatgacatcgaagtgaataccagaagagcccaggccgatctggcttaccagcttcaggtggccaaaaccaaacagcagatagaggaacaaagggtgcaagtgcaagtggtggaacgcgcacagcaggtggcggtgcaagagcaggagatcgctcgtagggaaaaagagttagaagctcgcgtccggaagcccgccgaagccgagagatataagctggaaaggttggcggaggctgagtag

SEQ ID NO: 288470 - DNA, 183 bp, Artificial Sequence
  derived and/or modified sequence
gtggccaagaccaagcagcagatcgaggagcagcgggtgcaggtgcaagtagtggagcgcgctcagcaagtggccgtgcaggagcaagaaatcgctagaagggagaaagagctggaagcccgggtaagaaaacccgctgaagccgagcgctacaaactggaacggcttgcagaagcagagtag

SEQ ID NO: 288471 - DNA, 717 bp, Artificial Sequence
  derived and/or modified sequence
atgcggccctggtggagccccgtgaagatccagggccagaacaaggagatgctggccgcagcctgtcagatgttccttgggaagaccgaggctgagatcgcgcacattgccttggagacgctcgagggacaccagcgagccatcatggcccacatgactgtggaagaaatctacaaagaccgacagaaattcagcgaacaggtgttcaaagtggcctccagtgatcttgtgaatatgggcatctccgtagtgtcctacaccctcaaggacattcacgatgaccaggattacctccattctttgggaaaggcccgaacggcacaggtgcaaaaggacgctcggattggcgaggccgaggctaagagggatgccggtatccgtgaggccaaggcaaagcaagagaaagtgtcagcgcaatatctctctgagatcgaaatggcaaaagcccaacgggactatgaactcaagaaagctgcatacgacatcgaggtgaacactagaagagcccaagccgacctggcttatcagctgcaggtggccaagaccaagcagcagattgaagagcagcgggttcaggtgcaggtcgtggaacgtgctcagcaagtcgccgtgcaggagcaagaaattgctagacgcgagaaggagctcgaggcccgcgtccggaaaccagctgaggccgagcgctacaagctcgagagactcgcagaggccgaatag

SEQ ID NO: 288472 - DNA, 1074 bp, Artificial Sequence
  derived and/or modified sequence
gtgaagatccagggccagaacaaggagatgctggccgccgcctgccaaatgtttctcggaaagacagaggctgagatcgcacacatcgccttggagacgctggaaggccatcagcgagcaataatggcccatatgacggtggaggagatttataaagaccggcagaagttttcggagcaagtattcaaggtggctagttcagacctggttaatatggggattagtgttgtttcctatacattaaaggatatccacgatgaccaggactacttgcacagcttgggcaaagccaggactgctcaggtgcagaaagatgcccggattggagaggcagaagctaaacgggatgcaggcatcagggaggctaaggcaaagcaggaaaaggtgagcgctcagtatcttagtgagatcgagatggccaaggcccaacgagattatgagttgaagaaagctgcatatgatatcgaggtcaatactaggcgagcacaagcagatctcgcctaccaactccaagtggccaaaaccaagcagcagatcgaggaacagagagtgcaggtgcaagttgtcgagcgtgctcagcaggtggccgtgcaggaacaagagatcgcgagacgcgaaaaggagttagaggcccgcgttagaaaacctgccgaagccgagcggtataaactcgaacgcctggcagaggcggaaaaaagtcagctgattatgcaggcagaagccgaggcagcatctgtgaggatgagaggtgaggccgaggcctttgccattggggccagagcccgggccgaagccgaacaaatggccaagaaggccgaggcctttcaattgtaccaggaagctgcccaacttgacatgctgcttgaaaagctgccacaggtggccgaggaaatctcagggccacttacgagtgctaacaaaataaccctggtgagctcgggatccgggaccatgggtgccgcaaaggtgaccggcgaagttctggatatcctcacgcgtctgccagaatctgtcgagaggttaacaggggtcagcatctctcaggtgaaccacaagcccctgcggaccgcttag

SEQ ID NO: 288473 - DNA, 438 bp, Artificial Sequence
  derived and/or modified sequence
atgggcgtggagggcaccggccggggcggctgccggctgggcggccctgacggcaagggcaagggatgggcgccagtggacgccacggcgcgcctgccccatccacagaggttgagcttgcccctcctacagctgcaaccagagccatgcttctcactggtcgctcagatgaggccttggtggtcccccgactatctgcattccctcggcaaggctcggacagctcaagttcaaaaggatgcaaggattggcgaggccgaggcgaagagggatgccggcatccgagaagcgaaagcaaaacaggaaaaagtttctgctcaatatttgagcgagatcgaaatggccaaggcccagcgcgactatgaactgaaaaaggccgcttacgacatcgaagtcaatactcggcgggcccaggcagatttggcatatcagctgtag

SEQ ID NO: 288474 - DNA, 717 bp, Artificial Sequence
  derived and/or modified sequence
atgcggccctggtggagccccgtgaagatccagggccagaacaaggagatgctggctgcagcatgccaaatgttcctgggaaagacagaggctgagattgctcacatcgcattagagacacttgaaggtcatcagagggccatcatggctcacatgaccgtggaggaaatctacaaagaccggcaaaagttttccgaacaggttttcaaagtggcaagtagcgatctggtcaacatgggaataagtgtggtgagttataccctgaaagatatccacgatgatcaggactacctgcattctttggggaaagcaagaacagctcaggtacagaaagacgcccgtataggtgaggccgaagccaagcgggatgccggaatccgggaagccaaggcaaaacaggagaaagttagcgctcagtacctgagtgagatcgagatggctaaagcacagagggactacgaactcaagaaggctgcctacgatatcgaagtgaatacccggagggcccaggcagatcttgcttatcagcttcaggtcgcaaagactaagcagcagatcgaggagcagcgcgtacaggttcaagtcgtggagagagcacagcaggttgccgttcaggaacaggagatagctcgccgcgaaaaggagcttgaggcaagagtcagaaagccagcagaggccgagcggtataaactggaaaggttagccgaggccgagtag

SEQ ID NO: 288475 - DNA, 696 bp, Artificial Sequence
  derived and/or modified sequence
gtgaagatccagggccagaacaaggagatgctggccgccgcctgccagatgtttctgggcaaaaccgaagccgagatagcccatattgcactggaaacgcttgagggtcatcagagagcaattatggctcatatgaccgtcgaggaaatctataaagaccgccagaaattctctgaacaggtgtttaaggtggccagttcggatttagtgaacatggggatctccgtcgtgagctacaccctcaaggacatccacgatgaccaggactacctgcacagtctgggcaaggcgaggaccgctcaggtgcagaaggacgctcgtattggtgaggcagaggccaagcgcgatgcagggattagagaagctaaggcaaagcaggagaaagtgtcagcacaatatctgagtgagattgagatggcgaaggcacaacgcgactacgagcttaagaaagctgcatatgacattgaggtgaatactaggcgcgcccaggctgatttagcttatcagttgcaagtggccaaaacgaagcaacagatcgaggaacaacgcgttcaggtgcaggtggtggaacgcgcccaacaagttgcagttcaggagcaggaaatcgcaagaagagagaaagagctggaggctcgcgtccgcaagccagcagaagccgagaggtataagctggagcgcttagccgaggccgagtag

SEQ ID NO: 288476 - DNA, 861 bp, Artificial Sequence
  derived and/or modified sequence
atgggcatcagcgtggtgagctacaccctgaaggacatccacgacgaccaagattatcttcatagtttaggtaaagcccggaccgcccaggtacagaaagacgctcgcatcggtgaggcagaggcaaagagagatgccggcatcagggaggcgaaggctaagcaggaaaaggtgtccgctcagtacctgtctgaaattgagatggctaaagcacagcgcgactacgaattgaaaaaagcggcctatgacatcgaagtcaatacaaggcgggcccaggctgaccttgcatatcagttgcaggtcgctaagactaagcaacagatcgaggagcagagggtacaggtgcaagttgtcgagagagcacagcaggtggctgtgcaggagcaggagattgcaaggcgtgagaaagaattagaggcacgagtgcgaaaaccagcggaggcggaaagatacaaactggagcgcctggccgaggctgagaaaagtcaactgattatgcaggctgaggctgaggctgcatccgtgaggatgcggggggaggccgaggccttcgccatcggagcccgcgccagagccgaggccgaacagatggcaaagaaagcagaagcctttcaactctaccaagaagccgcacaactcgacatgcttcttgagaagttacctcaggtcgctgaggagataagcgggccgctcactagcgctaacaagatcactttagttagttccggatctggaacaatgggtgctgccaaggtgacaggagaggtgttggacatattaactcgtctccccgagagcgtcgaacggttgaccggcgtgtcaatttctcaagtgaatcacaagccactgcgcactgcatag

SEQ ID NO: 288477 - DNA, 438 bp, Artificial Sequence
  derived and/or modified sequence
atgggagtggagggaacagggagggggggttgcaggctaggaggccctgatggcaaaggcaagggatgggccccagtggacgctacggcacgccttccgcaccctcagaggctgagcctcccactgctccaactccagcctgaaccttgcttcagcctggtggctcaaatgcggccatggtggagcccagactacttgcattcgctcggtaaggctcgaacggctcaggtccaaaaagacgcccgaattggggaggccgaggctaagagagacgccggaatacgggaggccaaagccaaacaggaaaaggtgagcgcacagtatctcagtgagatagaaatggccaaagctcaaagggactatgagctgaagaaggcggcttacgatattgaggtgaacacccggagggctcaagctgacctcgcataccagctctag

SEQ ID NO: 288478 - DNA, 717 bp, Artificial Sequence
  derived and/or modified sequence
atgaggccttggtggtcccccgtgaagatacagggtcaaaacaaagaaatgctggctgcagcttgtcagatgttcttgggaaagaccgaggccgagatcgcccatatcgcccttgagaccctggaggggcatcagagggccattatggcccacatgacggtggaggagatatataaagaccgccaaaagttttcagaacaggtattcaaggtggcctcttcggatttggtcaatatgggcatttctgtcgtctcctacaccctcaaagacatccacgacgaccaggattacctgcactcgctgggtaaagcgaggacagcccaggtgcagaaagacgctcgaattggggaggccgaagccaaacgggacgctggaatccgcgaggcaaaggccaagcaggaaaaggtgagcgcccaatatctgagcgaaattgaaatggccaaggcacagcgagattatgaattgaaaaaggccgcatacgacatcgaggttaacaccagacgggcacaggccgacctggcctatcagctccaggttgctaaaacaaagcagcagatcgaagagcagagggtgcaggtgcaagtggtggagagggcccagcaggtcgcagtgcaggaacaggaaattgccagaagggagaaggaactcgaggcaagggtcagaaagcctgcagaggctgagagatataagttggagaggcttgccgaagcagagtag

SEQ ID NO: 288479 - DNA, 438 bp, Artificial Sequence
  derived and/or modified sequence
atgggtgtcgaaggtacgggtaggggaggatgccggctaggcggacctgacggaaagggcaaaggctgggccccagtggacgcgacagcacggctgccccaccctcaacggctgagtctgcctcttttacagttgcagcccgagccatgttttagcctggtcgcgcagatgcgcccatggtggtcaccagactacctgcactccctgggtaaagctcggacagcacaggtccagaaagatgcccgtattggcgaggcagaggcaaagcgtgatgcagggatccgagaagccaaggcaaagcaggaaaaagtctctgctcagtacctgtctgaaattgaaatggccaaggctcaaagagattacgaattgaaaaaagcagcctacgacattgaggttaataccaggagggcacaggcagacctggcctaccagttatag

SEQ ID NO: 288480 - DNA, 273 bp, Artificial Sequence
  derived and/or modified sequence
tgagcaaaaaaggcagaggcatttcagctttatcaggaggctgcccaattggacatgctcctggagaagctgccccaggtcgctgaagagatttctggaccattgacatccgcaaacaagatcacattggtgtctagtggatcaggcactatgggagccgcaaaagtgactggcgaagtattggatattctgacccgtctccctgaaagcgtggaacggctcacaggcgtcagcatcagccaggtgaatcacaagcctctccggacggcatag

SEQ ID NO: 288481 - DNA, 717 bp, Artificial Sequence
  derived and/or modified sequence
atgcgcccatggtggagccccgtgaagatacaagggcagaacaaagagatgctcgctgccgcatgtcagatgtttctgggcaagaccgaggctgaaattgcccatatcgcactggaaacactcgagggacatcagagggccatcatggcccatatgaccgtcgaagaaatctataaggatcggcagaagttcagtgagcaggtcttcaaggtcgcctccagcgatctggtcaacatggggattagtgttgttagttatacactgaaagatattcacgatgatcaagattatctgcactctctagggaaagcgagaacagcccaggtccagaaggacgctagaatcggggaggcagaggccaaaagagacgccggtatccgcgaggccaaggctaagcaggagaaagtgagcgcccagtatcttagcgagatcgaaatggctaaggcccaacgggattacgaactcaaaaaagcagcttatgatatcgaggtcaatactcgcagggcccaggctgacctcgcctatcaattgcaggtggctaaaaccaagcaacaaattgaggagcaacgagtccaggtacaggtcgtggaacgagcgcaacaggtggccgtgcaagagcaagagatcgcaaggagagagaaagagctggaagccagggtgcgcaaacccgctgaagcagagcggtataaactcgaacgtctggcggaggccgaatag

SEQ ID NO: 288482 - DNA, 417 bp, Artificial Sequence
  derived and/or modified sequence
gtgaagattcagggccagaacaaagagatgttagccgctgcttgtcaaatgtttctaggtaagaccgaggctgagatcgcccacattgcccttgagaccttggagggccatcagcgtgcaatcatggcccatatgaccgtggaagagatctacaaggatcggcagaaattctctgaacaggtctttaaggtggcctcctctgacctggtcaatatggggatatccgtggtatcctacacactgaaagatatacacgatgatcaggactatcttcactcgttaggcaaggctcggacggcgcaggtgcaaaaagatgctcgcatcggggaagctgaggctaaaagggatgctggcatcagggaagccaaagcgaagcaggagaaagtgtctgcccagtacctgtctgaaattgaatag

SEQ ID NO: 288483 - DNA, 348 bp, Artificial Sequence
  derived and/or modified sequence
atgggagtagagggcacggggcgaggaggctgcagactcgggggacctgatgggaagggtaagggctgggctcctgtcgacgccacagccaggctgccccacccgcagcggctgtctctcccccttctccagctccagcctgagccttgtttttccttggtagcacagatgcgtccatggtggtctcccgactatctgcattcacttggtaaggcccgaacggcacaggttcagaaggacgccaggatcggagaggccgaggctaaacgagacgcaggaatccgggaggccaaagcaaaacaagaaaaagtgagcgcacagtacctgtcagaaatcgagatggcatag

SEQ ID NO: 288484 - DNA, 561 bp, Artificial Sequence
  derived and/or modified sequence
gtcgccaagacaaaacagcaaatcgaggaacagagagtccaggttcaggtggtggagcgggctcagcaggtggccgttcaagaacaagagatcgcaagaagggaaaaagaactggaggcccgtgtaagaaaaccggctgaagccgaaaggtacaagttggaacgtctcgctgaggcggagaagagtcaattgattatgcaggctgaagccgaggccgcatctgtcagaatgcgaggagaggccgaagcattcgcaataggcgcaagagcaagagctgaggccgagcagatggccaagaaagccgaggccttccagttataccaggaagccgctcagcttgatatgctgcttgagaaactcccccaggtcgccgaggagatatccggtccgctaactagcgcaaacaagattactctagtgagcagtgggagcggaaccatgggggcagccaaagtgacgggggaagtcctggatattctgaccaggctgccggaatctgtggagcgtctgaccggggtttccataagtcaggtaaaccacaaacccttgcgtaccgcatag

SEQ ID NO: 288485 - DNA, 438 bp, Artificial Sequence
  derived and/or modified sequence
atgggcgtggaggggaccggtagaggaggttgtcggctgggcggtcctgatggaaaaggaaaagggtgggcccctgtggacgccacagccagactgcctcatccacagcgactctccctgccactgctgcagcttcagcccgaaccatgcttcagtttagtggcccaaatgagaccttggtggtccccagattatctgcactccctcggcaaggcgagaaccgcccaggtgcagaaagatgctaggattggcgaagcagaagcaaaaagggatgctgggatcagagaggcaaaagcgaagcaggagaaggtcagtgcacagtacctaagcgagattgaaatggccaaagcccagcgagattacgaactgaaaaaggctgcttatgatattgaggtgaacacccgcagggcgcaggccgacctggcgtaccagctctag

SEQ ID NO: 288486 - DNA, 444 bp, Artificial Sequence
  derived and/or modified sequence
atgaggccatggtggtcgcccgtgaagatccaagggcagaacaaagaaatgcttgctgccgcatgccagatgttcttaggaaaaacagaggctgaaatcgcccatatagctttggagactctggaagggcaccaacgggctattatggctcacatgaccgttgaagagatatataaggaccgccagaagtttagtgagcaggtatttaaagtcgcctccagcgaccttgtaaacatgggcataagtgttgtgtcatacactctcaaggatattcatgacgatcaggattaccttcatagtcttgggaaagcacggaccgcccaggtgcagaaggacgcgagaatcggtgaggccgaagcgaagcgcgatgccggaatcagagaggccaaagcaaagcaagagaaggtgtccgcccaataccttagcgagatagaaatggcttag

SEQ ID NO: 288487 - DNA, 549 bp, Artificial Sequence
  derived and/or modified sequence
gtgaagattcagggacagaataaggagatgttggcagcggcttgtcagatgttcttggggaaaaccgaggccgagatagcgcacatcgcgcttgaaacattagaggggcatcagcgtgctataatggctcacatgacggtcgaggagatatataaggaccggcaaaagttttccgaacaggtgtttaaggtggcgtcctctgacttagtgaatatgggaatctccgtggtctcttacaccctgaaggatatccacgatgaccaagactatctgcactcactagggaaagctagaactgctcaggtacagaaggatgctcgcatcggtgaggccgaagccaagagggacgcgggaatccgagaagctaaagccaaacaagagaaggtgagcgcccagtatctctctgaaatagagatggccaaagcccagagagattatgaactgaagaaggcagcctatgacatcgaagtgaatacgcgcagggcacaagctgacttagcataccagctccaagttgccaagaccaagcagcaaattgaggagcagtag

SEQ ID NO: 288488 - DNA, 348 bp, Artificial Sequence
  derived and/or modified sequence
gttaagatccaaggacagaacaaagaaatgctggcagccgcttgccagatgtttctggggaaaaccgaagcagagatcgcccatatcgccctggagacacttgaaggacatcagcgcgcaataatggcacacatgacggtcgaggagatctacaaggaccgacagaagtttagtgaacaggttttcaaggttgctagttccgatctcgtcaacatggggatcagcgtagtttcatacaccctaaaggacatacatgatgatcaggactacctgcactctttgggaaaggccagaacggcccaggtccagaaggacgcccgaattggtgaagctgaggcaaaacgctag

SEQ ID NO: 288489 - DNA, 498 bp, Artificial Sequence
  derived and/or modified sequence
gttaaaattcagggccagaataaagaaatgctggccgcagcatgccagatgtttcttggaaagactgaagccgagatcgcccatatcgcactggagacattggagggccatcagagggctatcatggcccacatgacagtcgaagagatctataaggaccgccagaaatttagcgagcaggtcttcaaggtggcaagtagcgatcttgttaatatggggattagcgtggtatcctacaccctcaaggacatccacgatgaccaggactaccttcactcactagggaaggccagaaccgcgcaggtacagaaagacgctcgaattggagaggccgaggccaagcgggacgcaggtataagggaggctaaagccaagcaagaaaaagtctctgcgcagtacttatcagagattgagatggccaaagcacagcgcgactacgagctgaagaaggccgcatacgatattgaagtgaacacacgacgcgcacaggccgactag

SEQ ID NO: 288490 - DNA, 438 bp, Artificial Sequence
  derived and/or modified sequence
atgggcgtggaaggtacaggacgtgggggttgcaggctgggcggaccggatggtaaaggtaaagggtgggctcccgtcgacgccaccgctaggctaccacatccccaaagactcagcctgcctttgctccagctccaacctgaaccatgtttcagcctagtggctcaaatgaggccatggtggagcccagactatctgcatagtctcgggaaagcgaggaccgcacaagtacagaaagacgcaagaattggggaagccgaagctaagcgagacgccggaataagagaggccaaggcaaaacaggagaaagtgtctgcccagtatctatcagagatagagatggccaaagcgcaaagagattatgaattaaaaaaagccgcatatgacattgaggtgaatactcgaagagcccaagccgatctagcataccagttgtag

SEQ ID NO: 288491 - DNA, 249 bp, Artificial Sequence
  derived and/or modified sequence
gactatctgcactccctcgggaaggcccgaaccgctcaggtccaaaaggatgctcggatcggggaagctgaggctaagagagacgcaggcatccgagaagccaaggccaagcaagagaaggtaagcgcccagtacctgagtgagattgagatggccaaagcacagcgcgactacgaactgaagaaggcagcctacgatatcgaggtgaatactaggagagcgcaggcggacctcgcataccagctgtag

SEQ ID NO: 288492 - DNA, 717 bp, Artificial Sequence
  derived and/or modified sequence
atgcgtccgtggtggtcccccgtgaaaatccagggccagaacaaagagatgcttgccgctgcttgtcagatgttcctgggcaagactgaagccgagattgcccacatcgccctggaaacacttgaagggcaccagcgggctatcatggcacacatgaccgttgaggagatttataaggaccgtcagaagttcagtgagcaagtctttaaggtagcttcttccgacttagtgaacatgggaatcagcgtggtctcctacacactaaaggatatacatgacgaccaggattatctgcacagtctggggaaggcaaggacagctcaggtgcagaaggacgcaaggattggcgaagctgaagctaaaagggatgcagggattcgcgaagccaaggctaaacaggagaaagtttcagcccaatacctgtccgagatcgagatggctaaagctcagagagactacgagctcaaaaaggcagcctatgatatcgaggtcaacactagaagggcacaggccgatttggcctaccaacttcaggtggccaagactaaacagcagattgaggagcagcgtgtgcaggtacaggtagtagagcgcgcacagcaggtagctgttcaagagcaagagattgcaaggcgggagaaggagctggaggctagagtaaggaaacccgcagaggcggagcgctataaactagagagactcgccgaggcagagtag

SEQ ID NO: 288493 - DNA, 183 bp, Artificial Sequence
  derived and/or modified sequence
gtcgccaaaactaagcaacagatcgaagagcagagagtgcaggttcaggtagtggagcgcgctcagcaggtggctgtgcaggaacaggagatcgccagacgtgaaaaggagctggaggctagggtgaggaagccagccgaggcggaaagatacaaacttgagagattagctgaggccgagtag

SEQ ID NO: 288494 - DNA, 717 bp, Artificial Sequence
  derived and/or modified sequence
atgcggccatggtggagtccggtgaagatccaggggcagaataaagagatgctcgccgcagcatgtcaaatgttcctcggaaaaacggaagccgagattgcacacattgctctggaaaccctggaggggcaccagcgcgcaataatggctcacatgactgtagaagagatatacaaggatcgacagaaattcagtgagcaggtatttaaggtggcaagcagtgatctggtgaacatggggatttccgtcgtgtcttatactctgaaagatatccatgacgatcaggactaccttcacagcctgggcaaggcgagaaccgctcaagtccagaaggacgcgagaattggcgaagccgaagcaaaacgcgatgccggaatccgggaagcaaaggcaaagcaggagaaggtgagcgcccagtacttgtcagagattgagatggctaaggctcaaagggactatgaattaaaaaaagccgcatatgacattgaagtgaatactagacgcgcacaggccgacctagcttaccaactgcaggttgccaagacgaagcagcagattgaggagcaacgcgtgcaggtacaagtcgtcgagcgtgcacagcaggttgccgtgcaagagcaggagattgcgaggcgcgaaaaagaactcgaagcccgagtccggaagcctgcagaggccgaacgctacaagcttgagcggctggctgaggctgaatag

SEQ ID NO: 288495 - DNA, 1074 bp, Artificial Sequence
  derived and/or modified sequence
gtaaagattcaaggacagaacaaggagatgctcgctgccgcatgccaaatgtttctaggcaagaccgaggctgagatagcccatatcgcccttgaaacactggaaggacaccagagggctatcatggctcacatgaccgttgaagagatttataaagatagacagaaattctccgagcaggtgtttaaggtagccagctcagacctggtaaacatggggattagtgtcgtttcatacaccctgaaagatatacacgacgaccaggactacctacattccctcgggaaggcacgaacagctcaggtgcaaaaggatgcccgtattggggaagcagaagccaaacgggatgccggaattagagaagcaaaagccaaacaggaaaaagtttcagcccaatacctgagcgagatcgagatggcaaaagcccagagggattatgaactcaagaaagctgcctacgatatagaagtgaacacgagacgcgcacaggcagatctggcgtatcagctccaagtcgctaagaccaagcagcagatcgaagagcagagggtacaggtccaggttgtggagcgcgctcaacaggtcgcggttcaggagcaagagatcgccaggagggagaaagagctagaggccagggtccgcaaacccgctgaggcagaacgctataagctagaacggttagcggaggctgagaaaagccagctgataatgcaggccgaagctgaggcagcaagtgtgagaatgcggggagaggcggaggcgttcgctattggggctagggccagggctgaagccgagcagatggccaagaaagccgaagcctttcaactgtaccaagaggcagcgcagctggacatgttactggagaagctcccgcaggtcgctgaagaaatctcaggacccctgacaagtgccaacaagattactcttgtgtcaagcggcagcggtaccatgggggctgccaaggtcactggagaagtgctagatatcttgacacggctgcccgagtcagtggaacggctgaccggtgttagtatctcccaggtgaatcataagcctctgcgcaccgcgtag

SEQ ID NO: 288496 - DNA, 438 bp, Artificial Sequence
  derived and/or modified sequence
atgggggttgaaggtacgggcagaggtggctgtcgcctcggaggaccagatgggaagggcaaaggatgggctcccgtcgacgcgacggccagacttccacatccccagagacttagtcttcctttgctgcagttgcagcctgaaccttgctttagccttgtggcgcaaatgcggccttggtggtccccagactatttgcattccctggggaaggccaggactgcacaggtgcagaaagacgcaaggatcggcgaagctgaagcgaagagagacgccggaattcgcgaagcaaaggccaaacaggaaaaagtgagcgcccagtacctgagcgagattgagatggcaaaggcgcaacgagattacgagctgaaaaaggctgcctacgacattgaagtaaacactcggcgagcccaggccgacctggcctatcagctgtag

SEQ ID NO: 288497 - DNA, 717 bp, Artificial Sequence
  derived and/or modified sequence
atgagaccctggtggtcacccgtgaaaatccagggtcagaacaaggagatgttggcggcagcctgccagatgtttctcggtaaaactgaggcagagatagctcatattgccctggagaccctggaaggacaccagagggccattatggcccatatgacagtggaggaaatctacaaggacaggcaaaagttctctgagcaagtgttcaaggtagcaagtagcgacctcgtcaatatgggtatcagcgtggtgagctatactctaaaggatattcatgacgaccaagattatctgcattccttaggcaaggctcgtaccgctcaagtccaaaaggatgctcgaataggcgaggccgaagccaaacgcgacgcagggatccgggaagctaaggctaagcaagaaaaggtctcagcccaatacctatctgagattgaaatggccaaggctcaacgggattacgaattgaagaaagcagcttatgacatagaagttaatactagacgcgcacaggctgatctcgcctatcaacttcaagtggctaagaccaagcagcagatcgaggaacagcgagtacaggttcaagtggtggagagggcacagcaggttgccgtgcaagaacaggagatagccaggagagaaaaagagctggaagcaagagtgcgcaaaccagcggaggctgaaagatacaaactggagagactagccgaggccgagtag

SEQ ID NO: 288498 - DNA, 696 bp, Artificial Sequence
  derived and/or modified sequence
gtgaaaattcaggggcagaacaaagaaatgcttgcagccgcatgtcagatgttccttggtaagacggaggccgagatcgctcacatcgcactggagaccctcgaaggacaccagagagcaatcatggcacatatgactgtcgaggagatctacaaagaccggcaaaaattttctgagcaagtttttaaagtcgcgtcctcagatcttgtgaacatgggtatctcagtagtatcgtataccctgaaggacattcacgacgatcaggattatctccacagtttgggaaaggctcgcacagctcaggtgcagaaagacgcccgtatcggcgaagcggaggccaaacgtgatgcaggcattcgggaagccaaagccaagcaggagaaggtgagtgctcagtacctgtccgaaatcgaaatggctaaagcacagagggactacgaactgaagaaggccgcttacgatatcgaggtgaacacacggagggcgcaggcagacttggcctaccaactccaggttgccaagaccaagcaacagattgaggagcagcgggtccaagtacaggtggtggagagagcgcaacaggttgcggtccaagaacaggaaattgccaggagagagaaggagctggaggccagggtgaggaaacccgctgaggccgagcggtataagctcgaacgactggctgaggcggaatag

SEQ ID NO: 288499 - DNA, 861 bp, Artificial Sequence
  derived and/or modified sequence
atgggaatctccgtcgtgagttacactctcaaagacatccatgatgaccaggattacctccactcgctcgggaaggctagaaccgcacaggttcagaaggatgcaaggattggagaagcagaagccaagcgtgatgcgggaattcgcgaagctaaggctaagcaggagaaggtgagtgctcaatatcttagcgaaattgagatggctaaagcccagcgtgactacgaactaaagaaggcggcttatgatattgaagttaacacaaggagagcccaggctgacctggcctatcaactgcaggtagccaaaacaaaacagcagatcgaggagcagcgcgtgcaggtccaggtggttgagcgggctcaacaggtggcagtacaggaacaagaaatagcccgtcgcgagaaggagctggaggccagggtcaggaaacccgctgaagctgaacggtataagctggaacgcctggctgaggccgagaagtcccagctcattatgcaggcagaggcagaggcggcatctgtgaggatgagaggggaagctgaggccttcgcaatcggggcaagagcaagggccgaggctgagcaaatggccaaaaaagcagaagcatttcaactttatcaagaggccgctcaactggatatgctgctggaaaagttgcctcaggtggcggaggagatctccggtcctctcactagtgcaaacaagatcacactcgtgtcttccggcagcggaacaatgggcgcagcgaaggtaaccggggaggtgctggatatcctgacccgtttaccagagtctgtcgagagactcacaggcgtttcaatctcacaggtcaaccacaagcccctgcggacagcctag

SEQ ID NO: 288500 - DNA, 438 bp, Artificial Sequence
  derived and/or modified sequence
atgggcgtggagggcaccggcagaggcggctgcagactgggcggccccgacggcaagggcaagggctgggcccccgtggacgccaccgccagactgccccacccccagagactgagcctgcccctgctgcagctgcagcccgagccctgcttcagcctggtggcccagatgagaccctggtggagccccgactacctgcacagcctgggcaaggccagaaccgcccaggtgcagaaggacgccagaatcggcgaggccgaggccaagagagacgccggcatcagagaggccaaggccaagcaggagaaggtgagcgcccagtacctgagcgagatcgagatggccaaggcccagagagactacgagctgaagaaggccgcctacgacatcgaggtgaacaccagaagagcccaggccgacctggcctaccagctgtag

SEQ ID NO: 288501 - DNA, 717 bp, Artificial Sequence
  derived and/or modified sequence
atgagaccctggtggagccccgtgaagatccagggccagaacaaggagatgctggccgccgcctgccagatgttcctgggcaagaccgaggccgagatcgcccacatcgccctggagaccctggagggccaccagagagccatcatggcccacatgaccgtggaggagatctacaaggacagacagaagttcagcgagcaggtgttcaaggtggccagcagcgacctggtgaacatgggcatcagcgtggtgagctacaccctgaaggacatccacgacgaccaggactacctgcacagcctgggcaaggccagaaccgcccaggtgcagaaggacgccagaatcggcgaggccgaggccaagagagacgccggcatcagagaggccaaggccaagcaggagaaggtgagcgcccagtacctgagcgagatcgagatggccaaggcccagagagactacgagctgaagaaggccgcctacgacatcgaggtgaacaccagaagagcccaggccgacctggcctaccagctgcaggtggccaagaccaagcagcagatcgaggagcagagagtgcaggtgcaggtggtggagagagcccagcaggtggccgtgcaggagcaggagatcgccagaagagagaaggagctggaggccagagtgagaaagcccgccgaggccgagagatacaagctggagagactggccgaggccgagtag

SEQ ID NO: 288502 - DNA, 273 bp, Artificial Sequence
  derived and/or modified sequence
tgagccaagaaggccgaggccttccagctgtaccaggaggccgcccagctggacatgctgctggagaagctgccccaggtggccgaggagatcagcggccccctgaccagcgccaacaagatcaccctggtgagcagcggcagcggcaccatgggcgccgccaaggtgaccggcgaggtgctggacatcctgaccagactgcccgagagcgtggagagactgaccggcgtgagcatcagccaggtgaaccacaagcccctgagaaccgcctag

SEQ ID NO: 288503 - DNA, 417 bp, Artificial Sequence
  derived and/or modified sequence
gtgaagatccagggccagaacaaggagatgctggccgccgcctgccagatgttcctgggcaagaccgaggccgagatcgcccacatcgccctggagaccctggagggccaccagagagccatcatggcccacatgaccgtggaggagatctacaaggacagacagaagttcagcgagcaggtgttcaaggtggccagcagcgacctggtgaacatgggcatcagcgtggtgagctacaccctgaaggacatccacgacgaccaggactacctgcacagcctgggcaaggccagaaccgcccaggtgcagaaggacgccagaatcggcgaggccgaggccaagagagacgccggcatcagagaggccaaggccaagcaggagaaggtgagcgcccagtacctgagcgagatcgagtag

SEQ ID NO: 288504 - DNA, 348 bp, Artificial Sequence
  derived and/or modified sequence
atgggcgtggagggcaccggcagaggcggctgcagactgggcggccccgacggcaagggcaagggctgggcccccgtggacgccaccgccagactgccccacccccagagactgagcctgcccctgctgcagctgcagcccgagccctgcttcagcctggtggcccagatgagaccctggtggagccccgactacctgcacagcctgggcaaggccagaaccgcccaggtgcagaaggacgccagaatcggcgaggccgaggccaagagagacgccggcatcagagaggccaaggccaagcaggagaaggtgagcgcccagtacctgagcgagatcgagatggcctag

SEQ ID NO: 288505 - DNA, 561 bp, Artificial Sequence
  derived and/or modified sequence
gtggccaagaccaagcagcagatcgaggagcagagagtgcaggtgcaggtggtggagagagcccagcaggtggccgtgcaggagcaggagatcgccagaagagagaaggagctggaggccagagtgagaaagcccgccgaggccgagagatacaagctggagagactggccgaggccgagaagagccagctgatcatgcaggccgaggccgaggccgccagcgtgagaatgagaggcgaggccgaggccttcgccatcggcgccagagccagagccgaggccgagcagatggccaagaaggccgaggccttccagctgtaccaggaggccgcccagctggacatgctgctggagaagctgccccaggtggccgaggagatcagcggccccctgaccagcgccaacaagatcaccctggtgagcagcggcagcggcaccatgggcgccgccaaggtgaccggcgaggtgctggacatcctgaccagactgcccgagagcgtggagagactgaccggcgtgagcatcagccaggtgaaccacaagcccctgagaaccgcctag

SEQ ID NO: 288506 - DNA, 444 bp, Artificial Sequence
  derived and/or modified sequence
atgagaccctggtggagccccgtgaagatccagggccagaacaaggagatgctggccgccgcctgccagatgttcctgggcaagaccgaggccgagatcgcccacatcgccctggagaccctggagggccaccagagagccatcatggcccacatgaccgtggaggagatctacaaggacagacagaagttcagcgagcaggtgttcaaggtggccagcagcgacctggtgaacatgggcatcagcgtggtgagctacaccctgaaggacatccacgacgaccaggactacctgcacagcctgggcaaggccagaaccgcccaggtgcagaaggacgccagaatcggcgaggccgaggccaagagagacgccggcatcagagaggccaaggccaagcaggagaaggtgagcgcccagtacctgagcgagatcgagatggcctag

SEQ ID NO: 288507 - DNA, 549 bp, Artificial Sequence
  derived and/or modified sequence
gtgaagatccagggccagaacaaggagatgctggccgccgcctgccagatgttcctgggcaagaccgaggccgagatcgcccacatcgccctggagaccctggagggccaccagagagccatcatggcccacatgaccgtggaggagatctacaaggacagacagaagttcagcgagcaggtgttcaaggtggccagcagcgacctggtgaacatgggcatcagcgtggtgagctacaccctgaaggacatccacgacgaccaggactacctgcacagcctgggcaaggccagaaccgcccaggtgcagaaggacgccagaatcggcgaggccgaggccaagagagacgccggcatcagagaggccaaggccaagcaggagaaggtgagcgcccagtacctgagcgagatcgagatggccaaggcccagagagactacgagctgaagaaggccgcctacgacatcgaggtgaacaccagaagagcccaggccgacctggcctaccagctgcaggtggccaagaccaagcagcagatcgaggagcagtag

SEQ ID NO: 288508 - DNA, 348 bp, Artificial Sequence
  derived and/or modified sequence
gtgaagatccagggccagaacaaggagatgctggccgccgcctgccagatgttcctgggcaagaccgaggccgagatcgcccacatcgccctggagaccctggagggccaccagagagccatcatggcccacatgaccgtggaggagatctacaaggacagacagaagttcagcgagcaggtgttcaaggtggccagcagcgacctggtgaacatgggcatcagcgtggtgagctacaccctgaaggacatccacgacgaccaggactacctgcacagcctgggcaaggccagaaccgcccaggtgcagaaggacgccagaatcggcgaggccgaggccaagagatag

SEQ ID NO: 288509 - DNA, 498 bp, Artificial Sequence
  derived and/or modified sequence
gtgaagatccagggccagaacaaggagatgctggccgccgcctgccagatgttcctgggcaagaccgaggccgagatcgcccacatcgccctggagaccctggagggccaccagagagccatcatggcccacatgaccgtggaggagatctacaaggacagacagaagttcagcgagcaggtgttcaaggtggccagcagcgacctggtgaacatgggcatcagcgtggtgagctacaccctgaaggacatccacgacgaccaggactacctgcacagcctgggcaaggccagaaccgcccaggtgcagaaggacgccagaatcggcgaggccgaggccaagagagacgccggcatcagagaggccaaggccaagcaggagaaggtgagcgcccagtacctgagcgagatcgagatggccaaggcccagagagactacgagctgaagaaggccgcctacgacatcgaggtgaacaccagaagagcccaggccgactag

SEQ ID NO: 288510 - DNA, 249 bp, Artificial Sequence
  derived and/or modified sequence
gactacctgcacagcctgggcaaggccagaaccgcccaggtgcagaaggacgccagaatcggcgaggccgaggccaagagagacgccggcatcagagaggccaaggccaagcaggagaaggtgagcgcccagtacctgagcgagatcgagatggccaaggcccagagagactacgagctgaagaaggccgcctacgacatcgaggtgaacaccagaagagcccaggccgacctggcctaccagctgtag

SEQ ID NO: 288511 - DNA, 183 bp, Artificial Sequence
  derived and/or modified sequence
gtggccaagaccaagcagcagatcgaggagcagagagtgcaggtgcaggtggtggagagagcccagcaggtggccgtgcaggagcaggagatcgccagaagagagaaggagctggaggccagagtgagaaagcccgccgaggccgagagatacaagctggagagactggccgaggccgagtag

SEQ ID NO: 288512 - DNA, 1074 bp, Artificial Sequence
  derived and/or modified sequence
gtgaagatccagggccagaacaaggagatgctggccgccgcctgccagatgttcctgggcaagaccgaggccgagatcgcccacatcgccctggagaccctggagggccaccagagagccatcatggcccacatgaccgtggaggagatctacaaggacagacagaagttcagcgagcaggtgttcaaggtggccagcagcgacctggtgaacatgggcatcagcgtggtgagctacaccctgaaggacatccacgacgaccaggactacctgcacagcctgggcaaggccagaaccgcccaggtgcagaaggacgccagaatcggcgaggccgaggccaagagagacgccggcatcagagaggccaaggccaagcaggagaaggtgagcgcccagtacctgagcgagatcgagatggccaaggcccagagagactacgagctgaagaaggccgcctacgacatcgaggtgaacaccagaagagcccaggccgacctggcctaccagctgcaggtggccaagaccaagcagcagatcgaggagcagagagtgcaggtgcaggtggtggagagagcccagcaggtggccgtgcaggagcaggagatcgccagaagagagaaggagctggaggccagagtgagaaagcccgccgaggccgagagatacaagctggagagactggccgaggccgagaagagccagctgatcatgcaggccgaggccgaggccgccagcgtgagaatgagaggcgaggccgaggccttcgccatcggcgccagagccagagccgaggccgagcagatggccaagaaggccgaggccttccagctgtaccaggaggccgcccagctggacatgctgctggagaagctgccccaggtggccgaggagatcagcggccccctgaccagcgccaacaagatcaccctggtgagcagcggcagcggcaccatgggcgccgccaaggtgaccggcgaggtgctggacatcctgaccagactgcccgagagcgtggagagactgaccggcgtgagcatcagccaggtgaaccacaagcccctgagaaccgcctag

SEQ ID NO: 288513 - DNA, 696 bp, Artificial Sequence
  derived and/or modified sequence
gtgaagatccagggccagaacaaggagatgctggccgccgcctgccagatgttcctgggcaagaccgaggccgagatcgcccacatcgccctggagaccctggagggccaccagagagccatcatggcccacatgaccgtggaggagatctacaaggacagacagaagttcagcgagcaggtgttcaaggtggccagcagcgacctggtgaacatgggcatcagcgtggtgagctacaccctgaaggacatccacgacgaccaggactacctgcacagcctgggcaaggccagaaccgcccaggtgcagaaggacgccagaatcggcgaggccgaggccaagagagacgccggcatcagagaggccaaggccaagcaggagaaggtgagcgcccagtacctgagcgagatcgagatggccaaggcccagagagactacgagctgaagaaggccgcctacgacatcgaggtgaacaccagaagagcccaggccgacctggcctaccagctgcaggtggccaagaccaagcagcagatcgaggagcagagagtgcaggtgcaggtggtggagagagcccagcaggtggccgtgcaggagcaggagatcgccagaagagagaaggagctggaggccagagtgagaaagcccgccgaggccgagagatacaagctggagagactggccgaggccgagtag

SEQ ID NO: 288514 - DNA, 861 bp, Artificial Sequence
  derived and/or modified sequence
atgggcatcagcgtggtgagctacaccctgaaggacatccacgacgaccaggactacctgcacagcctgggcaaggccagaaccgcccaggtgcagaaggacgccagaatcggcgaggccgaggccaagagagacgccggcatcagagaggccaaggccaagcaggagaaggtgagcgcccagtacctgagcgagatcgagatggccaaggcccagagagactacgagctgaagaaggccgcctacgacatcgaggtgaacaccagaagagcccaggccgacctggcctaccagctgcaggtggccaagaccaagcagcagatcgaggagcagagagtgcaggtgcaggtggtggagagagcccagcaggtggccgtgcaggagcaggagatcgccagaagagagaaggagctggaggccagagtgagaaagcccgccgaggccgagagatacaagctggagagactggccgaggccgagaagagccagctgatcatgcaggccgaggccgaggccgccagcgtgagaatgagaggcgaggccgaggccttcgccatcggcgccagagccagagccgaggccgagcagatggccaagaaggccgaggccttccagctgtaccaggaggccgcccagctggacatgctgctggagaagctgccccaggtggccgaggagatcagcggccccctgaccagcgccaacaagatcaccctggtgagcagcggcagcggcaccatgggcgccgccaaggtgaccggcgaggtgctggacatcctgaccagactgcccgagagcgtggagagactgaccggcgtgagcatcagccaggtgaaccacaagcccctgagaaccgcctag

SEQ ID NO: 288515 - DNA, 1224 bp, Artificial Sequence
  derived and/or modified sequence
atggaacctgccgccgctctccacttctctttaccagcgagtctgctcctgctgttgttgctgctcctgctgtctttgtgcgccctggtctctggcctcggcagcaagcctctcatcgagatcaaagctcaggaagacggtagcatttggctggaatgtatcagcggaggctggtacccagagcctctgaccgtgtggagggacccatacggggaagtcgttccagcactgaaggaggtctccattgccgatgccgacggactgtttatggtgacaacggctgtgattattcgagataaatacgttcggaatgtgtcgtgcagcgtgaacaacacgcttctgggccaggagaaggagactgtgatatttatccccgagtcgtttatgccctcagcatcaccatggatggtagcactggctgtcatcctgacagcatctccctggatggtctctatgactgttatccttgccgtttttatcatcttcatggcggtttcaatttgctgtattaagaagcttcagagggagaagaagattctgagtggcgaaaagaaagtcgaacaggaggaaaaggaaatagctcagcaactgcaagaagaactgcgctggaggcgaacctttctccacgctgccgacgtggtccttgacccagacacggctcaccccgaattgttcttgagcgaggaccggagatccgtgcggaggggcccctaccgccagagggtccccgataatcccgaacggttcgactcccagccctgtgtcctgggatgggaatcctttgctagcggcaaacactactgggaggttgaagtggagaatgtcatggtgtggaccgtgggggtgtgccgtcattctgtagagcggaagggcgaggtgctcctgatcccacagaacggcttctggacccttgagatgttcggcaaccagtaccgggccctaagctcccccgaaagaattcttccactgaaggagtccctatgcagggtgggggtcttcctggactatgaagccggggatgtatccttctacaatatgcgggacaggtcccatatctacacctgcccacggtccgccttcacagtccccgtcaggccgttctttaggctcggtagcgacgactcacccatctttatttgccccgccctcactggtgcaagcggggtgatggttccggaagaaggactgaagttacatagagtgggcactcaccagtctttatag

SEQ ID NO: 288516 - DNA, 1224 bp, Artificial Sequence
  derived and/or modified sequence
atggagcctgctgctgccctgcacttcagcctgcctgccagcctgctgctgctgctgctgctgctgctgctgagcctgtgtgccctggtgtctggcctgggcagcaagcccctgattgagatcaaggcccaggaggatggcagcatctggctggagtgcatcagcggcggctggtacccagagcccctgactgtgtggagggacccctacggggaggtggtgcctgccctgaaggaggtgtccattgctgatgctgatggcctcttcatggtgaccacagctgtgatcatccgggacaagtatgtgagaaatgtgtcctgcagcgtgaacaacaccctgctgggccaggagaaggagaccgtcatcttcatccctgagagcttcatgcccagcgccagcccctggatggtggccctggccgtcatcctgacagccagcccctggatggtgtccatgaccgtcatcctggccgtgttcatcatcttcatggctgtgtccatctgctgcatcaagaagctgcagcgggagaagaagatcctgtctggagagaagaaggtggagcaggaggagaaggagatcgcccagcagctgcaggaggagctgcgctggaggaggaccttcctgcacgccgcagatgtggtgctggaccctgacacagcccaccctgagctgttcctgtctgaggaccggcgctctgtgcggcggggcccctaccggcagagggtgcctgacaaccctgagagatttgacagccagccctgtgtgctgggctgggagagctttgccagcggcaagcactactgggaggtggaggtggagaatgtgatggtgtggacagtgggcgtgtgccgccacagcgtggagaggaagggggaggtgctgctgatcccccagaatggcttctggaccctggagatgtttggaaaccagtaccgggccctgagcagccctgagcgcatcctgcccctgaaggagagcctgtgccgggtgggcgtcttcctggactatgaggccggagatgtgtccttctacaacatgagggacaggagccacatctacacctgccccaggtctgccttcaccgtgcctgtgcggcccttcttccggctgggcagtgatgacagccccatcttcatctgcccagccctgaccggggccagcggcgtgatggtgcctgaggagggcctgaagctgcaccgggtgggcacccaccagagcctgtag

SEQ ID NO: 288517 - DNA, 1224 bp, Artificial Sequence
  derived and/or modified sequence
atggagcccgccgccgccctgcacttcagcctgcccgccagcctgctgttgctcctcctgctcctgctcctcagcttgtgtgcgctggtgagtggcctcggatccaagccgctgatcgaaatcaaggcccaggaggacggtagcatctggctggaatgtattagtggcggatggtatccggagccacttaccgtgtggcgagacccttatggagaagtcgttcccgctctgaaagaggtgagcatcgccgatgccgacggtctgtttatggtgacgaccgcggtgattatcagagacaagtacgtccggaatgtgtcctgttccgtgaacaataccttgctgggtcaggagaaggaaacggtcatattcattcccgagtcattcatgccctcggcatctccgtggatggtggccctggcagtaatacttacagcgtcaccttggatggtatccatgaccgtgatcttggcggtcttcatcatttttatggcagtttcaatctgctgtatcaagaaacttcagagagagaaaaagatcttgtctggggaaaagaaggtggagcaggaagaaaaagagatcgcacagcagttgcaagaagaactgcggtggaggcgcactttcctgcatgctgccgacgtggtcctggatcccgacactgcacatcccgagctgtttcttagtgaagatcgacggagtgtccggcgcggaccttacagacagagggtgcctgacaacccagagagattcgattcccagccctgcgttctggggtgggagtcgtttgccagcggtaagcactattgggaagtggaggttgagaatgtgatggtttggacggttggagtgtgccgacattccgtagaacgcaaaggagaagttcttctgattccccagaacggtttttggaccctggaaatgttcggcaatcagtacagagctctctcttctcccgaacggatcttgccgctgaaggaaagcttgtgtcgcgttggggtctttctcgattacgaagccggggacgtttccttctacaatatgcgtgatcgttcacacatctacacatgcccgagaagtgcattcaccgtacccgtccggcccttttttcgattagggagcgacgactcgcccatatttatttgtccagctctgactggagcaagtggagtgatggtacccgaggagggcttaaaactacaccgggtgggcactcatcagagtctgtag

SEQ ID NO: 288518 - DNA, 1224 bp, Artificial Sequence
  derived and/or modified sequence
atggaaccagcagcagctctgcatttctctctccccgcaagcctgctgctcctgctgcttttacttcttctgtctctgtgtgccctggtttccggcttaggctccaagccccttattgagattaaggcacaggaggatggatccatttggctcgaatgtatctcaggcggatggtatcctgaaccgttgacagtctggagagacccctatggcgaggttgtgccagccttgaaagaggtttctatcgccgatgccgacggcctgttcatggttactacggccgtaataatccgggacaagtatgtgaggaacgtgagctgctcggtcaataacacactcctcgggcaggaaaaagagaccgtgatctttatccctgagtcattcatgccaagtgcctccccatggatggtggccctagccgtcattctaacggccagcccatggatggtgtcaatgacagtaatcttggcagtgtttataattttcatggcagtgtccatctgctgtatcaagaagctccaaagagaaaagaagattctaagtggcgaaaaaaaagtggagcaagaggaaaaggagattgcccagcagctccaggaggaacttcgttggagaagaactttcctccatgccgcagacgtcgtcttggatccagataccgcccatccagaactatttctgagtgaggatcgaaggtctgtgcggagaggcccttatcgccaacgggtgccagacaatcccgagcgcttcgactctcagccgtgtgtattgggctgggaaagcttcgcctcaggcaagcactattgggaagtggaagtggaaaacgtgatggtatggactgtgggcgtttgtcgtcacagcgtagagagaaaaggagaggtcctactcatcccccagaacgggttttggaccctcgagatgttcggaaatcaatatagggctttaagctccccggaacggattctccccttgaaagagtctctctgtagagtgggcgtgttccttgactatgaggccggagacgtcagtttctataacatgcgggaccggtctcacatctatacgtgtcctagatcggcttttactgtgcccgtacgcccattctttcgattggggtccgacgactctcccatttttatttgtcccgcattgacaggcgctagtggtgtgatggtgcctgaggagggactgaagctgcaccgggtgggtacccatcagtcactgtag

SEQ ID NO: 288519 - DNA, 3241 bp, Artificial Sequence
  derived and/or modified sequence
aatcttgggactttttggacacccagagaacaggtcccagataccgagtccgcaactccaaacatcgcgattaataggaggcctctggtctctgcctgccctgggtgctcatggaaccagctgctgctctgcacttctccctgccagcctccctcctcctcctcctgctcctcctccttctcagcctgtgtgcactggtctcaggccttgggtctaagcccctcattgaaatcaaggcccaagaggatgggagcatctggctggagtgcatatctggagggtggtacccagagcccctcacagtgtggagggacccctacggtgaggttgtgcccgccctgaaggaggtttccatcgctgatgctgacggcctcttcatggtcaccacagctgtgatcatcagagacaagtatgtgaggaatgtgtcctgctctgtcaacaacaccctgctcggccaggagaaggaaactgtcatttttattccagaatcctttatgcccagcgcatctccctggatggtggccctagctgtcatcctgaccgcatctccctggatggtgtccatgactgtcatcctggctgttttcatcatcttcatggctgtcagcatctgttgcatcaagaaacttcaaagggaaaaaaagattctgtcaggggaaaagaaagttgaacaagaggaaaaagaaattgcacagcaacttcaagaagaattgcgatggagaagaacattcttacatgctgctgatgtggtcctggatccagacaccgctcatcccgagctcttcctgtcagaggaccggagaagtgtgaggcggggcccctacaggcagagagtgcctgacaacccagagagattcgacagtcagccttgtgtcctgggatgggagagcttcgcctcagggaaacattactgggaggtggaggtggaaaacgtgatggtgtggactgtgggggtctgcagacacagtgttgagaggaaaggggaggtcctgctgattcctcagaatggcttctggaccctggagatgtttggaaaccaataccgggccctgtcctcccctgagaggattctccctttgaaggagtccctttgccgggtgggcgtcttcctggactatgaagctggagatgtctccttctacaacatgagggacagatcgcacatctacacatgtccccgttcagcctttactgtgcctgtgaggcccttcttcaggttagggtctgatgacagccccatcttcatctgccctgcactcacaggagccagtggggtcatggtgcctgaagagggcctgaaacttcacagagtggggacccaccagagcctatagaatcaattccttggactcacagccatgcagataagccctggccatctcagcagccaccgcacaacccccctaatgaaagacacgccctcctcccctctggtcacgtaagagaacatcttccagctgcctttttcacacccactccagccctctgccccagttttctcctcctcactagtctgtggctttagtagttcctttgcttgtaattatgggatgggatccaggcatagggaactagttgtttcatagctcccagtcaaaaagaaagtgagagaagctgttgggcagcgaacctactgtttaaaatcaggataaccacattaagcccaatatgccagttggcaccagatgctgtggacttggaatgaggccaacagggttcaccaggatgagagaggagagaggaatccacaggaccaccagaagggagagggaaccagatatgcagatcagagatagaggaagtggaaccagagagctgggagggaccaaggttgtaaggatggctaagtcccaccataagagctaaagggtcctgggagatgatggctcatttccacccaaccccaggatttccacagcacacacccacaggcctggacctgggatgaagatgaatgaagaacatggactcatgtggatgtggtttggctcagatgtccctgcaataaacaaggggtcagtacttagtccctgagtgtggttgaggtttgaggtcctggtcgagcagggcagtactggaccaggtctacgtcagcattcaggttcaatggggacaccagtggcttcaaacttcctgatctaattatgtttttagacacttagaagttattgaggactttaaagagcttttgtttatttgggttaatatttatgacatttgacattgaaacaaaaatttaaaatgttatcttttaatttatgttaaaatagcattaataaatcagttataggttaatgtagataggatgttttgtgaaaaagcaatctattgtgtccaaataaaaaaacaaaaagtgtgacactggttaactttttccagatctcatgtctggcttaataagagatatttgtattatcatatctgcctttgtattaaacctattggtatatcataggtcatgttagctcaaaaaaactttactgcacactactgagagaatgagatgaaaaacgattaatgtttcattattattattgtgaaaatattattaacactggggactccttaagagtacatcagagttctctctaggaatcccaaaaccacattttgaaactagaatagtggatcctggaagttaatccatgtgctggttaattttagatgtcaacctgactggattaaggaatacctagacagctggtacaacattatttctgggtgtgtctgtgagtgtgtttccagaagagattggcaagtgagtcagtgggaaattctctccttctgttggctgggtgcccaatacaacaaaaaggcagaggaaaggcaaattcttctctcctctggagctgagacactcttcttcttctgcccttggacatcagaactcctggctctccggcctttgaacttcaggacttgtaccaggaggccctgggttctcaggcctttggctttggactgagagttacacaatcagcttccctggttctgaggctttcagacttaaactgagccatgctaccagcatcccagggtctccagcctacagatgagctgttgtgcgatttcttagcctccataatcacatgagccaatctccttaataaatgcctgctcatagatctgtatctacatctatatctgtatgtgcatctatatctatgcctatatctatatctatatcatattgattttgtctctctggagaaccctgactaataaaatgaggcatctaaaa

SEQ ID NO: 288520 - DNA, 1224 bp, Artificial Sequence
  derived and/or modified sequence
atggagcccgccgccgccctgcacttcagcctgcccgccagcctgctgctgctgctgctgctgctgctgctgagcctgtgcgccctggtgagcggcctgggcagcaagcccctgatcgagatcaaggcccaggaggacggcagcatctggctggagtgcatcagcggcggctggtaccccgagcccctgaccgtgtggagagacccctacggcgaggtggtgcccgccctgaaggaggtgagcatcgccgacgccgacggcctgttcatggtgaccaccgccgtgatcatcagagacaagtacgtgagaaacgtgagctgcagcgtgaacaacaccctgctgggccaggagaaggagaccgtgatcttcatccccgagagcttcatgcccagcgccagcccctggatggtggccctggccgtgatcctgaccgccagcccctggatggtgagcatgaccgtgatcctggccgtgttcatcatcttcatggccgtgagcatctgctgcatcaagaagctgcagagagagaagaagatcctgagcggcgagaagaaggtggagcaggaggagaaggagatcgcccagcagctgcaggaggagctgagatggagaagaaccttcctgcacgccgccgacgtggtgctggaccccgacaccgcccaccccgagctgttcctgagcgaggacagaagaagcgtgagaagaggcccctacagacagagagtgcccgacaaccccgagagattcgacagccagccctgcgtgctgggctgggagagcttcgccagcggcaagcactactgggaggtggaggtggagaacgtgatggtgtggaccgtgggcgtgtgcagacacagcgtggagagaaagggcgaggtgctgctgatcccccagaacggcttctggaccctggagatgttcggcaaccagtacagagccctgagcagccccgagagaatcctgcccctgaaggagagcctgtgcagagtgggcgtgttcctggactacgaggccggcgacgtgagcttctacaacatgagagacagaagccacatctacacctgccccagaagcgccttcaccgtgcccgtgagacccttcttcagactgggcagcgacgacagccccatcttcatctgccccgccctgaccggcgccagcggcgtgatggtgcccgaggagggcctgaagctgcacagagtgggcacccaccagagcctgtag

SEQ ID NO: 288521 - protein, 155 aa, Artificial Sequence
  derived and/or modified sequence
MLRAHTSAHQWDLLHAGLDAFLVVGDVYRRDQIDSQHYPIFHQLEAVRLFSKHELFAGIKDGESLQLFEQSSRSAHKQETHTMEAVKLVEFDLKQTLTRLMAHLFGDELEIRWVDCYFPFTHPSFEMEINFHGEWLEVLGCGVMEQQLVNSGGAT

SEQ ID NO: 288522 - protein, 101 aa, Artificial Sequence
  derived and/or modified sequence
LFAGIKDGESLQLFEQSSRSAHKQETHTMEAVKLVEFDLKQTLTRLMAHLFGDELEIRWVDCYFPFTHPSFEMEINFHGEWLEVLGCGVMEQQLVNSGGAT

SEQ ID NO: 288523 - DNA, 468 bp, Artificial Sequence
  derived and/or modified sequence
atgctcagagcccacacttccgcacatcagtgggatctactccacgctggcctcgacgcctttctcgtagtcggtgacgtgtaccggcgtgaccagatcgattcccagcattatccaatctttcatcaacttgaggccgttaggctctttagtaaacatgagttattcgcggggattaaggacggagaatcccttcagttattcgaacaatcctcaagatccgctcataaacaggaaactcacacgatggaggcggtgaagctggtcgagtttgatcttaaacaaaccttgacccgtctgatggcccacctgttcggcgatgagctcgagatcagatgggtcgactgctactttccctttactcacccttcattcgagatggaaataaatttccacggtgaatggttggaggtgttgggctgcggtgtgatggagcagcagctagtgaattccggcggtgccacctag

SEQ ID NO: 288524 - DNA, 306 bp, Artificial Sequence
  derived and/or modified sequence
ttgttcgctggaatcaaggacggggagagtctccaattgttcgaacagtcttcccgatcagctcacaagcaagaaactcacacaatggaggcagtcaagctggtcgagttcgatttgaagcagaccctcacgcggttgatggcacacctgtttggagacgaactcgagattcgatgggtcgactgctactttcctttcacacatccaagcttcgaaatggagatcaattttcacggtgaatggctggaggtgctaggctgtggtgtgatggagcagcagctcgtcaactctggcggcgccacttag

SEQ ID NO: 288525 - DNA, 468 bp, Artificial Sequence
  derived and/or modified sequence
atgctgcgggcccacaccagcgcccaccagtgggacctgctgcacgccggcctggatgccttcctggtggtgggagatgtgtacagaagagaccagattgacagccagcactaccccatcttccaccagctggaggccgtgcggctcttcagcaagcatgagctgtttgctggcatcaaggatggagagagcctgcagctgtttgagcagagcagccgcagcgcccacaagcaggagacccacaccatggaggccgtgaagctggtggagtttgacctgaagcagaccctgacccggctgatggcccacctgtttggagatgagctggagatccgctgggtggactgctacttccccttcacccaccccagctttgagatggagatcaacttccacggggagtggctggaggtgctgggctgcggcgtgatggagcagcagctggtgaacagcggcggggccacctag

SEQ ID NO: 288526 - DNA, 306 bp, Artificial Sequence
  derived and/or modified sequence
ctctttgctggcatcaaggatggagagagcctgcagctgtttgagcagagcagccgcagcgcccacaagcaggagacccacaccatggaggccgtgaagctggtggagtttgacctgaagcagaccctgacccggctgatggcccacctgtttggagatgagctggagatccgctgggtggactgctacttccccttcacccaccccagctttgagatggagatcaacttccacggggagtggctggaggtgctgggctgcggcgtgatggagcagcagctggtgaacagcggcggggccacctag

SEQ ID NO: 288527 - DNA, 468 bp, Artificial Sequence
  derived and/or modified sequence
atgctgcgggcccacaccagcgcccaccagtgggacctgctgcacgccggactcgacgctttcctcgtggtcggcgatgtgtaccgacgggatcagattgactcacagcactaccccatcttccaccagctcgaagccgtgaggttgttttccaaacacgagctgtttgccgggatcaaagacggcgagtcactacagctgtttgagcagtcatcccgctcggcccataagcaagaaacacacactatggaagcagtgaagctggtggaatttgatctgaaacagactcttacgcgcctgatggctcacctatttggggacgaactggagattcgctgggtggattgttatttcccctttacccacccgagttttgagatggagatcaatttccatggggagtggctggaagtcctgggatgcggagtcatggagcaacagctcgttaattctggaggggctacttag

SEQ ID NO: 288528 - DNA, 306 bp, Artificial Sequence
  derived and/or modified sequence
ctgttcgccggcatcaaggacggcgagagcctgcagctgttcgagcagtcttcgagatctgcacataaacaagaaactcatacaatggaggcagtcaaactggttgagttcgacctgaagcaaaccctgactagactgatggcccacctgttcggtgacgagctggagatccggtgggtggattgttactttcccttcacacatcccagtttcgaaatggagatcaacttccacggagagtggttggaggtcctgggttgcggcgtcatggaacagcagctcgtaaatagcggaggagccacgtag

SEQ ID NO: 288529 - DNA, 1249 bp, Artificial Sequence
  derived and/or modified sequence
tttcaagggtgacttgatttcgcctgatcctggtcggcagggtggggtttcttggcattcctcaggccgggggatgcgacgtctgggtgtggaggtgatgagctaggggttctgtggcactccggctctgctcagggcgacctgcgtaggggcctctggggcaggcccgctttctgtcaaaatggcagcgcccagcgtgcgcgggtatctctgaagttggggtttaagattcttgcccgtgagagcgaacgagcctgccgtacttctgattttgaaacacctgggtctgggcttcccgggcgagcggtggaacctgtgagaagtttctacaatggtgggctcagctctcaggagaggtgcccatgcatatgtctacctggtgagtaaggccagtcacatctccagaggccatcagcaccaggcctggggatcgaggcctcctgcagcagagtgtgccacccaaagagctccaggcagtgtggtggagctgctgggcaaatcctaccctcaggacgaccacagcaacctcacccggaaggtcctcaccagagttggcaggaacctgcacaaccagcagcatcaccctctgtggctgatcaaggagagggtgaaggagcacttctacaagcagtatgtgggccgctttgggaccccgttgttctcggtctacgacaacctttctccagtggtcacgacctggcagaactttgacagcctgctcatcccagctgatcaccccagcaggaagaagggggacaactattacctgaatcggactcacatgctgagagcgcacacgtctgcacaccagtgggacttgctgcacgcgggactggatgccttcctggtggtgggtgatgtctacaggcgtgaccagatcgactcccagcactaccctattttccaccagctggaggccgtgcggctcttctccaagcatgagttatttgctggtataaaggatggagaaagcctgcagctctttgaacaaagttctcgctctgcgcataaacaagagacacacaccatggaggccgtgaagcttgtagagtttgatcttaagcaaacgcttaccaggctcatggcacatctttttggagatgagctggagataagatgggtagactgctacttcccttttacacatccttcctttgagatggagatcaactttcatggagaatggctggaagttcttggctgcggggtgatggaacaacaactggtcaattcaggcggcgccacctga

SEQ ID NO: 288530 - DNA, 434 bp, Artificial Sequence
  derived and/or modified sequence
ttatttgctggtataaaggatggagaaagcctgcagctctttgaacaaagttctcgctctgcgcataaacaagagacacacaccatggaggccgtgaagcttgtagagtttgatcttaagcaaacgcttaccaggctcatggcacatctttttggagatgagctggagataagatgggtagactgctacttcccttttacacatccttcctttgagatggagatcaactttcatggagaatggctggaagttcttggctgcggggtgatggaacaacaactggtcaattcaggcggcgccacctgactgagagaaaatggaaacacgaggttgctgattgaattctacgcatatctataggcatttcagaaagatctgtctggctcttttctgtaagaccattgcttaataaaaatgatggcttctaaatgtaa

SEQ ID NO: 288531 - DNA, 468 bp, Artificial Sequence
  derived and/or modified sequence
atgctgagggctcacacatctgctcaccagtgggacctgttgcacgcgggactggacgcattcctggtcgtgggggatgtgtaccggcgtgaccagatagactcccagcattatccaatatttcaccagctggaagccgtccgcctctttagtaagcacgagctgtttgctgggattaaagacggcgaatcactacagctgtttgaacaatctagcagatcagcacacaagcaagagactcacacaatggaagctgtgaagctggtcgagttcgatctgaaacagacactgaccaggctcatggcgcacctgtttggagacgagctggagattcgctgggtggattgctatttcccgtttactcacccgtcattcgagatggaaattaatttccacggtgaatggttagaggtgctgggatgcggagtaatggaacagcagttagttaactccggaggtgcaacttag

SEQ ID NO: 288532 - DNA, 306 bp, Artificial Sequence
  derived and/or modified sequence
ctctttgcaggaatcaaagatggagagtctctccaacttttcgagcagagcagtaggtctgctcataagcaggagacccatacgatggaggccgtgaaactggtggaatttgatttaaagcaaacattgaccaggctgatggcccacttgtttggcgatgaacttgagatcagatgggttgattgctacttcccctttactcatcctagttttgaaatggaaataaattttcatggcgaatggctggaggtgctaggttgtggcgtgatggaacagcagctcgtgaactccggcggtgcaacctag

SEQ ID NO: 288533 - DNA, 468 bp, Artificial Sequence
  derived and/or modified sequence
atgctgagagcccacaccagcgcccaccagtgggacctgctgcacgccggcctggacgccttcctggtggtgggcgacgtgtacagaagagaccagatcgacagccagcactaccccatcttccaccagctggaggccgtgagactgttcagcaagcacgagctgttcgccggcatcaaggacggcgagagcctgcagctgttcgagcagagcagcagaagcgcccacaagcaggagacccacaccatggaggccgtgaagctggtggagttcgacctgaagcagaccctgaccagactgatggcccacctgttcggcgacgagctggagatcagatgggtggactgctacttccccttcacccaccccagcttcgagatggagatcaacttccacggcgagtggctggaggtgctgggctgcggcgtgatggagcagcagctggtgaacagcggcggcgccacctag

SEQ ID NO: 288534 - DNA, 306 bp, Artificial Sequence
  derived and/or modified sequence
ctgttcgccggcatcaaggacggcgagagcctgcagctgttcgagcagagcagcagaagcgcccacaagcaggagacccacaccatggaggccgtgaagctggtggagttcgacctgaagcagaccctgaccagactgatggcccacctgttcggcgacgagctggagatcagatgggtggactgctacttccccttcacccaccccagcttcgagatggagatcaacttccacggcgagtggctggaggtgctgggctgcggcgtgatggagcagcagctggtgaacagcggcggcgccacctag

SEQ ID NO: 288535 - protein, 1031 aa, Artificial Sequence
  derived and/or modified sequence
SCHCTPSWPPVPEKRPPEIQHFRMSDDVHSLGKVTSDLAKRRKLNSGGGLSEELGSARRSGEVTLTKGDPGSLEEWETVVGDDFSLYYDSYSVDERVDSDSKSEVEALTEQLSEEEEEEEEEEEEEEEEEEEEEEEEDEESGNQSDRSGSSGRRKAKKKWRKDSPWVKPSRKRRKREPPRAKEPRGVNGVGSSGPSEYMEVPLGSLELPSEGTLSPNHAGVSNDTSSLETERGFEELPLCSCRMEAPKIDRISERAGHKCMATESVDGELSGCNAAILKRETMRPSSRVALMVLCETHRARMVKHHCCPGCGYFCTAGTFLECHPDFRVAHRFHKACVSQLNGMVFCPHCGEDASEAQEVTIPRGDGVTPPAGTAAPAPPPLSQDVPGRADTSQPSARMRGHGEPRRPPCDPLADTIDSSGPSLTLPNGGCLSAVGLPLGPGREALEKALVIQESERRKKLRFHPRQLYLSVKQGELQKVILMLLDNLDPNFQSDQQSKRTPLHAAAQKGSVEICHVLLQAGANINAVDKQQRTPLMEAVVNNHLEVARYMVQRGGCVYSKEEDGSTCLHHAAKIGNLEMVSLLLSTGQVDVNAQDSGGWTPIIWAAEHKHIEVIRMLLTRGADVTLTDNVSERLVEEENICLHWASFTGSAAIAEVLLNARCDLHAVNYHGDTPLHIAARESYHDCVLLFLSRGANPELRNKEGDTAWDLTPERSDVWFALQLNRKLRLGVGNRAIRTEKIICRDVARGYENVPIPCVNGVDGEPCPEDYKYISENCETSTMNIDRNITHLQHCTCVDDCSSSNCLCGQLSIRCWYDKDGRLLQEFNKIEPPLIFECNQACSCWRNCKNRVVQSGIKVRLQLYRTAKMGWGVRALQTIPQGTFICEYVGELISDAEADVREDDSYLFDLDNKDGEVYCIDARYYGNISRFINHLCDPNIIPVRVFMLHQDLRFPRIAFFSSRDIRTGEELGFDYGDRFWDIKSKYFTCQCGSEKCKHSAEAIALEQSRLARLDPHPELLPELGSLPPVNT

SEQ ID NO: 288536 - protein, 1031 aa, Artificial Sequence
  derived and/or modified sequence
SCHCTPSRPPVPEKRPPEIQHFRMSDDVHSLGKVTSDLAKRRKLNSGGGLSEELGSARRSGEVTLTKGDPGSLEEWETVVGDDFSLYYDSYSVDERVDSDSKSEVEALTEQLSEEEEEEEEEEEEEEEEEEEEEEEEDEESGNQSDRSGSSGRRKAKKKWRKDSPWVKPSRKRRKREPPRAKEPRGVNGVGSSGPSEYMEVPLGSLELPSEGTLSPNHAGVSNDTSSLETERGFEELPLCSCRMEAPKIDRISERAGHKCMATESVDGELSGCNAAILKRETMRPSSRVALMVLCETHRARMVKHHCCPGCGYFCTAGTFLECHPDFRVAHRFHKACVSQLNGMVFCPHCGEDASEAQEVTIPRGDGVTPPAGTAAPAPPPLSQDVPGRADTSQPSARMRGHGEPRRPPCDPLADTIDSSGPSLTLPNGGCLSAVGLPLGPGREALEKALVIQESERRKKLRFHPRQLYLSVKQGELQKVILMLLDNLDPNFQSDQQSKRTPLHAAAQKGSVEICHVLLQAGANINAVDKQQRTPLMEAVVNNHLEVARYMVQRGGCVYSKEEDGSTCLHHAAKIGNLEMVSLLLSTGQVDVNAQDSGGWTPIIWAAEHKHIEVIRMLLTRGADVTLTDNVSERLVEEENICLHWASFTGSAAIAEVLLNARCDLHAVNYHGDTPLHIAARESYHDCVLLFLSRGANPELRNKEGDTAWDLTPERSDVWFALQLNRKLRLGVGNRAIRTEKIICRDVARGYENVPIPCVNGVDGEPCPEDYKYISENCETSTMNIDRNITHLQHCTCVDDCSSSNCLCGQLSIRCWYDKDGRLLQEFNKIEPPLIFECNQACSCWRNCKNRVVQSGIKVRLQLYRTAKMGWGVRALQTIPQGTFICEYVGELISDAEADVREDDSYLFDLDNKDGEVYCIDARYYGNISRFINHLCDPNIIPVRVFMLHQDLRFPRIAFFSSRDIRTGEELGFDYGDRFWDIKSKYFTCQCGSEKCKHSAEAIALEQSRLARLDPHPELLPELGSLPPVNT

SEQ ID NO: 288537 - DNA, 3096 bp, Artificial Sequence
  derived and/or modified sequence
tcctgtcattgtactccaagttggccgcctgtgcctgaaaaaaggccccctgagatacaacatttcagaatgagcgacgatgtacatagcctgggaaaagtgactagcgatcttgccaagcggcgaaaactcaacagcggtggggggctgagcgaggaactgggttcagcgcgtcggtctggggaggtgactctgacaaagggtgatcccgggtccctggaagaatgggaaaccgtcgtgggggacgactttagtctttattacgacagctattccgtggacgagagagtggactctgatagtaaatccgaggtagaggctctgactgaacagctcagtgaggaggaagaggaagaggaagaggaagaagaggaagaggaggaagaagaagaggaagaggaggaagaagaggatgaagagagtggtaatcaatcagaccggagcggctcaagcggcagacgcaaggcaaagaagaagtggcggaaggattctccctgggtaaagccctcacgcaaacgaagaaagcgggagcctccccgggctaaagagcctcgtggagtcaacggtgtagggtcgtccggaccatctgaatatatggaggtcccactgggctccctggagctgcctagtgagggaactctgagtccaaatcacgctggggtttcaaacgacacctcaagcctggagactgaacgcggattcgaagagcttcctctttgttcctgtcgaatggaggccccgaaaatcgataggattagcgagcgcgccggtcacaagtgcatggcgactgaaagcgtggatggcgagctcagcgggtgcaacgcggctatactcaagcgcgagaccatgcgtccatcatccagggtcgcactgatggtcctctgtgagacccaccgcgcacgcatggtcaaacaccactgctgtcccggctgtggttatttctgcaccgcaggaacctttctcgagtgtcaccctgacttccgcgtagcccatcgcttccataaagcatgcgtgtcacagttgaatgggatggtgttttgcccccattgcggagaagacgcttcagaggctcaggaagtgaccatacctagaggcgacggtgtgaccccaccagctggtaccgccgcccctgcacccccccccctttctcaagatgtgcccgggagggctgacactagtcagccttccgccaggatgcgcggccacggcgagccaaggcggcccccttgcgaccctctcgccgacacaattgactcttcaggcccttctctgaccttgccaaatgggggctgcctcagcgccgtcggattaccactgggccctgggagggaggcgctcgaaaaggcccttgtgatacaagaatcagaacgccgtaaaaagctgcgctttcacccaagacagctgtacctgtcagttaagcaaggagagctacagaaggtgattcttatgctcttagacaacctggatccaaactttcagtctgatcagcagtcaaaaaggacacctctgcatgctgcagcccagaaggggtccgtagagatatgccacgtgcttcttcaggcaggcgccaatataaacgctgtggataagcagcaacgcacccccctcatggaagctgtcgttaacaaccacttggaagtcgcgagatatatggttcagagaggagggtgcgtgtattctaaggaagaagatggctccacgtgcttgcaccacgccgctaaaattggcaaccttgaaatggtctccctcctgttgagtacaggacaggtagacgtgaatgcgcaggatagcggaggctggacgccaattatatgggcggcagagcacaagcacatcgaagtcatccggatgcttttgaccaggggcgcagacgtcaccttaacagacaacgtgagcgagaggctcgtggaagaggaaaacatatgcctgcactgggccagttttacaggtagtgcagcaattgctgaagtgctcctgaatgctcggtgtgatctccacgctgtgaactatcatggcgatacacctcttcacatcgctgcccgggagtcttaccacgactgtgttctcttgtttctgagccgaggtgccaatccagagctgaggaataaagagggagataccgcgtgggacttgacgccagagcgctccgatgtgtggttcgcgctacaacttaatcgaaagctgagattaggcgtcggaaatagagccattcgcactgaaaaaattatctgcagagacgtagccagaggatatgaaaatgtgcccatcccttgtgtgaacggcgtcgatggtgagccttgtcccgaagactataagtatatctctgaaaattgcgagactagtacaatgaacatagacaggaatataacacacttgcagcattgcacttgcgtggatgattgctcctcttcaaattgcctctgcggccaactgagcataaggtgttggtatgacaaggacggccgcctcctccaagagttcaacaagatcgaaccacctctgatcttcgagtgcaatcaggcatgctcatgctggaggaattgtaagaatcgggtggtgcagtctggcatcaaggttcgcctgcaactgtacaggaccgctaagatgggttggggagttcgcgcgcttcagacgattccgcaggggacgttcatttgcgagtacgtcggcgaactgatcagcgacgccgaagcagatgtgcgagaagatgactcttatctgtttgatctggataataaggacggagaggtgtattgcattgacgcacgttactacggtaacataagtcggtttattaatcacctctgcgacccaaatatcataccggtgagggtgtttatgctacaccaagacttacggtttccccgtatagccttcttttccagtagggatatcagaacaggagaagagttaggcttcgactacggggataggttttgggacatcaagtcaaaatacttcacttgtcagtgcgggagcgagaaatgtaagcacagcgctgaagccatcgccttggaacagagtcgactggccaggctggacccccaccccgagctgctacctgagctcggctcgctcccacctgtgaacacctag

SEQ ID NO: 288538 - DNA, 3096 bp, Artificial Sequence
  derived and/or modified sequence
tcatgtcactgcactccctccaggccccctgtccctgagaaacggccacccgaaatccagcatttccgcatgtctgacgatgtacattccctggggaaggtgacttcggatcttgccaaacggcggaagctgaactccggaggcgggctcagtgaagagttgggctccgctcggcgaagcggcgaggtcacccttaccaaaggcgatcccggatcacttgaagagtgggagactgtcgtaggtgatgatttctctctgtactacgattcttacagcgtagacgaacgcgtggatagtgattcaaaatctgaggtagaggctctgacggagcagttgagcgaggaagaggaggaggaggaggaggaggaggaggaggaagaagaagaggaggaagaagaagaagaagaagaagacgaagagtccgggaatcagagcgacagatcgggaagtagcgggcgccggaaagcaaaaaagaagtggaggaaggacagcccttgggtgaaaccaagtcgtaaaaggcggaaacgtgagcccccccgcgcgaaagagccgaggggcgtgaacggagtggggtcctccggcccatcagagtatatggaagtacctcttggcagcctggaactcccaagcgaggggacactatcccccaatcacgccggggtaagtaatgatacaagcagtttggagactgagaggggttttgaagaactgccactgtgttcatgtagaatggaagctcctaagatagacagaatctcggagagagccgggcacaagtgcatggctactgagtctgtggacggtgaactctccggctgcaatgctgcaatactaaaaagggagactatgagaccaagctctcgcgtcgcattaatggtactatgtgaaacacacagggccagaatggtaaagcatcattgctgcccaggctgcgggtacttctgcacagctgggacattccttgaatgccatccggatttccgggtagcccatagatttcataaggcctgcgtgtcccagttgaacgggatggtcttctgcccacattgcggcgaggacgcgagcgaggcacaggaggtaacaattcctcgaggagatggcgttacacctcccgctgggaccgcggcccctgcccctcccccacttagccaggacgtacccggtcgggccgacacctctcagcctagtgcaagaatgcgggggcatggggagccaaggaggccgccgtgcgatcccctggccgacactattgactcatcaggcccatccctgacactgcctaacgggggatgcctgtctgctgtgggactccccctgggacccggacgagaggctctggagaaagcgctcgtcatccaggagtcagaaagaagaaagaaattgcgctttcatcctagacagttgtacctctctgttaagcagggcgaactgcagaaggtgattttgatgctgttggataatttggaccctaattttcagtcagaccagcagagtaaacggaccccgctccacgctgccgcacagaagggatccgttgagatttgccatgtgctgctgcaggcaggtgcgaacatcaacgccgtcgataagcagcagcggaccccccttatggaagctgtggttaacaatcatctagaggtcgcaagatacatggtgcagagggggggttgtgtttattccaaagaagaggacgggtccacgtgtcttcaccatgcagctaaaatcggcaatctggagatggtgtccctgctgctgtcaacggggcaggtagacgtgaacgctcaggacagcggtgggtggacaccaataatctgggcggcagagcacaagcacatcgaggttattcggatgcttctgaccaggggggcagatgtgactctgactgataacgtgagtgaacgtctggttgaagaagaaaacatttgcctgcattgggcctcattcaccggaagcgctgccatcgcggaagttctgttgaatgcacggtgcgacttgcacgctgtcaactatcatggcgatactcccctccacattgccgccagagaaagttaccatgactgcgtgcttctattcctcagcaggggggctaaccctgaactccgaaacaaggagggggacaccgcatgggatttgactccggagaggtctgatgtgtggttcgcacttcagttaaaccgaaaacttcgcttaggcgtgggcaaccgggccatcaggactgaaaaaattatctgcagggacgtggcgcgcggatatgaaaacgtacctatcccctgtgtgaacggagtagatggtgaaccatgcccagaggattataagtacatcagtgagaactgtgaaacttctaccatgaacatagatcgaaacataactcatctgcagcattgcacctgtgttgatgactgctccagttctaactgcctctgtggacagctctccattaggtgctggtacgacaaggatgggcggctcctccaggagtttaacaaaatcgaacctcctctcatcttcgagtgcaaccaggcctgtagctgctggcgtaattgtaagaatcgcgtcgtgcagtctggtattaaagtgagattgcagctctatagaaccgccaagatgggttggggcgtgcgagcgctgcaaacaataccccagggtacctttatctgtgaatatgttggagaactgatctctgatgccgaagctgacgtgagggaagacgactcctacttatttgatttagataacaaggacggcgaggtgtactgcattgacgccaggtactacggtaatatcagtcgcttcatcaaccacctgtgcgatccaaacattattccagtgcgcgttttcatgctgcaccaagacttgaggttcccgcggatcgctttcttcagcagccgcgacatcaggactggggaggaactcggatttgactacggcgacagattttgggatattaagagcaagtatttcacttgtcaatgcggcagcgaaaaatgcaagcatagcgccgaggcaatcgccttggaacagtctagactcgccagactagatcctcaccctgagttgctgccggaactcggcagtctcccaccagttaatacttag

SEQ ID NO: 288539 - DNA, 3096 bp, Artificial Sequence
  derived and/or modified sequence
tcatgtcactgcactccttcatggccaccagtgcccgaaaagagaccacctgaaatacaacattttcgaatgtccgacgacgtgcactctctgggaaaggtaaccagcgacctggccaagaggcggaagctgaacagtggagggggactttctgaagagctgggttctgcgcgcaggagcggtgaggtgactttgacgaaaggtgatcccgggtccctcgaggaatgggagacagtggtgggcgacgacttcagtttgtattacgactcctacagcgttgacgagcgcgtggactcagactcaaagagtgaggtggaggcgcttaccgagcaactctccgaggaggaggaggaggaagaagaagaggaagaggaagaggaggaggaggaggaggaagaagaagaggaggaagacgaggagtctggaaatcagagcgacagatccgggagctccggtcggcgcaaagctaagaaaaaatggagaaaggattctccttgggtgaagcccagccggaagaggaggaaacgcgagccccctagagccaaagagcctaggggagttaacggcgtaggttcttccgggcctagtgaatacatggaggtgcccttgggaagtttagaactgcctagcgagggcactctgtcccccaatcacgctggtgtatctaatgacaccagttccctggagaccgagcggggctttgaggagctgcctctgtgttcttgccgcatggaggcacctaagatcgatagaatttccgaacgagccggccataagtgcatggcaacggaatcagtcgacggcgagctgagcggctgcaatgctgcgatcctcaagagagagactatgcggccgtcatcacgcgtggccctaatggtgctctgcgaaacccatagggcccggatggtgaagcatcactgttgtcccggctgtggctatttctgtacagctggcacgtttctcgagtgtcatccagacttcagggtggcccaccggttccacaaagcctgtgtgagccagctcaacggaatggttttttgcccccactgtggcgaagatgccagcgaggcgcaagaagttaccataccacgaggtgacggggtgacacctcctgccgggacagccgccccagcccccccacccctttcacaggacgtccctgggcgagccgacacctcgcagccatcagctcgcatgcggggccatggtgagcccaggcggccaccatgcgatccactggctgacaccatagactctagcggcccgtcactcacccttcccaacggtggatgtttatccgccgtgggattacctctaggtcctgggagagaagccttagagaaagctcttgtgatccaggagtcagaacgacggaagaagttgagattccatccgcggcagctgtatctgtcagtgaagcagggagagctccagaaggtgattttgatgctcctcgataatcttgatcctaatttccagagtgatcagcagagcaaacgcactccactgcacgctgctgctcagaagggatccgtcgaaatctgtcacgtgctcctacaggctggggctaacattaacgcagtggacaagcagcagcggacacctctgatggaggccgtggttaataaccacctggaggttgcacggtatatggtgcaacgcggaggctgcgtgtactcgaaggaagaggacggtagtacatgcttgcatcatgctgccaaaattgggaatctggaaatggtgagcctgctcctctcaaccggtcaggttgacgtcaatgcgcaggattctgggggctggactcctataatctgggcggccgagcacaaacacatcgaagtaatcaggatgttgcttacgcgaggcgctgatgtgaccctcactgacaatgttagcgaaaggctggtcgaggaagaaaacatctgcctacactgggcgagcttcaccgggagtgcggccattgctgaagtgctcctcaacgcccgttgtgaccttcatgccgtcaactatcacggggatacgcctctgcatatcgccgctcgggaaagttaccacgactgcgtactcctattcctttctcgcggagctaatcccgagttgcggaacaaggagggagacacggcatgggacctcacacccgaacgatccgatgtttggttcgcgctgcagctcaatcgcaaactgcggctgggggtgggaaatagggcaatcagaaccgaaaagatcatctgtagagacgtggccagaggatatgagaatgtcccaatcccatgtgtgaacggggtggacggcgaaccctgccctgaggactataagtacatctcagagaattgcgagaccagcaccatgaacattgaccggaatataacgcatttgcagcactgtacctgcgtggatgattgttccagctcgaattgcctgtgtggacagctaagcatacggtgttggtatgacaaggatgggcggcttcttcaggagtttaataagatcgagccgcctctaatatttgagtgcaatcaggcttgctcctgctggcggaattgtaaaaacagagtggtccaatcaggcattaaagtgcggctccagctatatcgtacagccaagatgggatggggagtcagagccctccagaccattccccagggtacctttatctgcgaatatgtcggcgaactcataagcgatgctgaggccgacgtccgggaggatgactcttatctctttgacctggataataaggacggagaggtatactgtatcgacgctaggtactacggaaatatcagccgatttatcaaccacttatgtgatccaaacatcatccccgtgagggtgtttatgctgcaccaggacctccggtttcctcgcattgcatttttctctagccgcgacattcgaacgggcgaggaacttgggttcgactatggcgatagattttgggacatcaaaagcaagtacttcacctgtcagtgtggctcagaaaagtgtaagcactcagcagaggcaatcgccctggagcagagcaggctggcccggctggatcctcatcccgaactgttgcctgaactggggagcctgccccccgtgaacacctag

SEQ ID NO: 288540 - DNA, 3096 bp, Artificial Sequence
  derived and/or modified sequence
agttgccactgcaccccaagctggcctcccgtaccagaaaaacgtccacctgagatacagcatttccgaatgtcggatgatgtacatagccttgggaaggtcacctcagatttggccaagcgtcggaagctgaattccggcggcggactctccgaggagctgggcagcgcaaggcggtccggcgaggtgaccctgaccaagggtgatcccggatctctcgaggagtgggagaccgtggtgggcgacgacttttccctgtactacgatagctactcagttgacgagagagtggattccgacagtaagtcagaggtggaggcactgactgaacagctgagtgaggaagaggaggaagaggaagaagaggaagaggaggaagaggaggaggaggaagaggaggaggaggaggaggacgaagagtccggtaatcagagtgacaggtccggtagcagcggacggcgaaaagccaagaagaagtggcggaaagattcgccatgggtgaaaccatcacggaagcgtcgcaagcgtgagccgcctagagcgaaggagccaaggggggttaatggtgtcggaagctccggcccttccgagtatatggaagtccctctgggcagtctggaactgccctctgaaggtacactgagtccaaaccatgctggagtgtcgaacgatacctcctcattggagactgagagagggttcgaagaactcccactttgctcgtgccgtatggaggctccaaaaattgaccggatttctgaacgagccggccataagtgcatggcaactgaatctgtggacggcgagttgtcaggctgcaatgctgccatcctcaagcgagagacaatgcggccatcgtcccgggtagcgctgatggtactttgcgagacgcacagggccaggatggtcaaacaccactgctgtccaggctgcggctacttttgcacagctggtactttcctcgagtgccatcccgacttcagagtggcccatcgttttcataaggcctgtgtgtcccagctgaacgggatggtgttctgtcctcactgcggagaggatgctagtgaggcccaggaagtgactatccccagaggggacggagtcacaccaccagctggaacagcggctcccgctcccccaccactttcccaggatgtgcccggacgggcggatacaagccagccttcagccaggatgagaggccacggagagccccggagaccgccatgcgacccgctggccgacacaatcgatagcagcggacccagtctgactctcccgaatggaggatgccttagcgcagtgggattgcctttggggccaggtcgagaagctctagagaaagctctcgttattcaagagagcgagcgaagaaaaaagctccgcttccacccgcgtcagctctatcttagcgtcaagcagggagaattgcagaaagtcatactgatgctcctggataacctggaccccaactttcagtcagaccagcagtctaagaggacccctctgcacgcagccgcacagaagggatccgtggaaatctgccacgtgctgctgcaagcgggagccaatataaacgctgtggacaagcaacaacgaaccccactgatggaggccgtcgttaataaccacctcgaagttgcaaggtatatggttcaaagaggtgggtgcgtctactccaaggaagaggacgggagcacgtgcttacatcatgccgccaagatcggaaaccttgagatggtgtctctgcttttaagcacaggccaggtggacgtaaacgcacaggattctggcggttggacccccatcatatgggcagccgagcacaaacacattgaggtgattcggatgcttctcacgagaggggccgacgtgaccctgacagataacgtgtccgaacggctcgtggaggaggaaaacatctgtttgcactgggcctcgtttactgggtccgccgcgatcgccgaagttcttcttaacgcacggtgcgacctgcatgcagtcaactaccatggcgatactcccctccatattgccgccagggaatcctatcacgattgtgttctgttgttcctgtccaggggcgcaaatccagaacttaggaataaggaaggggacacagcatgggaccttacacctgaacgctccgacgtgtggttcgcactccagctgaataggaagctgcgtctgggcgtcgggaacagggcaattcggactgagaagatcatttgcagggacgtcgccagaggatatgaaaacgtccccattccttgcgtgaatggggttgacggagagccttgtccagaggattacaagtatatttctgaaaactgcgaaacctccactatgaacattgaccgcaatataactcacctgcagcattgcacttgcgttgacgactgctcctcttccaattgtctgtgcggacagctctcaattcgttgctggtatgacaaagatggtcggctgttacaggagtttaacaagattgagcctccactaatcttcgaatgcaatcaggcttgtagctgttggcggaattgtaaaaatagagtcgttcaatcaggtatcaaagtcaggcttcagctttaccgcaccgctaaaatggggtggggagtgagggctctccaaacgattccgcaaggcacatttatctgtgagtatgtcggggagttgatctcagacgcggaggccgacgtccgcgaggatgacagctatttgtttgatttggataataaggatggcgaggtgtattgcattgatgctaggtactacggaaacatctcaagattcatcaaccacctgtgcgatcctaacattatccccgtccgggtgttcatgcttcaccaagatctgaggtttcccaggattgccttcttttcctctcgagacatccggactggagaagaactgggctttgattacggagaccggttctgggacataaagagtaagtacttcacctgccagtgtggctctgagaagtgcaagcatagtgccgaggccatcgcacttgaacaaagccggctggcccgtctcgaccctcaccccgagctgctgcccgaactgggctccctcccacctgtcaatacttag

SEQ ID NO: 288541 - DNA, 3096 bp, Artificial Sequence
  derived and/or modified sequence
tcttgccattgcacccccagcagaccaccagttccagagaagagacctccagaaattcaacacttcaggatgtctgatgacgttcatagcctcggcaaggtgacgagtgatctggccaaacgcagaaagctgaactccggtggaggactttctgaagagcttggtagcgcacggcgcagcggagaagtcactttgaccaaaggggacccaggctcactggaagagtgggagactgtagtgggtgacgatttcagtctatactatgacagttattctgtggatgaacgcgtagatagcgattcaaaaagcgaggtggaggcacttaccgagcagctgagcgaggaggaagaggaagaggaagaagaggaggaagaagaggaagaggaagaggaggaggaagaggaggaagaagatgaggagtcaggaaaccaaagtgaccgctccggctcctctggacggagaaaagctaagaagaaatggcggaaagatagcccatgggttaaaccaagtcgcaaacgcaggaagcgcgaaccaccacgagccaaggagcctcgaggggtaaatggcgttgggtcaagtgggccgtccgaatatatggaggtcccccttggctcactagaacttcctagtgagggaactctctcgcccaatcatgccggcgtctccaacgacacatcatcgttggagactgagagaggcttcgaagaactcccactgtgtagttgccggatggaggctcccaagattgatcgaatctccgaacgggctggccacaaatgtatggctaccgagagcgtggacggagaactgtccggttgcaatgctgcaattctcaaaagggaaaccatgcgaccatctagccgggtggcccttatggtgctgtgcgaaacacaccgggcacgaatggtcaaacatcattgctgtcccggatgcggctatttctgtactgcaggaacttttctcgagtgtcacccagattttagggtcgcacatagattccacaaagcctgtgtgtcacaactgaatggcatggtgttttgccctcactgtggagaggacgcttctgaggcccaggaggtgactattcctagaggcgacggggtgactccccccgcaggcacagccgctcctgctccacctccactgtctcaggatgtcccgggaagggccgacacctcacagcccagcgcgagaatgagagggcatggggaaccaaggcggcccccttgtgaccctttggcggatacgatagattccagcggaccatcactgacgttgcccaacggcggctgcctttcagccgtgggactgcctctgggacccggcagggaagcactcgaaaaagcgctggtgattcaagaatccgaaagacggaagaaactgcgcttccacccccgccagctgtatctgagtgtcaaacagggcgagttacagaaggtgatcctgatgttgctggacaacctcgatcctaactttcaatctgatcagcagtcaaaacgcacccccctccatgccgccgcccagaaggggtcggtggaaatttgccacgttctccttcaagcaggcgccaacattaatgccgtggacaagcagcaacgcacccctctgatggaggctgtcgttaataaccacctcgaagtggctcgttacatggtccagcggggtggatgcgtctatagcaaggaagaagatgggtctacatgcctccaccatgctgcaaagattggaaatctggagatggtgtctcttctgctctccacaggacaggtggacgtaaatgcgcaggattccggggggtggacaccaatcatctgggcagcggaacacaagcacatcgaagtgattagaatgttgctgacgagaggggccgacgtgacactgacagacaatgtgtcagaacgcttggtcgaggaggagaacatttgcctgcactgggccagtttcacggggagcgccgccattgctgaagttctcctgaatgcccggtgcgatcttcacgccgttaattaccacggggacacgccgctgcatattgccgcaagagaaagttaccatgattgcgtgctcctcttcttaagtagaggggccaacccagaattgcggaacaaagaaggggatacagcctgggacctgactcctgagcggtccgacgtgtggttcgctctgcagctaaatcggaagttacgtttgggggtgggaaatagagcgatcagaaccgaaaaaattatttgccgggatgtcgctcgagggtatgagaatgtccctattccatgtgttaacggtgtagatggcgagccatgccccgaggattacaagtacatctctgagaattgtgagaccagtaccatgaatattgacagaaacataacccatttgcagcactgcacttgtgttgacgattgtagttcttcaaattgcctgtgcggtcagctgtccatccgatgctggtacgacaaagatggcagacttcttcaggagtttaataaaatcgagcctccactcatcttcgagtgcaatcaggcatgcagttgctggcgtaattgcaaaaaccgggtagttcaatcaggtattaaggtacggttgcagctttaccgcaccgcgaaaatgggttggggggtgcgagccctgcaaactatcccacaggggacttttatctgtgagtatgttggcgaacttatatcagatgcggaggctgacgttcgggaggatgacagttacttgttcgacttggacaataaggacggagaggtgtattgtatagacgcacggtattacggcaatattagccggttcatcaaccatctgtgtgaccccaacattatcccagtgagagtgttcatgcttcatcaagatctgaggttccccagaatagcattctttagctccagggatattcggacaggagaggaactgggcttcgactatggggataggttttgggacataaaaagtaagtacttcacctgtcaatgcggctcagagaagtgcaagcattcggcagaagctatcgcactagaacagagtaggctagctcgattggatccgcacccagagctgttacccgaattaggttcgctccctccagtgaatacttag

SEQ ID NO: 288542 - DNA, 3096 bp, Artificial Sequence
  derived and/or modified sequence
tcctgtcattgcacgcctagttggcctcctgtcccagagaagcgaccacctgagattcaacactttcgtatgagtgacgatgtgcattcactgggcaaggtgacatccgacctggcaaagcgaagaaagttaaactcgggcggtggtctttccgaagagctagggtctgctaggcggagtggggaagtgaccctgacaaaaggggacccaggtagcttggaggagtgggagaccgtcgtgggcgacgatttcagcctttattatgattcctactcagtcgatgagagggtggattctgacagcaagtctgaagttgaggctttgacagagcagctcagcgaggaggaggaggaggaagaggaggaagaggaggaggaagaagaggaggaggaagaagaggaagaggaggaggacgaggagagcggcaaccagtcagataggagcggcagctctgggaggcggaaagcaaagaaaaaatggcgaaaggacagcccctgggtgaagccctcccgaaagaggcggaaaagggagcctccacgggcaaaggaaccaagaggcgtaaacggcgtaggttcgtctggtccttctgaatacatggaagttcccctaggttcactggaactgccctccgagggcaccctctctcccaatcacgcaggcgtatccaacgacacaagctcgctggagacagaacgcggtttcgaagaactaccgttgtgctcgtgtcggatggaggccccgaagattgatcgaatcagcgaacgggcaggtcataaatgcatggcgactgagtcggtggacggggaactgagtgggtgcaatgctgccatcctcaaacgagaaactatgcgaccaagcagccgcgtggcactgatggtcctttgcgaaacacaccgggctagaatggtgaaacatcattgctgccctggatgtgggtatttctgtactgccggaacgtttttggagtgtcacccagactttcgcgttgcacacagatttcataaagcctgcgtctctcagctaaacggcatggtattttgtcctcattgtggggaggatgcaagtgaagcgcaagaggtgactattcctagaggcgacggcgtgacgccacccgccggtacagccgcacccgcaccacctcctctctctcaggatgtgccaggccgggctgacacaagtcagcctagtgctcgcatgagaggtcacggtgagcctcgacggcccccctgcgaccccctggctgataccatcgattccagtgggcctagcttgacgctgccaaacggaggctgtctctcagccgtggggcttcctctaggtcctggcagagaagccttagagaaagcactagttattcaggagagcgagcgcagaaagaaactgaggttccatccacggcagctgtatctgtcagttaagcagggcgagctccagaaagtcatcttaatgctgctcgacaatctcgatccgaactttcagagcgaccaacagtctaaaagaactcctctgcacgctgccgcccagaagggctccgtggagatatgtcacgtgctgctgcaagccggtgccaatatcaatgccgtggacaaacagcaacgcacccccttgatggaagccgtggtcaataatcacctggaagtcgcgcgatatatggttcagaggggcggctgcgtgtattccaaggaggaggacggttctacatgcctccaccacgcagccaagataggcaacctcgaaatggttagccttctgcttagtacgggtcaggtagacgtcaacgcgcaggacagtggcggctggacaccgattatttgggccgctgaacataagcatatagaggtcattcgcatgctcttgactagaggcgctgacgtaactcttacagacaatgtttccgagcgcttggtcgaagaagaaaatatctgcttgcactgggccagcttcacaggttccgctgccattgccgaagtcctcctgaacgctagatgcgacttgcatgcagtgaactaccacggggacacaccattgcatattgccgcccgcgagtcatatcatgattgtgtcctactctttttaagcagaggggctaatcctgaattaagaaataaagagggggatacggcctgggacctgacgcctgaaagaagcgacgtgtggttcgccctacagttgaaccggaagctccgtctgggggtcggcaatcgggcgattaggacggaaaaaattatttgcagagatgtggctcgaggctatgaaaatgtacccattccttgcgtgaatggagtggatggggaaccatgcccagaggattacaaatatattagtgaaaactgcgagactagtaccatgaacattgatcggaatattacgcatctccagcactgtacatgcgtggatgattgttcttcatcaaactgcctgtgtggtcaactgtctataaggtgctggtacgacaaggatggtaggcttctgcaggaattcaataaaatcgagcccccactaatctttgagtgcaatcaggcatgctcatgctggcgtaactgtaagaatcgcgttgtgcagagtggaatcaaggtccgactgcagctatataggactgcaaagatgggctggggagtcagagctcttcaaaccataccgcaaggaacctttatttgcgagtacgttggagagctgataagcgacgccgaagccgatgtgagggaagacgactcatacctgtttgatctggacaacaaggacggtgaggtgtactgcatagatgcgaggtactacggtaatatcagcagatttatcaaccacctttgtgaccccaatatcatcccggttagagtctttatgttgcatcaggatctccggtttccacggatcgcttttttctccagccgagacatcagaaccggcgaagagctcggctttgactacggcgatcgcttttgggatattaagtcaaagtactttacctgtcagtgcgggtctgaaaagtgcaaacattctgccgaagcaatcgcccttgagcagtctaggctggcgcgcctcgatccacaccccgagctgctgccagagctggggagcctcccacccgtgaatacttag

SEQ ID NO: 288543 - DNA, 3096 bp, Artificial Sequence
  derived and/or modified sequence
agctgccactgcacccccagctggccccctgtgcctgagaagaggcctcctgagatccagcacttcaggatgtctgatgatgtgcacagcctgggcaaggtgaccagtgacctggccaagaggaggaagctgaacagcggcggcggcctgtctgaggagctgggcagcgcccggcgcagcggggaggtgaccctgaccaagggggaccccggcagcctggaggagtgggagaccgtggtgggagatgacttcagcctgtactatgacagctacagcgtggatgagcgggtggacagcgacagcaagtctgaggtggaggccctgacagagcagctgtctgaggaggaggaggaggaggaggaggaggaggaggaggaggaggaggaggaggaggaggaggaggaggaggaggatgaggagagcggcaaccagagcgacaggagcggcagcagtggaagaaggaaggccaagaagaagtggaggaaggacagcccctgggtgaagcccagcaggaagaggaggaagcgggagcccccccgggccaaggagccccggggcgtgaatggagtgggcagcagcggccccagcgagtacatggaggtgcccctgggcagcctggagctgcccagcgagggcaccctgagccccaaccacgccggcgtgtccaatgacaccagcagcctggagacagagcggggctttgaggagctgcccctgtgcagctgcaggatggaggcccccaagattgaccgcatcagcgagcgggccggccacaagtgcatggccacagaatctgtggatggagagctgagcggctgcaatgctgccatcctgaagcgggagaccatgaggcccagcagccgggtggccctgatggtgctgtgtgagacccaccgggccaggatggtgaagcaccactgctgccccggctgcggctacttctgcacagctggcaccttcctggagtgccacccagacttccgggtggcccaccgcttccacaaggcctgtgtgtcccagctgaatggcatggtgttctgcccccactgtggggaggatgccagcgaggcccaggaggtgaccatccccagaggagatggagtgaccccacctgctggaacagctgccccagcccccccacccctgagccaggatgtgcccggccgggctgacaccagccagcccagcgccaggatgaggggccacggggagccccggcggcccccctgtgaccccctggccgacaccatcgacagcagcggccccagcctgaccctgcccaacggcggctgcctgtctgctgtgggcctgcccctgggccctggccgggaggccctggagaaggccctggtgatccaggagagcgagaggaggaagaagctgcgcttccacccccggcagctgtacctgtctgtgaagcagggcgagctgcagaaggtgatcctgatgctgctggacaacctggaccccaacttccagagcgaccagcagagcaagaggacccccctgcatgctgctgcccagaagggctctgtggagatctgccacgtgctgctgcaggccggggccaacatcaatgctgtggacaagcagcagaggacccccctgatggaggccgtggtgaacaaccacctggaggtggcccgctacatggtgcagagaggaggctgtgtgtacagcaaggaggaggatggcagcacctgcctgcaccacgccgccaagattggcaacctggagatggtgtccctgctgctgagcacaggccaggtggatgtgaatgcccaggacagcggcggctggacccccatcatctgggccgctgagcacaagcacatcgaggtgatccgcatgctgctgaccagaggagcagatgtgaccctgacagacaacgtgtctgagcggctggtggaggaggagaacatctgcctgcactgggccagcttcaccggcagcgctgccatcgccgaggtgctgctgaatgcccgctgtgacctgcatgctgtgaactaccatggagacacccccctgcacatcgccgcccgggagagctaccatgactgtgtgctgctcttcctgagcagaggagccaaccctgagctgaggaacaaggagggggacacagcctgggacctgaccccagagaggagtgatgtgtggtttgccctgcagctgaacaggaagctgcggctgggcgtgggcaacagagccatcagaacagagaagatcatctgcagagatgtggcccggggctatgaaaatgtgcccatcccctgtgtgaatggagtggatggagagccctgcccagaggactacaagtacatcagcgagaactgtgagaccagcaccatgaacatcgacaggaacatcacccacctgcagcactgcacctgtgtggatgactgcagcagcagcaactgcctgtgtggccagctgagcatccgctgctggtatgacaaggatggccgcctgctgcaggagttcaacaagattgagcccccactcatctttgagtgcaaccaggcctgcagctgctggaggaactgcaagaacagagtggtgcagagcggcatcaaggtgcggctgcagctgtacagaacagccaagatgggctggggcgtgcgggccctgcagaccatcccccagggcaccttcatctgtgaatatgtgggggagctgatcagtgatgctgaggctgatgtgcgggaggatgacagctacctgtttgacctggacaacaaggatggagaggtgtactgcattgatgcccgctactacggcaacatcagccgcttcatcaaccacctgtgtgaccccaacatcatccctgtgcgggtcttcatgctgcaccaggacctgcgcttccccagaattgccttcttcagcagccgggacatcagaactggagaggagctgggctttgattatggagaccgcttctgggacatcaagagcaagtacttcacctgccagtgtggcagcgagaagtgcaagcacagcgctgaggccatcgccctggagcagagccggctggcccggctggacccccaccctgagctgctgcctgagctgggcagcctgccccctgtgaacacctag

SEQ ID NO: 288544 - DNA, 3096 bp, Artificial Sequence
  derived and/or modified sequence
agctgccactgcacccccagcaggcctcctgtgcctgagaagaggcctcctgagatccagcacttcaggatgtctgatgatgtgcacagcctgggcaaggtgaccagtgacctggccaagaggaggaagctgaacagcggcggcggcctgtctgaggagctgggcagcgcccggcgcagcggggaggtgaccctgaccaagggggaccccggcagcctggaggagtgggagaccgtggtgggagatgacttcagcctgtactatgacagctacagcgtggatgagcgggtggacagcgacagcaagtctgaggtggaggccctgacagagcagctgtctgaggaggaggaggaggaggaggaggaggaggaggaggaggaggaggaggaggaggaggaggaggaggaggaggatgaggagagcggcaaccagagcgacaggagcggcagcagtggaagaaggaaggccaagaagaagtggaggaaggacagcccctgggtgaagcccagcaggaagaggaggaagcgggagcccccccgggccaaggagccccggggcgtgaatggagtgggcagcagcggccccagcgagtacatggaggtgcccctgggcagcctggagctgcccagcgagggcaccctgagccccaaccacgccggcgtgtccaatgacaccagcagcctggagacagagcggggctttgaggagctgcccctgtgcagctgcaggatggaggcccccaagattgaccgcatcagcgagcgggccggccacaagtgcatggccacagaatctgtggatggagagctgagcggctgcaatgctgccatcctgaagcgggagaccatgaggcccagcagccgggtggccctgatggtgctgtgtgagacccaccgggccaggatggtgaagcaccactgctgccccggctgcggctacttctgcacagctggcaccttcctggagtgccacccagacttccgggtggcccaccgcttccacaaggcctgtgtgtcccagctgaatggcatggtgttctgcccccactgtggggaggatgccagcgaggcccaggaggtgaccatccccagaggagatggagtgaccccacctgctggaacagctgccccagcccccccacccctgagccaggatgtgcccggccgggctgacaccagccagcccagcgccaggatgaggggccacggggagccccggcggcccccctgtgaccccctggccgacaccatcgacagcagcggccccagcctgaccctgcccaacggcggctgcctgtctgctgtgggcctgcccctgggccctggccgggaggccctggagaaggccctggtgatccaggagagcgagaggaggaagaagctgcgcttccacccccggcagctgtacctgtctgtgaagcagggcgagctgcagaaggtgatcctgatgctgctggacaacctggaccccaacttccagagcgaccagcagagcaagaggacccccctgcatgctgctgcccagaagggctctgtggagatctgccacgtgctgctgcaggccggggccaacatcaatgctgtggacaagcagcagaggacccccctgatggaggccgtggtgaacaaccacctggaggtggcccgctacatggtgcagagaggaggctgtgtgtacagcaaggaggaggatggcagcacctgcctgcaccacgccgccaagattggcaacctggagatggtgtccctgctgctgagcacaggccaggtggatgtgaatgcccaggacagcggcggctggacccccatcatctgggccgctgagcacaagcacatcgaggtgatccgcatgctgctgaccagaggagcagatgtgaccctgacagacaacgtgtctgagcggctggtggaggaggagaacatctgcctgcactgggccagcttcaccggcagcgctgccatcgccgaggtgctgctgaatgcccgctgtgacctgcatgctgtgaactaccatggagacacccccctgcacatcgccgcccgggagagctaccatgactgtgtgctgctcttcctgagcagaggagccaaccctgagctgaggaacaaggagggggacacagcctgggacctgaccccagagaggagtgatgtgtggtttgccctgcagctgaacaggaagctgcggctgggcgtgggcaacagagccatcagaacagagaagatcatctgcagagatgtggcccggggctatgaaaatgtgcccatcccctgtgtgaatggagtggatggagagccctgcccagaggactacaagtacatcagcgagaactgtgagaccagcaccatgaacatcgacaggaacatcacccacctgcagcactgcacctgtgtggatgactgcagcagcagcaactgcctgtgtggccagctgagcatccgctgctggtatgacaaggatggccgcctgctgcaggagttcaacaagattgagcccccactcatctttgagtgcaaccaggcctgcagctgctggaggaactgcaagaacagagtggtgcagagcggcatcaaggtgcggctgcagctgtacagaacagccaagatgggctggggcgtgcgggccctgcagaccatcccccagggcaccttcatctgtgaatatgtgggggagctgatcagtgatgctgaggctgatgtgcgggaggatgacagctacctgtttgacctggacaacaaggatggagaggtgtactgcattgatgcccgctactacggcaacatcagccgcttcatcaaccacctgtgtgaccccaacatcatccctgtgcgggtcttcatgctgcaccaggacctgcgcttccccagaattgccttcttcagcagccgggacatcagaactggagaggagctgggctttgattatggagaccgcttctgggacatcaagagcaagtacttcacctgccagtgtggcagcgagaagtgcaagcacagcgctgaggccatcgccctggagcagagccggctggcccggctggacccccaccctgagctgctgcctgagctgggcagcctgccccctgtgaacacctag

SEQ ID NO: 288545 - DNA, 3096 bp, Artificial Sequence
  derived and/or modified sequence
agctgccactgcacccccagctggccccccgtgcccgagaagcggcctccagaaattcagcacttccggatgtccgacgatgtgcacagcctcggtaaagtcacctctgacctagctaagcggcgcaagcttaacagtggaggggggctgagcgaggagctgggatccgctcggcgttccggcgaagtgaccctcactaagggtgacccaggctccctggaggaatgggagaccgtggtcggcgatgacttcagtttatattacgattcctactctgttgacgagcgagtggattctgacagtaaatccgaagttgaagccctcacggaacagctgagtgaggaggaggaggaggaagaagaggaggaggaggaggaagaggaagaggaggaagaggaggaggaggaggaggatgaagagtccggcaaccagagtgatcggtcagggtccagcggtagaaggaaggccaagaaaaaatggcgcaaggactcaccctgggtgaagcccagtcggaagcgccggaagcgcgagccccctagagcaaaggaaccgcgcggcgtgaacggagttggcagctccggtccaagtgaatatatggaggtccctttggggtccctggagctgccctctgaaggcacacttagtcctaatcacgccggcgtgagtaacgacacttcctctttggaaactgaacgtggatttgaggagttaccactgtgtagttgccggatggaagcccccaagattgatcgcatcagtgaacgggcaggacacaagtgtatggctactgagtcggttgatggcgaactctctggctgtaacgctgcaatactgaagcgggagaccatgaggccatcctctcgggtcgcccttatggttctgtgcgagacccacagagctaggatggtcaaacaccactgctgccctggctgcggatacttttgcaccgccgggaccttcttggaatgccacccagattttagagtggcccataggttccataaggcatgcgtcagtcaactaaatggaatggtgttttgtcctcattgtggggaggacgcgtcagaggcacaggaagttactatacctcgcggagacggggtcaccccccctgccggcacggctgcaccagctccccctcctctgagccaggatgttccgggcagagcagacacctcccagccctcagctcggatgagggggcatggggaaccaagacggccaccttgtgatccgctcgccgataccatcgattccagcggcccctctctcacacttccaaatggcgggtgcctgtctgcggtgggcctgcccctgggccccggccgtgaggcactcgagaaggctcttgtgatccaggagtccgaacggcgtaaaaaactgcggttccaccctcggcagttgtatctgtcagtgaagcagggagagctccaaaaggtaatcctgatgttgctggataatctcgaccccaactttcagtctgaccagcagtcgaaaagaacccctctgcatgctgcggcccaaaaaggaagcgtggaaatctgtcatgttctcttacaggctggagcaaatattaacgcagtggacaagcaacagcggacacccctcatggaagcagtcgtaaataaccatctagaggtagcaaggtacatggtgcaaagaggggggtgcgtctactccaaagaggaagatggcagtacctgccttcaccatgccgcaaaaatcgggaacctggaaatggtgtcccttctgttatctactggacaggtggatgtaaacgctcaggattcaggcggatggacgcctattatctgggctgcagaacacaagcatatcgaagttatccggatgcttctgacccggggcgccgatgtgactctgaccgataatgtgagcgagaggctggtggaggaggagaatatttgcctgcactgggcgtcctttaccggttcggctgcgatagccgaggtgctgctaaatgcccgctgtgatctacacgccgtgaactatcatggcgacactcccttacacatcgctgctcgcgagtcctaccatgattgtgtgctgctcttcttatctagaggcgcgaatccagaactgcggaacaaagagggggacacagcttgggatctgactccggagcggagcgacgtttggttcgccctccagctcaacaggaaactccggctgggagtaggaaacagagccattcgcactgaaaagattatctgcagggatgtggccagggggtacgagaatgtgcctatcccctgtgtgaatggagtggatggtgagccgtgccctgaggactacaaatacatctctgagaattgtgaaacgagcacaatgaacattgaccgcaatataacacacttgcagcattgcacgtgcgttgacgattgctcttcatctaactgtctgtgcggacagctaagtatcaggtgttggtacgataaggacggacggttgctgcaggagttcaacaagatagagccccccttgatcttcgagtgcaaccaggcttgtagttgttggagaaactgtaaaaatcgggtggtgcagtctggtatcaaagtcaggctacagctctatcgcaccgccaagatgggatggggtgtgcgggctctgcagaccatccctcagggtacgttcatatgtgagtatgtgggtgagttgatcagcgacgctgaagctgacgtcagagaagacgatagctacctgttcgatttggataacaaggacggcgaagtgtattgcatcgacgccagatactacggcaacatttcccgctttattaaccacctgtgcgacccaaacatcattccggtgagagtatttatgttacatcaggacttaaggtttccccgcattgcattcttctccagtagagacattagaactggcgaggagctcggatttgattatggcgacaggttctgggacatcaaaagcaagtactttacctgtcagtgtgggagcgagaagtgtaagcactctgcagaggccattgcactggaacagtccaggcttgctcgcctcgatccccaccccgaattactccccgaactcggcagcctgcctcccgttaatacttag

SEQ ID NO: 288546 - DNA, 3096 bp, Artificial Sequence
  derived and/or modified sequence
agctgccactgcacccccagccggccccccgtgcccgagaagcggccacccgaaatccagcactttagaatgagcgatgatgtgcattccctgggaaaggtgacctccgatctggccaagagacgaaagctgaattccggaggagggttgtctgaagaactgggcagtgcacggcgctccggggaggtcacgttaacgaagggcgatccaggctctcttgaggagtgggaaacggtcgtcggggacgacttttccctgtactatgactcttactccgtcgatgaaagagtggattctgattccaagagcgaagtggaggccttgactgaacagctctcggaagaagaggaggaggaagaggaagaagaggaagaagaggaagaagaggaagaggaggaagaggaggaagaagatgaggagtccgggaaccagagtgacaggtctggttcctctgggcgtagaaaagcaaagaagaagtggcggaaagacagcccctgggtgaagccctcacgcaagaggcggaagagagagccgcccagagccaaggaacctcgaggcgtgaatggtgtgggtagcagcggcccgagcgaatatatggaggtgcccttagggtcactcgagctgcccagtgaaggtactctgtctccaaatcacgctggagtcagtaatgacacttctagcctggagactgaacgggggttcgaggagctgcctctgtgttcatgcaggatggaggccccaaagatcgatcgcattagcgagcgcgccggacacaagtgcatggcaacagagtctgtggacggcgaattatctgggtgcaacgctgcaatcctgaaacgcgaaaccatgaggccgagctcacgagtggctcttatggttctatgtgagacacacagagctaggatggtcaagcaccactgttgtcctggctgcggctatttctgcaccgccggtacttttttggagtgccaccccgacttccgtgtcgcacatagattccataaggcttgcgtgagccagctaaatggaatggttttttgtcctcattgcggtgaggacgcttctgaagcccaggaggtcaccataccaagaggtgatggggtaacccctccagccggcactgccgcacccgctccgcctcccctgtcgcaggacgtccctggacgagccgataccagtcagcccagcgcacgcatgcggggacatggcgaacctagacgtcctccttgcgaccccctggccgacactatcgactcctcgggaccctccctgactctccctaacggtggctgcctgtcagcagtcggcttgccattgggacccgggcgcgaggccctcgagaaagcgttggtcatccaggaatctgagaggaggaagaagttgcgattccacccccgccagctgtatttgtcagtcaagcagggtgagctgcagaaggttatcttgatgctcttggacaacttggaccctaactttcagtcagaccagcagtccaagcgcactcccctccatgcagcagcccagaagggctccgtagaaatctgccatgtacttctccaagccggtgcgaacatcaatgctgtggacaagcagcagcggactcccctgatggaggccgttgtgaataaccatctggaggttgccaggtacatggtgcagaggggcgggtgcgtgtattctaaagaggaggatgggtccacttgtctgcaccatgctgccaagattggcaatttggagatggtgagcttattgcttagcaccgggcaggtagatgttaacgcccaagactctggaggatggactcctattatttgggcggctgagcataaacatatagaagtaatcagaatgctgctgacccgcggtgctgatgttacactgactgacaacgtttctgagcgcctggtggaagaggagaatatttgcctacactgggcttcattcactggcagcgcagcaatcgctgaggtgttacttaatgcgaggtgtgacctccacgccgtaaactatcatggagatactccacttcacattgccgcccgcgagagttaccatgactgcgtgctgctgttcctttcgcggggggcaaatcccgaactgcggaataaggaaggcgacacagcctgggatctaacccctgagcggtcggatgtctggtttgccctgcagctgaatcggaagctgaggctcggcgtcgggaacagggccatcagaaccgaaaagattatctgtagagacgtggcacggggctatgagaacgttccaatcccctgcgtcaacggcgtcgacggggagccctgtcctgaagattataaatatataagcgaaaattgtgaaacttcaactatgaatattgaccgcaacataacacatcttcaacattgtacttgtgtggacgactgctcttctagcaattgcctgtgtggtcagctctctattagatgttggtacgataaagacgggagactcctccaggagtttaacaaaatcgaaccccccctcatctttgagtgcaaccaagcctgcagctgctggaggaattgcaaaaatcgtgtggtccaatctggcataaaggtccgtctccagctctatcgtactgcaaaaatgggttggggggtgcgggctctccagaccatcccccagggcactttcatttgcgagtacgtcggagaactcattagcgacgccgaggccgatgtgcgcgaagatgattcctacctctttgatttagacaataaggacggagaggtgtattgtatcgatgccaggtattatggaaatatctcccgcttcataaaccatctgtgcgacccgaacattatccccgtgagggtgttcatgctgcaccaagaccttagattccccagaatcgcttttttttcctcccgggacatcaggacgggagaagagctgggattcgattatggcgaccggttctgggacataaagagcaaatattttacatgtcaatgtggttcggagaaatgcaagcatagcgctgaagccattgctttggagcagagtaggctggctaggttagatcctcatcccgagttgctgccagaattaggtagcctcccgcctgtgaatacatag

SEQ ID NO: 288547 - DNA, 3096 bp, Artificial Sequence
  derived and/or modified sequence
agctgccactgcacccccagctggccccccgtgcccgagaagcggccccctgagatccaacacttcaggatgagcgacgacgtgcactctctcggtaaagtgacttcggacttggccaaacgcaggaaactcaatagcggcggcggattgtcagaagagctgggctcagctcgccgatccggcgaggttacattgacgaagggcgacccgggatccctcgaagaatgggaaaccgtagtcggtgatgatttttctctgtattatgactcctattctgtggacgagcgtgtcgatagtgactctaagtccgaggtggaggctctcactgagcagctgtcggaagaagaggaagaagaggaggaggaggaagaggaggaggaagaggaggaagaggaggaagaggaggaggaagacgaggaatcaggcaatcagtcagatcggagcgggtccagcgggaggaggaaagcgaaaaagaagtggaggaaagatagcccttgggtcaaaccctccagaaaaaggcgtaagagagagcctcctagggctaaggaaccccgaggggtgaatggggtgggaagcagcgggcctagcgagtacatggaagtccccctggggtcacttgaactccctagcgaaggaactctcagccccaaccatgccggtgtatcaaatgatactagctccctggaaacggagcgtggatttgaggagcttccactgtgttcctgtcggatggaggctcccaaaatcgaccgtatctctgagcgtgccggacacaaatgtatggcaacggagtcagtggatggtgaactctctggctgtaacgcggctatactgaagcgtgagaccatgaggccctcttccagagtcgctctgatggtgttgtgtgaaacgcaccgggctcgtatggtgaaacaccactgctgccccggctgcggatatttctgcacagccggcaccttcttggagtgccatcccgattttagggtcgctcatcgctttcacaaagcttgcgtgtcacaattgaacggtatggttttttgccctcattgcggagaagatgccagcgaggcccaggaggttactatacctaggggcgatggcgtgactcccccagctggcactgctgccccggcgcccccgcctctgtcccaagacgtgcccgggcgggccgacacctcccagccctctgcacggatgcgaggtcacggggagccccgccgcccaccttgcgaccccttggccgacactatcgatagctcaggaccttccctgaccttacccaatggtggctgtctatccgccgtcgggctgcctctcggacctgggcgtgaggccctggagaaagcactggttattcaagagagtgaacgccgcaaaaagctcaggttccatccccggcaattgtatctgtctgtgaaacaaggggagcttcagaaggttatactgatgttattggacaacttggacccaaacttccaaagcgatcaacaaagtaagaggaccccactacatgctgccgcccaaaaaggctctgtggagatttgtcacgtgcttctccaggctggagccaacattaacgccgtggataagcagcagcggacacccttgatggaagccgtagttaacaatcatctggaggtggcccggtacatggtgcaacgtggagggtgcgtctactctaaggaagaagatggttccacgtgtctgcaccacgccgctaaaatcggtaacttggaaatggtttccctcttgttgtccaccggacaggtggacgtgaacgcccaagatagtggaggatggacaccaatcatctgggcagctgagcacaaacacattgaggtcatacgtatgctgctgacacgcggtgcagacgtgaccctgacggacaatgtgtctgaacgtctcgttgaagaagagaacatctgtctacattgggcctcattcacggggtctgcagcgattgctgaagttctgttgaatgctcgctgtgacctgcacgccgttaactatcacggggacacccccctgcacattgctgcccgtgagtcctatcacgattgcgtgctcctgttcctgagtcggggggcaaaccccgaactacggaacaaggaaggagatacagcgtgggacctgactcccgagagatccgacgtctggttcgcactgcagcttaatagaaaactgaggttaggagtgggcaacagagccatacggaccgaaaaaatcatatgccgggatgtggcaagagggtacgagaacgtgcctattccatgcgtgaacggtgtggatggggaaccctgtccagaggattacaagtatatctctgagaactgcgaaacatccacaatgaacatcgatcgaaatattacacacctgcagcactgtacctgcgtcgatgactgctcctcctctaattgtctgtgtggacagctttccattcgttgttggtatgataaagacgggcggctcctgcaggagttcaataaaatcgagccccctttaatcttcgagtgcaaccaggcgtgttcttgttggcgcaattgtaagaacagggtcgtgcaaagcggtattaaagtgaggctgcagctctatagaacagccaagatgggatggggagtccgcgcactgcaaactatcccccagggcacatttatctgtgaatacgtgggtgaactgatatcggatgcggaagcagatgtgcgagaagatgactcttatctgtttgatctcgacaacaaagatggcgaggtctactgtatcgacgcaagatattacggcaacatatctcggttcatcaaccatttatgtgacccaaacataatccccgttcgggtgtttatgctgcaccaggacctccgattcccccgcatcgcattcttttccagtagagatatacggaccggcgaggagctcggcttcgactacggcgaccgtttttgggacataaagtcaaaatactttacatgtcagtgtggctccgagaagtgtaaacattccgccgaggcaatagctttggaacagagtcgtttagcaagattggacccccacccagaacttcttcccgagttaggaagccttccccctgtcaacacctag

SEQ ID NO: 288548 - DNA, 3096 bp, Artificial Sequence
  derived and/or modified sequence
agctgccactgcacccccagctggccccccgtgcccgagaagcggcccccagagattcagcacttccggatgtccgatgatgtgcattcactcggtaaggtaacctctgatctcgccaaaaggaggaagttaaactctggcgggggactgtccgaagagcttggctctgcccgccggtccggggaggtgaccttaaccaagggagacccagggtcacttgaagagtgggagacagttgtgggcgatgatttctccctgtactatgattcttactcagtcgatgaacgggtggactctgactccaagtcagaagtggaagctctaacagaacagctctccgaggaggaggaggaggaggaggaagaggaggaggaggaagaggaggaggaggaggaagaggaggaggaggaagatgaggaaagcggcaaccagagtgatcggtcaggaagcagcggtcgtcgcaaggcaaagaaaaagtggcgcaaggattcaccctgggtgaagccgagcagaaaacgccgaaagcgcgagccaccacgagcgaaggagcctcggggtgtaaacggtgtgggctccagcggacccagtgagtatatggaagttccactggggagtctggagctgccctctgaggggaccctctcacccaaccatgctggtgtgtccaacgacacatcctctctcgagacggagcgaggcttcgaagaacttcccctgtgtagctgcagaatggaagctccaaaaatcgatcgcattagcgaacgcgctggccacaaatgcatggctaccgagagcgtggacggagagctctctggctgcaacgctgcaattttgaagcgcgagacaatgcgtccttcttctcgggtggctttaatggtgctgtgcgaaacccatcgcgcaaggatggtcaaacaccactgctgtccaggatgtgggtatttctgcaccgctgggacctttttggagtgccatccagattttagggttgcacaccgctttcacaaagcttgtgtctctcagctgaacggaatggtgttttgcccccactgtggagaggacgcttcagaggcccaagaagtcaccataccccgcggggacggggtcacgccgccagctggcactgccgccccagctccgccccccctttcgcaagacgtccctggacgcgccgatacaagtcagccctccgcccggatgagaggccacggcgagcctaggaggccaccttgcgatccactggcagacacaattgactcctctggcccatctctgactctgcctaatggaggatgcctgtccgccgtgggactgcccctgggccctgggcgggaggctcttgagaaagctctggtgatccaagagtcggaaaggaggaagaagctcaggtttcatcccaggcagttgtacttatcagttaaacagggtgaactccagaaggtgatcttgatgctgcttgacaatctggacccgaattttcagtctgaccagcaatccaagcggacaccactgcacgcagcagcccagaagggaagtgtggagatatgccatgtcttgctccaagccggtgccaacatcaacgcagtggacaagcaacagagaacacccctcatggaggctgttgtaaacaaccaccttgaggttgctcgctacatggtgcaacgcggtgggtgcgtgtattctaaagaagaagatggcagcacctgtcttcatcacgcagcaaaaatcggaaacctcgaaatggtgtctctgttgctcagcaccggtcaggttgacgttaacgctcaggacagcggagggtggacacccatcatttgggcagcagagcataagcacatcgaggtgatcagaatgctcctcacccggggagcagacgtgacactgacagacaatgtgtctgagagattagttgaggaagagaacatctgccttcactgggcttctttcacaggaagcgcagccatcgccgaggtcctcctgaacgcccggtgcgacctacacgccgttaattaccacggagacactccattgcacattgcagcgcgggaatcatatcacgattgcgtgctgctgttcctgtccaggggcgctaatcccgagctgagaaataaagagggcgacaccgcctgggacctcacccctgagcgcagcgacgtgtggtttgccctccagctgaatcgcaagttgagactgggggtcgggaaccgtgctattaggacggagaagatcatctgtcgtgatgttgcccggggctatgaaaatgttccaatcccctgcgtgaatggcgttgacggtgagccatgccccgaggactataagtatatcagtgagaattgcgagacaagcaccatgaatattgaccgcaacatcacccacctacagcactgtacgtgtgtggatgattgttcaagcagtaactgcctgtgcggacaactgtctatccgctgttggtacgataaagatggtcggctgcttcaagaatttaataagatcgaaccacccctcatctttgagtgtaaccaggcgtgtagctgctggaggaattgcaaaaatagggttgtccagtctggcattaaggttcggctccagctatacaggaccgccaaaatgggatggggggtgcgagcgttacaaacaattcctcagggcactttcatctgcgagtatgtgggggagctgatttctgatgctgaggctgatgtgcgcgaagacgattcatacctcttcgacctggacaataaggacggggaggtgtactgcatcgacgctcggtactatggaaacatctccagattcattaatcatctctgtgaccccaacattatccctgttagagtctttatgctgcaccaggacctgagatttccacgcattgcgtttttttcttcaagggatatcaggactggcgaggagcttgggttcgactatggtgatagattttgggacattaaaagcaagtacttcacctgccagtgcggttcggagaaatgcaagcattccgccgaagccatagccctggagcagagtcgcttagctcgtttggacccccaccccgagctgctgcctgaattgggctctttgcccccggttaacacgtag

SEQ ID NO: 288549 - DNA, 3096 bp, Artificial Sequence
  derived and/or modified sequence
agctgccactgcacccccagccggccccccgtgcccgagaagcggcctcccgagattcagcattttaggatgagcgacgacgtccattcattgggtaaagtaacctcggacctcgcaaagcgacggaaacttaattctgggggcggactgtccgaagaactgggctctgcgagaaggtccggggaggtgaccctgaccaagggagaccccggtagcctggaggaatgggagacagttgtgggcgacgatttctcgttgtattatgactcatacagcgtcgacgaacgcgtggattccgactccaagagcgaagttgaggctctgacagagcagctcagcgaggaggaagaagaggaggaagaagaggaagaagaagaggaggaagaagaggaggaggaggaggaggaagaggatgaagaatccggcaatcagtccgaccgatctggatcatcagggcggcgaaaagcaaaaaaaaaatggcgtaaggactcgccgtgggtgaaaccctctagaaagagacgaaaaagagaaccaccccgcgccaaggagcccaggggagtgaatggcgttggttcatccggtccttcggagtacatggaagtcccactggggtctctggaactaccctcagagggaacactgagcccgaaccacgcaggagtctctaatgacacctccagccttgagaccgaaaggggctttgaagagctgcctttatgctcatgccggatggaggcccctaagatcgaccggatatccgaacgtgccggtcacaaatgtatggcaactgagtctgttgacggggagctctcaggatgcaatgccgccatcctaaagagagaaaccatgcggccttcctcaagagtcgccttgatggtcttgtgcgagactcatcgagccaggatggtgaagcaccattgttgccccgggtgtggttacttttgcactgctgggaccttcctggaatgtcaccctgactttcgcgtcgcccacagatttcataaggcgtgtgttagccaactcaacggaatggtgttctgcccccactgcggtgaagatgccagcgaggcccaagaagtcaccataccacgtggtgatggggtcacaccccctgctggcactgccgccccggctccacctcccctctcccaagatgtgcccggcagggccgacacctcacagcccagtgctcgaatgcgggggcatggggaacctagacggcccccctgtgaccctctggcagacaccattgattcaagtgggcctagcctgaccctaccaaacgggggctgtctgtccgcagtcggcttacccctggggccgggccgcgaggccctggaaaaggcactcgtcattcaggagtccgaacgtcgcaagaagctcagattccaccccaggcagctgtatttgagcgtgaagcagggagagctgcagaaagtgatcctcatgctgctggacaacctggatcctaactttcaaagtgaccagcagtcaaagagaacgcctctccacgctgccgcgcagaaaggatccgttgagatctgccacgtgctgctccaggccggagcaaatataaatgccgttgataaacagcagcgtacacctttgatggaggccgtggttaataatcacctggaggtcgctagatatatggtccagagaggcggctgcgtgtactctaaagaggaagacggtagcacgtgccttcaccacgccgccaagataggtaatctggagatggtgtctcttctgctttctaccggccaagtcgatgtgaacgcacaggatagcggagggtggactcctatcatctgggcagcagagcataagcatattgaggtcatccggatgctccttacccggggtgcggacgttacacttacagacaacgtgagcgaaaggcttgtggaagaagaaaatatttgtcttcactgggccagcttcacaggcagcgcagccatagccgaggtcctgctcaacgctcgatgcgatctgcacgctgtaaactaccatggcgacactcctttacatattgctgcccgcgaatcttaccacgattgcgtgttgctgttcctgtcaaggggagcaaatcctgaacttaggaacaaagagggtgacactgcgtgggacttaactcctgagagaagcgacgtgtggttcgcactccagttaaataggaagctacgtctgggagtgggtaatcgagccataagaaccgaaaaaattatatgccgggacgtagcccgcgggtacgaaaatgtgcccatcccttgcgtgaatggagttgatggcgagccctgtcctgaggactacaagtacattagtgaaaattgtgaaacatcaacgatgaatatcgacaggaacatcacacaccttcagcactgcacttgcgtggatgactgcagctctagtaactgcctgtgtgggcagctgtcgattaggtgctggtatgacaaagacggccgtctgttgcaggaattcaataaaatcgagccccccctcatatttgaatgcaaccaagcgtgctcatgttggcgcaattgcaagaacagggtggtgcagtctggaattaaggtaaggttacagctctatagaaccgctaaaatggggtggggagtgagagctctgcagacgattccgcagggcaccttcatatgcgagtacgtgggggaactcatttctgacgccgaggccgacgtgcgcgaggatgattcctacttgtttgaccttgataataaggatggggaggtgtactgtatagacgctcggtactatggcaatatcagtagattcatcaatcacctctgtgaccccaatattattccggtgagagtgttcatgctgcatcaggacctcagattcccaagaatcgcattttttagctctcgggacatccgaaccggcgaggaactggggtttgattacggcgaccgattctgggatattaagtcaaagtattttacgtgtcagtgtggctccgagaagtgcaagcactctgctgaggctattgccctggaacagagtcgcctggctcgacttgacccacaccccgaattactcccagaactgggcagtctgcctcctgtaaacacatag

SEQ ID NO: 288550 - DNA, 3096 bp, Artificial Sequence
  derived and/or modified sequence
agctgccactgcacccccagctggccccccgtgcccgagaagcggccacctgagatccaacacttcaggatgagtgacgatgttcactcccttgggaaagtgaccagtgatctggcaaaaagacgcaagctcaattcaggaggcgggctctccgaagagcttggtagtgcgcggaggtccggtgaagtgaccctgacgaaaggcgacccaggttcactggaagagtgggaaacagtcgtgggggacgattttagtctatattatgactcctacagcgtcgatgaacgagtcgactcagactctaaatcagaggttgaagctctgaccgagcaactgtccgaagaagaggaggaagaagaggaagaagaggaggaggaagaggaagaggaggaagaagaggaggaagaagaggacgaggagtcgggcaatcagtctgataggagcggttcttctggacgtagaaaggctaaaaagaagtggcgaaaggatagtccttgggtcaagcctagtagaaaaaggcgcaaaagagagcctcccagagctaaagagcctcgcggtgttaatggtgttggctcctccggaccttctgagtacatggaagtgcccctgggatctttggagctgccctcagaggggactctgagtccaaatcatgctggcgtgtctaatgatactagttccttggaaaccgagaggggattcgaggaactgcccctgtgcagctgcagaatggaggcccctaagatagaccggatttccgaaagggctggccacaagtgcatggccaccgaaagcgtggacggagaactctccggctgtaatgccgcaattctgaagcgcgaaacaatgaggcccagcagtagagtcgcattaatggtgctatgcgagacccaccgggccagaatggtgaaacaccattgttgtcctgggtgtggctatttctgcaccgccggcacttttctggaatgccacccagacttccgggtagcccatcggtttcataaagcctgcgtctcacagctcaatggaatggtcttttgccctcactgcggagaggacgctagcgaagctcaggaggtcactatccctagaggtgacggggtgacccctccagccggcactgcagcgccagcaccccctccgctcagccaggatgttccgggccgtgcagacactagccagccatccgcgagaatgagaggacacggtgaacccagaaggcctccatgtgatcctctcgcagacactatcgattctagcggtccaagcctcacactccctaacggcggttgcctaagtgccgtggggctccctctcggacccggccgcgaggccctagagaaagcgcttgtcatccaggaaagcgagcgccgtaaaaagttacggttccacccaagacagctgtacctcagcgtgaaacagggagaactccagaaagtgattttaatgctgctagacaacttagatccaaactttcaatccgatcagcagtctaagcgcacgccgctgcatgctgcagctcagaagggctccgttgagatctgccatgtgcttctacaggccggagcaaacatcaatgctgtggacaagcaacaaagaacacccttgatggaagctgtggttaataaccacctggaagtcgccaggtacatggtgcagcgcggcgggtgcgtatatagcaaggaggaggatgggtccacttgtctgcaccacgccgccaaaattggcaatctcgaaatggttagcctcttactgtccaccggacaggtagacgtaaacgcccaggatagcggcggttggactcccatcatctgggccgctgagcataaacacatagaggtcatacgcatgctgctcactcgaggtgctgatgtgactctaacagacaacgtgtccgagcgattagttgaagaggagaatatatgcctgcattgggcttctttcaccgggtccgctgcgatcgctgaagtgctgctcaacgcccgatgtgatctacatgccgtgaactaccatggcgacacgccgcttcatatcgctgcccgcgagtcttatcacgactgcgtcctgttgttcctctctcggggggctaaccctgagctcaggaacaaagaaggggataccgcatgggaccttactcctgaacgtagtgacgtctggttcgcgttgcagctgaaccgaaagctgcgcctgggcgttgggaacagagccatccgaacagaaaaaataatatgtcgggatgtcgcacgggggtacgaaaatgtccccataccttgtgtcaatggggtagatggcgaaccttgccccgaagattataagtacatcagtgagaattgtgaaactagcaccatgaacatcgaccgcaatattactcatctgcagcattgcacctgtgttgatgattgctcttcctccaattgtctgtgtggccagctgagtattcggtgttggtacgacaaagacggccgcctgctgcaggagtttaacaagatcgagccccccttaatctttgagtgcaaccaagcctgcagctgctggaggaactgcaaaaaccgggttgtgcaatccggcattaaggtccgccttcagctgtatcggacagccaagatgggctggggtgtgagagccctgcagaccataccccagggcactttcatctgtgagtacgtgggagagttgatctccgatgctgaggccgacgtccgcgaggatgactcatacctcttcgatctcgataataaagacggagaggtgtattgtattgacgcacgctattacgggaacatatctagattcattaatcatctgtgcgatcccaatattattcccgtgcgcgtgtttatgcttcaccaggatctgaggttccctcggatcgccttcttttccagccgcgatattcggaccggggaagagctgggattcgattatggcgaccgtttctgggatataaagagcaagtacttcacgtgtcagtgcggcagtgaaaaatgtaaacattcagcggaggcgattgcccttgagcaatctagactcgcacgcttggatcctcaccccgagctccttcccgagcttggttctctgccacctgtgaatacatag

SEQ ID NO: 288551 - DNA, 3096 bp, Artificial Sequence
  derived and/or modified sequence
agctgtcactgtacaccttcatggccccctgtgccggagaagagaccccctgagattcagcactttcgcatgtcggacgacgtgcacagccttggcaaggtgacctctgacctggcaaaaagaaggaagttaaactcgggaggcggacttagcgaggagctgggcagcgcccgaaggagtggcgaggtaacccttactaagggtgatcccggttcgctcgaggaatgggagactgtagttggcgatgacttcagtctttactatgacagctattctgtggacgaaagggtggacagcgactcaaaaagcgaagtggaagccttgacagaacaattaagcgaagaagaggaagaggaggaagaggaggaggaggaggaggaggaggaggaggaagaggaggaggaagaggaggatgaagagagtggcaaccaatccgatagatctggatcatcaggccgtaggaaggccaagaaaaagtggcgtaaagattctccttgggtcaagccgtccagaaaacgcagaaaacgtgagcctcctagggccaaagaacccagaggggttaacggcgtcggatcatctggccctagcgaatatatggaggttccacttggctctctcgagcttccaagcgaggggactctcagtcccaaccacgctggagtaagcaacgatacatcttcgttagagaccgaaaggggatttgaggagttgccattgtgctcctgccgtatggaagccccaaagatcgataggatttccgaaagggctggacacaaatgtatggccactgagtccgtggatggcgagctcagtgggtgtaacgccgcaatattgaagagggaaaccatgcgacctagtagccgcgtggccctaatggttctgtgcgaaacccaccgagcccgtatggtgaaacatcattgctgccccggttgcggctatttctgcactgcaggcacattcttggaatgccaccctgatttccgtgtcgcgcatcgctttcacaaagcgtgcgtcagccaactgaacggcatggtcttttgtccacattgcggagaggacgcatcagaggcccaggaagttacgatcccaaggggagacggggtgaccccccctgctggcactgccgctcccgcacccccaccactttcacaggacgtgccaggtagggccgatacatcccagcccagcgctcgaatgagagggcatggagaacccaggcgaccaccctgtgatccactcgctgacactatcgacagcagcggcccaagtctcacccttcccaatggaggctgtctgtccgccgtcggactgcccctcgggcctggtcgcgaagcactggaaaaagctctcgttatacaggaatctgaaagacgcaaaaaactgaggttccaccctcggcaactgtatctgtccgttaagcagggagaactccaaaaggtgatcctcatgttgctggataatctcgaccctaatttccagtccgaccaacagagcaagaggactccgcttcacgctgccgctcagaaagggtccgtagagatctgtcatgttctgctccaggcaggcgctaacatcaacgctgtggataaacaacaaagaacaccgctcatggaagctgtcgtgaataaccacctcgaagtggcacgttacatggtgcagagaggcggatgcgtttacagcaaggaagaggacggatcaacatgtctgcatcacgccgcaaaaataggcaacctcgagatggtctcattgctcctcagcacagggcaagtagatgtgaatgcccaagattctggaggttggacgccgattatttgggcggctgaacacaaacacatcgaagtgatccggatgttgctgacaagaggtgcagatgtgactctgactgacaacgttagcgagagattagtcgaggaggaaaatatctgtctgcactgggcctcttttaccggcagcgcggcaatcgctgaggttctgctcaacgcaagatgcgatctgcacgccgtgaattaccatggggacacacctctgcacattgcagcgagggaatcctatcacgactgtgtccttctctttctgtcacggggtgcaaatcccgaactgcggaataaggaaggcgacactgcctgggatctgacacctgagcgcagtgacgtgtggtttgccttacagctgaatcgcaaacttaggctgggcgtgggcaatcgagcaatccgtaccgagaaaataatctgccgggatgtggcgagaggttacgaaaacgtacctataccttgtgtaaatggggtggatggcgaaccctgcccagaggattacaaatacatcagcgaaaattgtgaaaccagcactatgaacatcgaccgaaacattacacacctgcaacactgcacctgtgtggacgactgttctagttccaactgcttgtgcggccagctgtccattcggtgctggtatgacaaggacgggaggctgctgcaggagttcaataagatcgagcccccactcatttttgaatgcaatcaggcttgtagttgctggagaaactgtaaaaatcgagtcgtacagagcggcattaaggttcgcttgcagttgtatcgaacagccaaaatgggatggggagtcagggcattacagacaattccccagggcacctttatctgtgagtatgtgggtgaactgatttctgacgcggaggccgatgtccgcgaagatgacagttacctctttgatctcgacaacaaagatggagaggtctattgcattgacgcacgctactatggcaatattagtcggttcatcaaccacctgtgtgacccgaacatcatccccgtgcgtgtgtttatgctccaccaagatcttaggtttccccgtatcgcctttttcagctctcgagatattcgcacgggcgaggaattagggttcgattacggggatcgattttgggatattaaatccaaatacttcacgtgtcagtgtggctcagaaaaatgcaaacattccgcagaagccatcgccctggagcaatcccgcctggccagacttgatcctcaccctgaactgcttcctgagctcggaagcttgccacccgtcaacacctag

SEQ ID NO: 288552 - DNA, 3096 bp, Artificial Sequence
  derived and/or modified sequence
tcttgtcactgtacaccatctagaccacccgtgcctgagaagcgacctcctgagattcagcatttccgaatgtctgatgatgttcatagcttaggtaaggtgacaagtgacctggcaaagagaaggaaactgaattctggaggcggtttgtctgaggagctaggcagtgccagacgcagtggagaagtcactcttaccaagggtgacccagggtccttggaggaatgggaaacagtggtcggagacgacttttctttgtattatgatagctactcagtggatgagcgtgtggattccgactcaaagtctgaagtggaggccctcacagaacagctctccgaagaggaggaagaagaagaggaggaggaggaggaagaggaagaggaggaagaggaggaagaggaagaagaggacgaagagtcagggaatcagtcggatcgtagtggaagcagcggcaggagaaaagctaaaaaaaaatggaggaaggattcgccctgggtgaagcctagcaggaaacgacggaagcgcgagccccctagggcgaaggagcctaggggcgttaacggggttggcagcagcgggccatcagagtacatggaggttcctctgggctcactcgaactgccctccgaaggcacgttgagtcccaaccacgcgggagtatccaatgacacttcttccctagaaacagagcgtgggttcgaggagctgcccctgtgttcttgtagaatggaggcccctaaaatcgatcgaataagtgagagagccggacacaagtgtatggcgactgagtccgtggatggcgagctttcagggtgcaatgcggctattttgaagcgcgagacaatgcgtccttcctccagggtagctctgatggtcctgtgcgagacccaccgcgctcgcatggtcaaacatcactgttgcccgggttgtgggtatttttgcaccgctggaacattcctggagtgccatcctgattttcgcgttgcccataggttccataaagcatgtgtgagccagctgaacgggatggttttctgccctcactgcggagaggatgcttcggaggctcaggaggtgacaattcctaggggcgacggcgtcacgccccctgccggtacagccgcacccgctcctcctccactgtctcaggatgtgcctggcagagctgacaccagtcaaccatcagcacggatgcggggtcatggtgagcctaggcgtcccccatgcgacccactggctgacactattgatagctccggccctagccttacattaccaaatggaggatgtctatccgccgtgggcctgccccttggcccaggccgagaggcgctcgagaaagctctggtgatccaggaatccgagcggcgtaagaagctgcgtttccaccccaggcagctgtatctgtcagttaaacagggggaattgcagaaagtaattcttatgcttctggataatttagaccccaatttccagtctgaccaacaaagtaagcggacacctctgcacgctgcagcacagaaaggttctgtggagatctgtcacgtgctgctgcaagccggagccaacattaatgcagtggacaagcagcagagaacgccactcatggaggcagttgtgaataatcacctcgaggtggccaggtatatggttcagaggggaggatgcgtctacagcaaagaggaggacggttccacatgtctccaccatgcagcaaaaataggaaatctcgaaatggtgtccctgctcctctcaaccggccaggtcgacgtgaacgcccaagactcaggcggttggacgccaatcatttgggcagcggagcacaaacatattgaggtcatcagaatgttattgactaggggggcagatgtgaccctaactgacaatgttagcgaacgtctggtggaggaggagaatatctgcttacattgggcaagctttaccggatccgctgcgattgctgaagtgctgctaaacgccaggtgcgacctgcatgctgttaactaccatggtgacacgccactacatatcgcggctcgggaatcttatcatgactgcgtcctgttgttcttgtcccgaggcgcaaatccggagttaaggaataaagaaggtgacaccgcctgggacctcacgccagagcgtagcgatgtgtggttcgctctccaactaaatcgtaaactacggctgggtgtaggcaatcgtgccatccgcactgagaaaatcatttgccgggacgtcgcgagaggctatgaaaacgtgcccataccgtgtgtaaacggtgtggacggggagccttgtcccgaggattataaatatatatcggagaactgcgagacgagtacgatgaatatcgatagaaacattacacatctccagcactgtacctgtgtggatgattgcagctcaagtaattgcttgtgtgggcaactctctatacggtgttggtatgataaggatggcagacttctgcaagagttcaataagatcgagccaccactcatctttgagtgtaaccaagcttgttcgtgctggcgaaattgtaagaatagggtggtgcaaagcggaataaaggtccggttgcagctataccggacagccaagatggggtggggggtgagggcactccagacaatccctcagggaacattcatttgcgaatacgttggagagctgatcagtgatgctgaagccgacgttcgcgaagatgatagctacctttttgatctcgataacaaagacggtgaggtctactgcattgacgcccgatactatggtaacatatctcggttcattaatcatctgtgtgaccccaacatcatccccgtgagggtatttatgctgcaccaggatttgaggtttccgaggattgcttttttttctagccgagacatcagaactggggaagaactcgggtttgattacggtgataggttctgggacattaagagcaaatactttacttgccagtgcggttcggaaaaatgcaaacacagtgccgaagcgattgcactcgaacaatcaaggcttgctaggctcgatcctcaccctgagcttcttccggagctcgggtctctgccacctgtgaacacgtag

SEQ ID NO: 288553 - DNA, 3096 bp, Artificial Sequence
  derived and/or modified sequence
tcctgccactgtacacctagctggcctcctgtacccgagaaacgacctcctgaaatccagcacttcagaatgtccgatgatgtgcatagcctgggcaaggtgacgtccgatctcgctaagaggaggaagctcaactccgggggtgggcttagcgaagagcttggatccgcacggcgtagtggggaggtgacattgaccaaaggcgatccagggagcctggaagagtgggagactgtagtgggtgatgactttagcctatattatgacagctactccgtggatgagagagtcgactcggactctaagtcagaggtcgaggcactgaccgagcaactatcagaagaagaggaagaagaagaggaggaggaagaggaagaggaggaagaggaggaagaggaagaggaggaagaggatgaggaaagtggtaatcagagcgacaggtctggtagcagcggcaggaggaaggcgaagaagaagtggcgcaaagacagcccatgggtgaaaccatccagaaagaggcgcaaacgtgagccacctcgtgccaaagagccccgtggggtgaatggagtcggctcgagtggtccttcagaatacatggaagtgccactgggatcactggaactaccctctgaaggaacattatcaccaaaccatgccggagtatccaacgatacctcttccctagagacagagagaggctttgaagagctgccactgtgtagttgtcgtatggaggcccctaagattgataggatcagcgaacgcgcaggccacaaatgtatggccacagagtcggtggacggagagctgtctggttgtaacgccgctatactaaaacgcgaaactatgaggccatcatcaagagtggcgctgatggtgctgtgcgagacacatagagctaggatggttaagcaccattgttgtcctgggtgcggctacttctgtacagccggaacctttttagaatgccaccccgatttccgggtcgcacaccgttttcacaaggcttgtgtgagccaactcaatggaatggttttctgcccacactgcggggaggacgcttccgaggcccaggaagtcacaattccgagaggtgatggagtcactccccctgccggaacagcggcaccggcaccgcctccgctgagccaagacgtgccaggacgtgccgatacgtctcaacctagcgccaggatgagaggacacggcgaacctcgcaggccaccctgcgacccgttagccgacactatcgattctagcggcccttcactgaccctcccaaacggcggatgcctcagcgccgttggactgcccttggggccaggtcgcgaggccctagagaaagccctggtgatccaggagtccgaaagaagaaaaaaactcagatttcaccccagacagctgtatctgagcgtgaagcagggagagctacagaaggtgattctgatgctgcttgacaatctcgatcctaatttccagtctgaccagcaaagcaaacgcacccccctgcacgctgccgctcagaaggggtctgtggagatatgtcacgtgttactccaggccggagcaaacatcaacgcggttgacaagcagcaaaggacacccttgatggaggcggtggtgaataaccacctcgaggtggcccgatacatggtccagcgcggaggttgtgtttacagcaaagaggaagatggatccacatgccttcatcatgctgccaagatcggaaaccttgagatggtctcactcctgctgagtactggacaagtcgacgtaaatgcacaagactctgggggttggacaccgattatctgggctgccgagcacaagcatatcgaagtgattcgcatgttgctgactcggggtgccgatgtgacgttaaccgacaatgtctcggagaggctggtggaagaagaaaatatctgtctgcattgggcgtcattcacgggctctgccgcaattgccgaggtactgctcaatgctcggtgtgacctccacgcagtgaattaccacggcgacactcccctccatatcgccgctcgtgaatcctatcatgactgtgtccttctgttcctgtctcgaggcgcaaacccggaattgaggaacaaagagggtgataccgcctgggaccttacccccgaacgctccgacgtttggttcgcactacagctgaataggaagcttcggctgggtgtgggaaacagggcaatacgcactgagaaaatcatttgccgggacgtcgctagggggtatgagaatgtgcctatcccatgcgtgaatggagtagacggagaaccttgtcctgaagactataagtacatctcagagaattgtgagacatctacaatgaacattgatcgtaatatcacgcatctgcagcactgcacatgcgtcgacgactgctccagctccaactgcctgtgcggccagctgtctatcagatgttggtacgacaaggatgggaggctgctccaggagtttaataagattgaaccaccacttatctttgagtgcaaccaggcatgttcctgctggcggaattgtaagaatcgcgtggttcagtcaggcatcaaggtgagattacaactttataggacagccaagatgggatggggggtacgtgctttgcagaccatcccccaagggacctttatttgtgagtatgtcggtgaacttatctctgacgcggaagccgacgtgagggaagatgacagctacctattcgatctggacaataaggacggggaggtgtactgcatagatgctagatactatgggaatatcagccgattcattaatcatctatgtgaccccaatattattccggtgagagtgtttatgctccaccaggatctgcgatttccaaggattgccttcttctcctcccgtgatattcgcactggggaagaactgggctttgattatggggaccggttttgggacatcaagagtaagtatttcacttgccagtgcggctccgaaaagtgcaaacactctgccgaggccatcgcccttgagcagtctcggctggcaaggctcgaccctcaccccgaactcctgcccgagttgggcagcttaccccctgtcaacacctag

SEQ ID NO: 288554 - DNA, 3096 bp, Artificial Sequence
  derived and/or modified sequence
tcttgtcactgcactccatcatggccacccgttcctgaaaagaggccccctgagatccagcattttaggatgagtgacgatgttcactctctgggaaaggttacttctgacctggccaaaaggcgcaagttaaattctgggggtggtttgagcgaggagctgggctctgccagacgctcgggagaggtcacacttactaagggtgaccctggctctttagaggagtgggagacagtggtgggtgacgactttagcctgtactacgacagttattccgtggatgaacgagtagacagcgacagcaagagcgaagtagaggcgttgacggaacagctttccgaggaggaagaagaagaggaagaagaggaagaggaagaagaagaagaagaagaagaggaggaagaagaagaggatgaggagtccggcaatcagtcagaccggtccggctcatctggcagacggaaggcgaaaaagaagtggaggaaggattccccttgggtcaagccttcacggaaacgcaggaagagagaacctccacgggcaaaagagccacgaggggtgaacggagtgggatcgagtggcccatccgaatacatggaggtacctctgggctccctcgagcttcctagcgagggaactctgagccctaaccacgccggtgtatccaacgacacttcgtcgctggagacagaaagaggatttgaagaactgcccctttgctcctgtaggatggaggcccctaaaatagaccgaatttctgagagggcagggcacaagtgcatggcaaccgaaagtgtggatggagagcttagtggctgtaacgctgccattctcaaacgcgagacaatgcggccaagctcaagggttgcgctaatggtgctctgcgaaactcacagggcaagaatggtcaaacaccactgctgtccgggatgcggctatttctgcactgccggaacattcctggagtgccaccccgacttccgggtcgctcacagatttcacaaggcgtgcgtaagccagctaaatggaatggtgttctgcccacactgcggcgaggatgcgagcgaggctcaggaggtgaccattccacggggagacggggttactccgcctgctggcactgccgcacctgcccctccacctttgtcacaggacgtgcccggaagagccgacacatctcaaccgtcagcccgtatgagaggccacggagagcctagacgccctccgtgcgacccactcgctgacaccatcgacagttcagggcctagcctgacactacccaacggaggctgcctatccgcggtaggtttgccacttggtcccggtcgggaggctttggaaaaggccctcgtgatccaggaaagcgaacgccgtaaaaagcttagattccatccgagacagctgtatctgtctgtaaagcagggcgagttgcagaaggtgatcctgatgctactcgacaacttggaccccaacttccagtccgaccagcaatccaagagaacccccctgcacgctgccgcacagaagggcagtgtggaaatctgtcacgtactgctacaggccggtgcaaatattaacgccgttgacaagcagcaaagaacacccctcatggaggcagtggtcaacaatcacctggaggttgccagatatatggtgcaacgcggagggtgcgtttactcaaaggaggaagacggcagcacatgcctccatcatgcagccaagataggaaacctggagatggtgtcgttactcttatctaccggccaggtggacgtgaacgcacaggactctggcggatggacaccgattatatgggctgcggagcataagcatattgaggtgattcggatgctcctgactcgtggggctgatgtcacattgacagataacgtaagtgagaggcttgtcgaagaggagaacatatgtctgcactgggcgagcttcaccgggtctgccgctattgccgaggttctgttaaacgcccgttgcgatctgcatgcagtaaattaccacggggacacacctctgcacattgctgcacgagagagttaccacgattgcgttctgctgttcttgagccgcggagccaatccagaattacgcaacaaggaaggcgacacagcctgggatctgactcctgagagatcggacgtgtggtttgcactacagttgaatcgcaagttacgcctgggggtgggaaatcgggctatccggacggagaaaattatctgtagagacgtcgctcggggatacgagaacgtccccatcccttgtgttaacggcgttgacggagaaccctgtcccgaagactacaagtacatttctgaaaactgtgaaacctcaactatgaatattgaccggaacataactcatctccagcactgtacttgtgtagatgattgctccagctccaactgtctttgcggtcagttatcaattagatgttggtatgataaggatggaagactcctgcaggaatttaacaagatagaacccccacttatatttgagtgtaatcaggcatgctcctgctggcgcaactgtaagaaccgggtcgtccagagcggtataaaagtccgactgcagctgtacaggaccgcaaagatgggatggggcgttcgggctctgcagacaatccctcagggaacatttatttgcgaatacgtcggcgagctgatttctgatgcagaggctgatgtaagagaggatgattcttatctattcgacctggacaataaggatggtgaggtgtattgtatcgacgctagatactacggaaatatcagcaggtttattaaccatctttgtgaccctaacatcattcccgtgcgcgtgttcatgctgcaccaggatctgcggttccctcggatcgctttttttagctccagggacatcagaactggagaggagctcggatttgattacggcgaccgcttttgggacatcaagagcaaatatttcacctgtcagtgcggctccgaaaagtgcaagcacagtgcagaggccatagcgctcgaacaaagccgcttagccagactagatccgcacccagagctgctccctgagttgggatccctgccgccagtaaacacgtag

SEQ ID NO: 288555 - DNA, 3096 bp, Artificial Sequence
  derived and/or modified sequence
agctgtcactgcacaccatcccggcctcctgtgccggagaaacggcctcctgagatccagcactttaggatgtccgacgatgtccattccctgggcaaagtcacctcggatctggcaaagagaagaaagctgaatagcggaggaggtctcagcgaagagctcggtagtgccagaaggtccggcgaagtaacccttacaaaaggcgatccagggagcctcgaggagtgggagaccgtagtcggcgacgatttctcgctctattacgactcttattctgtggacgagcgggtggactccgatagcaagagtgaagttgaggcccttacggaacagctgagtgaggaggaagaagaagaggaagaagaggaagaggaagaggaagaagaagaggaagaagaagaagaggaggaggacgaagaatccggcaaccaatctgaccgttcagggagttctggacggaggaaagctaagaagaagtggaggaaggattcaccctgggtcaagccgtctcgcaagcgcagaaaacgcgaacctcccagagcgaaggagcctcgaggggtcaacggcgtgggctcctctggccctagtgagtatatggaggtgcctctcggctcattggagttaccatccgagggcactctcagtcctaatcacgctggcgtctccaacgacacctcatccctggaaacagagcggggatttgaagaacttcctttgtgctcttgtcgtatggaagctcctaagattgaccggatctccgagagggctggccacaagtgcatggccaccgagagtgtggacggcgaactatccggctgcaatgctgccatactgaagcgcgagacaatgcgcccttctagcagggttgcattgatggtcctgtgcgagacccacagggctcggatggttaaacatcactgttgcccgggatgcgggtatttctgtaccgcagggactttcctagaatgccaccccgactttcgggtggcgcacaggttccataaggcttgcgtgtcacagttaaatggaatggtattttgtccacattgtggagaggatgccagcgaagctcaggaggtgacaattcctcgaggggatggcgtcacacctcccgctggtactgctgcgccagctccaccaccattgagccaggatgtgcccggtcgagcagatactagtcagccatctgcgcgtatgagagggcacggcgaaccacggaggccgccatgcgatccactggcagacaccatcgattcctccggaccatctctgacacttccgaatggtggatgtctgtcggctgttgggctgcctctggggccaggacgcgaagccttagagaaggccttagtaatccaggaaagtgaaagaaggaagaagctgagatttcatccacgacagctatatctgtcggtaaaacagggcgaacttcaaaaagttatcttgatgctgctggacaatctggacccaaatttccagtcagaccagcaatcaaagagaacacccctccacgccgctgcacagaaaggatctgtcgaaatctgccatgtgctgctgcaggccggagccaacataaatgcagtagataagcagcagcggacgccattgatggaggcagtggttaataaccacctagaggtggcacggtacatggtccagcggggaggttgtgtgtatagcaaggaggaagacgggtcaacctgcttacatcatgcggcaaaaattggcaacctggagatggtctccttattactgtctactggacaagtggatgtcaacgctcaggacagcggtgggtggacccctattatttgggctgctgaacacaagcatatcgaagtgataaggatgctattaacgcgaggcgctgacgtgacactgactgacaacgtctcggagcggttggtggaggaggaaaatatctgtttacactgggctagctttacaggtagcgccgcaatcgcagaagtgctgctcaatgccagatgcgacttgcatgccgtgaactaccatggagatacacccttgcatatcgctgcgagagaatcctaccacgactgtgtgctgctgtttttatcccgtggcgctaacccagaactccggaacaaagagggcgacaccgcatgggatctcacaccagaaagatcagacgtctggtttgctcttcagttgaaccgaaaattacgcctcggggtcggcaatagagctatacgaactgagaagatcatttgcagggatgttgccaggggctacgaaaatgtcccgattccgtgcgtcaacggggttgatggtgagccatgcccagaagactataagtacatctccgagaattgcgagaccagtacaatgaacattgaccgtaatatcacccacctgcagcactgcacgtgtgtggacgactgtagctccagtaactgcctgtgcggccagctgagcattcgctgctggtacgataaagatgggaggctgctgcaggaattcaataaaatcgagccgcctttaattttcgagtgcaaccaggcctgcagttgctggagaaactgcaagaatagggtcgtgcagtccgggattaaggtcaggctccaactgtaccgcacagcaaagatgggctggggggtgcgggctctacagaccattccccagggaacctttatctgcgaatacgtgggtgagctcataagcgatgccgaagctgatgtgagagaagacgacagttacttattcgacttagataataaagatggggaggtctactgcattgacgcaaggtattacggcaatatttcacgttttatcaaccatttatgcgatcccaatatcattccagtcagggtttttatgctccatcaggacctgcgattcccgagaatcgccttcttcagcagtagggacatccgcaccggtgaagagctgggctttgactacggagaccgcttttgggatattaaaagcaagtattttacttgccaatgcggatccgaaaaatgtaaacatagcgcagaggccatcgcactggagcagtcccggttagcccgtctggacccacaccccgagctcctccctgagctggggagcctccctcctgtgaatacttag

SEQ ID NO: 288556 - DNA, 3096 bp, Artificial Sequence
  derived and/or modified sequence
tcgtgccattgcactccaagctggccacctgttccagagaaacggcctccggaaatccaacactttagaatgagcgatgacgtgcatagcctgggaaaagtgacctctgatctggccaaaagacgcaagctgaatagtggcggaggactgtccgaggaactgggttccgcaagacggagtggagaagtaacccttaccaagggggatcctggcagcttggaagaatgggaaacagtggtgggcgacgactttagcctgtattacgattcttactctgtagacgagcgcgtcgactccgactctaagagtgaggtagaagccttgacagaacagttgagcgaagaagaagaagaagaggaggaggaagaggaggaggaagaagaggaagaagaagaagaagaggaggaagaggacgaggagtccggcaaccagagtgatcggtctgggtcaagtggcaggcgcaaagccaagaagaagtggcggaaggattcaccatgggttaaacccagcagaaaaaggcgcaagcgggagccaccccgagcaaaagagccaagaggtgtcaacggcgtgggcagctctggtccttcagagtatatggaagtccctttgggcagcttggaacttccctcggaggggaccctgagtccaaaccacgccggagttagtaacgataccagctccctggagaccgagcgaggattcgaagagcttcctctatgttcctgtaggatggaggctccgaaaatcgaccgaatttcggaaagagcgggacataagtgcatggctacagagagtgttgacggggagctgagcggatgcaatgccgcaatcctgaagagagagacaatgaggccttctagccgtgtagcgctaatggttttgtgcgagacacatcgggcaaggatggtcaaacatcactgctgtcctggttgcggatacttctgtacagccggaacatttcttgaatgtcaccccgacttccgggtggcccacaggtttcacaaagcgtgtgtctcccagctgaatgggatggtgttctgtcctcattgcggagaagatgctagtgaggcacaagaagtcacaatccccagaggcgatggggtgactcctccagccggaacggctgctcccgctccacctccactaagccaggacgtccctggcagggctgacacatctcaaccaagcgcccgtatgcgaggacatggcgagccaaggcggcctccctgcgatcccctggctgataccatagattccagcggcccatcacttactttgcctaatggcggatgcttgagcgctgtggggctgcccctgggcccaggaagggaggccctggaaaaggcactggtgattcaggagtccgagaggcgcaagaaactccggttccatcctaggcagctgtatctcagcgttaaacagggggagttgcagaaagtaatccttatgttgcttgataatctagaccctaacttccagagtgatcagcagagtaagcgcacacccctccatgctgccgcacaaaaggggagcgtggaaatttgccacgtccttctgcaagcgggtgctaacataaacgccgtggataaacaacagcgaactcccctaatggaagctgttgtgaacaatcacctagaggtggcgagatacatggtccaaaggggcggatgtgtgtattcgaaagaggaggatggcagcacctgtctgcaccacgccgctaaaatcggcaatctggagatggtttccctactgcttagtacgggtcaggttgacgtgaacgctcaggactctgggggatggacaccgattatctgggccgcagaacacaaacacattgaggtcatcaggatgttgctgaccagaggggctgatgttacattaaccgataacgtgagcgaaagactggtggaagaggagaacatttgcctccattgggcttctttcacaggctctgccgcaatcgcagaggtcctgctgaacgccaggtgtgaccttcacgccgtaaactaccatggagacacgcctctgcatattgctgccagagagtcttatcacgactgtgtgctactctttttgtcaaggggtgccaatcctgagctccgaaataaggaaggtgacactgcctgggacctaactccagagagatcagatgtgtggttcgccctgcagctcaacaggaaacttaggctcggggtgggcaatcgagctatccgcacagagaaaatcatctgcagagatgtggccagaggatacgagaatgtacccataccatgtgtgaacggtgtggatggggagccctgccccgaagattacaagtatatctccgaaaattgtgaaactagcaccatgaatatcgacaggaacatcacccacttacagcactgtacctgtgtggacgactgcagctctagcaattgtctttgtggacagctgtccatccgctgttggtacgacaaggatggcaggctgctgcaagagtttaataagattgagcccccactcatttttgagtgtaatcaggcctgcagctgttggcgcaactgtaaaaatagggtcgtccaatctggcattaaggtaaggctgcagctttaccggacggcaaagatgggatggggagtcagggcccttcaaacgattccccagggcaccttcatctgcgagtatgttggcgagcttataagcgacgccgaggccgatgttagggaagacgacagttatctgttcgacctagataacaaggatggagaggtgtattgcatcgatgcacgatattatgggaacatttcacgcttcatcaatcatctatgtgatcctaacatcattcccgtgagagtatttatgctgcaccaggacctgcgcttccctaggatcgcgttcttttcctcccgcgatattagaaccggagaggagctgggcttcgactacggcgaccgtttttgggatataaagtctaaatacttcacatgccagtgtggcagtgagaaatgtaagcacagtgctgaagccattgccctggaacaaagtcgcctggctcggctggacccccaccccgagctgctccctgagctgggtagcctgcctcccgtcaatacatag

SEQ ID NO: 288557 - DNA, 3096 bp, Artificial Sequence
  derived and/or modified sequence
agctgccactgcacccccagctggccccccgtgcccgagaagagaccccccgagatccagcacttcagaatgagcgacgacgtgcacagcctgggcaaggtgaccagcgacctggccaagagaagaaagctgaacagcggcggcggcctgagcgaggagctgggcagcgccagaagaagcggcgaggtgaccctgaccaagggcgaccccggcagcctggaggagtgggagaccgtggtgggcgacgacttcagcctgtactacgacagctacagcgtggacgagagagtggacagcgacagcaagagcgaggtggaggccctgaccgagcagctgagcgaggaggaggaggaggaggaggaggaggaggaggaggaggaggaggaggaggaggaggaggaggaggaggaggacgaggagagcggcaaccagagcgacagaagcggcagcagcggcagaagaaaggccaagaagaagtggagaaaggacagcccctgggtgaagcccagcagaaagagaagaaagagagagccccccagagccaaggagcccagaggcgtgaacggcgtgggcagcagcggccccagcgagtacatggaggtgcccctgggcagcctggagctgcccagcgagggcaccctgagccccaaccacgccggcgtgagcaacgacaccagcagcctggagaccgagagaggcttcgaggagctgcccctgtgcagctgcagaatggaggcccccaagatcgacagaatcagcgagagagccggccacaagtgcatggccaccgagagcgtggacggcgagctgagcggctgcaacgccgccatcctgaagagagagaccatgagacccagcagcagagtggccctgatggtgctgtgcgagacccacagagccagaatggtgaagcaccactgctgccccggctgcggctacttctgcaccgccggcaccttcctggagtgccaccccgacttcagagtggcccacagattccacaaggcctgcgtgagccagctgaacggcatggtgttctgcccccactgcggcgaggacgccagcgaggcccaggaggtgaccatccccagaggcgacggcgtgaccccccccgccggcaccgccgcccccgcccccccccccctgagccaggacgtgcccggcagagccgacaccagccagcccagcgccagaatgagaggccacggcgagcccagaagacccccctgcgaccccctggccgacaccatcgacagcagcggccccagcctgaccctgcccaacggcggctgcctgagcgccgtgggcctgcccctgggccccggcagagaggccctggagaaggccctggtgatccaggagagcgagagaagaaagaagctgagattccaccccagacagctgtacctgagcgtgaagcagggcgagctgcagaaggtgatcctgatgctgctggacaacctggaccccaacttccagagcgaccagcagagcaagagaacccccctgcacgccgccgcccagaagggcagcgtggagatctgccacgtgctgctgcaggccggcgccaacatcaacgccgtggacaagcagcagagaacccccctgatggaggccgtggtgaacaaccacctggaggtggccagatacatggtgcagagaggcggctgcgtgtacagcaaggaggaggacggcagcacctgcctgcaccacgccgccaagatcggcaacctggagatggtgagcctgctgctgagcaccggccaggtggacgtgaacgcccaggacagcggcggctggacccccatcatctgggccgccgagcacaagcacatcgaggtgatcagaatgctgctgaccagaggcgccgacgtgaccctgaccgacaacgtgagcgagagactggtggaggaggagaacatctgcctgcactgggccagcttcaccggcagcgccgccatcgccgaggtgctgctgaacgccagatgcgacctgcacgccgtgaactaccacggcgacacccccctgcacatcgccgccagagagagctaccacgactgcgtgctgctgttcctgagcagaggcgccaaccccgagctgagaaacaaggagggcgacaccgcctgggacctgacccccgagagaagcgacgtgtggttcgccctgcagctgaacagaaagctgagactgggcgtgggcaacagagccatcagaaccgagaagatcatctgcagagacgtggccagaggctacgagaacgtgcccatcccctgcgtgaacggcgtggacggcgagccctgccccgaggactacaagtacatcagcgagaactgcgagaccagcaccatgaacatcgacagaaacatcacccacctgcagcactgcacctgcgtggacgactgcagcagcagcaactgcctgtgcggccagctgagcatcagatgctggtacgacaaggacggcagactgctgcaggagttcaacaagatcgagccccccctgatcttcgagtgcaaccaggcctgcagctgctggagaaactgcaagaacagagtggtgcagagcggcatcaaggtgagactgcagctgtacagaaccgccaagatgggctggggcgtgagagccctgcagaccatcccccagggcaccttcatctgcgagtacgtgggcgagctgatcagcgacgccgaggccgacgtgagagaggacgacagctacctgttcgacctggacaacaaggacggcgaggtgtactgcatcgacgccagatactacggcaacatcagcagattcatcaaccacctgtgcgaccccaacatcatccccgtgagagtgttcatgctgcaccaggacctgagattccccagaatcgccttcttcagcagcagagacatcagaaccggcgaggagctgggcttcgactacggcgacagattctgggacatcaagagcaagtacttcacctgccagtgcggcagcgagaagtgcaagcacagcgccgaggccatcgccctggagcagagcagactggccagactggacccccaccccgagctgctgcccgagctgggcagcctgccccccgtgaacacctag

SEQ ID NO: 288558 - DNA, 3096 bp, Artificial Sequence
  derived and/or modified sequence
agctgccactgcacccccagcagaccccccgtgcccgagaagagaccccccgagatccagcacttcagaatgagcgacgacgtgcacagcctgggcaaggtgaccagcgacctggccaagagaagaaagctgaacagcggcggcggcctgagcgaggagctgggcagcgccagaagaagcggcgaggtgaccctgaccaagggcgaccccggcagcctggaggagtgggagaccgtggtgggcgacgacttcagcctgtactacgacagctacagcgtggacgagagagtggacagcgacagcaagagcgaggtggaggccctgaccgagcagctgagcgaggaggaggaggaggaggaggaggaggaggaggaggaggaggaggaggaggaggaggaggaggaggaggaggacgaggagagcggcaaccagagcgacagaagcggcagcagcggcagaagaaaggccaagaagaagtggagaaaggacagcccctgggtgaagcccagcagaaagagaagaaagagagagccccccagagccaaggagcccagaggcgtgaacggcgtgggcagcagcggccccagcgagtacatggaggtgcccctgggcagcctggagctgcccagcgagggcaccctgagccccaaccacgccggcgtgagcaacgacaccagcagcctggagaccgagagaggcttcgaggagctgcccctgtgcagctgcagaatggaggcccccaagatcgacagaatcagcgagagagccggccacaagtgcatggccaccgagagcgtggacggcgagctgagcggctgcaacgccgccatcctgaagagagagaccatgagacccagcagcagagtggccctgatggtgctgtgcgagacccacagagccagaatggtgaagcaccactgctgccccggctgcggctacttctgcaccgccggcaccttcctggagtgccaccccgacttcagagtggcccacagattccacaaggcctgcgtgagccagctgaacggcatggtgttctgcccccactgcggcgaggacgccagcgaggcccaggaggtgaccatccccagaggcgacggcgtgaccccccccgccggcaccgccgcccccgcccccccccccctgagccaggacgtgcccggcagagccgacaccagccagcccagcgccagaatgagaggccacggcgagcccagaagacccccctgcgaccccctggccgacaccatcgacagcagcggccccagcctgaccctgcccaacggcggctgcctgagcgccgtgggcctgcccctgggccccggcagagaggccctggagaaggccctggtgatccaggagagcgagagaagaaagaagctgagattccaccccagacagctgtacctgagcgtgaagcagggcgagctgcagaaggtgatcctgatgctgctggacaacctggaccccaacttccagagcgaccagcagagcaagagaacccccctgcacgccgccgcccagaagggcagcgtggagatctgccacgtgctgctgcaggccggcgccaacatcaacgccgtggacaagcagcagagaacccccctgatggaggccgtggtgaacaaccacctggaggtggccagatacatggtgcagagaggcggctgcgtgtacagcaaggaggaggacggcagcacctgcctgcaccacgccgccaagatcggcaacctggagatggtgagcctgctgctgagcaccggccaggtggacgtgaacgcccaggacagcggcggctggacccccatcatctgggccgccgagcacaagcacatcgaggtgatcagaatgctgctgaccagaggcgccgacgtgaccctgaccgacaacgtgagcgagagactggtggaggaggagaacatctgcctgcactgggccagcttcaccggcagcgccgccatcgccgaggtgctgctgaacgccagatgcgacctgcacgccgtgaactaccacggcgacacccccctgcacatcgccgccagagagagctaccacgactgcgtgctgctgttcctgagcagaggcgccaaccccgagctgagaaacaaggagggcgacaccgcctgggacctgacccccgagagaagcgacgtgtggttcgccctgcagctgaacagaaagctgagactgggcgtgggcaacagagccatcagaaccgagaagatcatctgcagagacgtggccagaggctacgagaacgtgcccatcccctgcgtgaacggcgtggacggcgagccctgccccgaggactacaagtacatcagcgagaactgcgagaccagcaccatgaacatcgacagaaacatcacccacctgcagcactgcacctgcgtggacgactgcagcagcagcaactgcctgtgcggccagctgagcatcagatgctggtacgacaaggacggcagactgctgcaggagttcaacaagatcgagccccccctgatcttcgagtgcaaccaggcctgcagctgctggagaaactgcaagaacagagtggtgcagagcggcatcaaggtgagactgcagctgtacagaaccgccaagatgggctggggcgtgagagccctgcagaccatcccccagggcaccttcatctgcgagtacgtgggcgagctgatcagcgacgccgaggccgacgtgagagaggacgacagctacctgttcgacctggacaacaaggacggcgaggtgtactgcatcgacgccagatactacggcaacatcagcagattcatcaaccacctgtgcgaccccaacatcatccccgtgagagtgttcatgctgcaccaggacctgagattccccagaatcgccttcttcagcagcagagacatcagaaccggcgaggagctgggcttcgactacggcgacagattctgggacatcaagagcaagtacttcacctgccagtgcggcagcgagaagtgcaagcacagcgccgaggccatcgccctggagcagagcagactggccagactggacccccaccccgagctgctgcccgagctgggcagcctgccccccgtgaacacctag

SEQ ID NO: 288559 - DNA, 3415 bp, Artificial Sequence
  derived and/or modified sequence
tcatgccactgcactccatcctggcccccggtccctgagaagcggccccctgaaatacagcatttccgcatgagtgatgatgtccactcactgggaaaggtgacctcagatctggccaaaaggaggaagctgaactcaggaggtggcctgtcagaggagttaggttctgcccggcgttcaggagaagtgaccctgacgaaaggggaccccgggtccctggaggagtgggagacggtggtgggtgatgacttcagtctctactatgattcctactctgtggatgagcgcgtggactccgacagcaagtctgaagttgaagctctaactgaacaactaagtgaagaggaggaggaggaagaggaggaagaagaagaagaggaagaggaggaggaagaggaagaagaagaggaagatgaggagtcagggaatcagtcagataggagtggttccagtggccggcgcaaggccaagaagaaatggcgaaaagacagcccatgggtgaagccgtctcggaaacggcgcaagcgggagcctccgcgggccaaggagccacgaggagtgaatggtgtgggctcctcaggccccagtgagtacatggaggtccctctggggtccctggagctgcccagcgaggggaccctctcccccaaccacgctggggtgtccaatgacacatcttcgctggagacagagcgagggtttgaggagttgcccctgtgcagctgccgcatggaggcacccaagattgaccgcatcagcgagagggcggggcacaagtgcatggccactgagagtgtggacggagagctgtcaggctgcaatgccgccatcctcaagcgggagaccatgaggccatccagccgtgtggccctgatggtgctctgtgagacccaccgcgcccgcatggtcaaacaccactgctgcccgggctgcggctacttctgcacggcgggcaccttcctggagtgccaccctgacttccgtgtggcccaccgcttccacaaggcctgtgtgtctcagctgaatgggatggtcttctgtccccactgtggggaggatgcttctgaagctcaagaggtgaccatcccccggggtgacggggtgaccccaccggccggcactgcagctcctgcacccccacccctgtcccaggatgtccccgggagagcagacacttctcagcccagtgcccggatgcgagggcatggggaaccccggcgcccgccctgcgatcccctggctgacaccattgacagctcagggccctccctgaccctgcccaatgggggctgcctttcagccgtggggctgccactggggccaggccgggaggccctggaaaaggccctggtcatccaggagtcagagaggcggaagaagctccgtttccaccctcggcagttgtacctgtccgtgaagcagggcgagctgcagaaggtgatcctgatgctgttggacaacctggaccccaacttccagagcgaccagcagagcaagcgcacgcccctgcatgcagccgcccagaagggctccgtggagatctgccatgtgctgctgcaggctggagccaacataaatgcagtggacaaacagcagcggacgccactgatggaggccgtggtgaacaaccacctggaggtagcccgttacatggtgcagcgtggtggctgtgtctatagcaaggaggaggacggttccacctgcctccaccacgcagccaaaatcgggaacttggagatggtcagcctgctgctgagcacaggacaggtggacgtcaacgcccaggacagtggggggtggacgcccatcatctgggctgcagagcacaagcacatcgaggtgatccgcatgctactgacgcggggcgccgacgtcaccctcactgacaacgtgagtgagcgtttggttgaggaggagaacatctgcctgcactgggcctccttcacgggcagcgccgccatcgccgaagtccttctgaatgcgcgctgtgacctccatgctgtcaactaccatggggacacccccctgcacatcgcagctcgggagagctaccatgactgcgtgctgttattcctgtcacgtggggccaaccctgagctgcggaacaaagagggggacacagcatgggacctgactcccgagcgctccgacgtgtggtttgcgcttcaactcaaccgcaagctccgacttggggtgggaaatcgggccatccgcacagagaagatcatctgccgggacgtggctcggggctatgagaacgtgcccattccctgtgtcaacggtgtggatggggagccctgccctgaggattacaagtacatctcagagaactgcgagacgtccaccatgaacatcgatcgcaacatcacccacctgcagcactgcacgtgtgtggacgactgctctagctccaactgcctgtgcggccagctcagcatccggtgctggtatgacaaggatgggcgattgctccaggaatttaacaagattgagcctccgctgattttcgagtgtaaccaggcgtgctcatgctggagaaactgcaagaaccgggtcgtacagagtggcatcaaggtgcggctacagctctaccgaacagccaagatgggctggggggtccgcgccctgcagaccatcccacaggggaccttcatctgcgagtatgtcggggagctgatctctgatgctgaggctgatgtgagagaggatgattcttacctcttcgacttagacaacaaggatggagaggtgtactgcatagatgcccgttactatggcaacatcagccgcttcatcaaccacctgtgtgaccccaacatcattcccgtccgggtcttcatgctgcaccaagacctgcgatttccacgcatcgccttcttcagttcccgagacatccggactggggaggagctagggtttgactatggcgaccgcttctgggacatcaaaagcaaatatttcacctgccaatgtggctctgagaagtgcaagcactcagccgaagccattgccctggagcagagccgtctggcccgcctggacccacaccctgagctgctgcccgagctcggctccctgccccctgtcaacacatgagaacggaccacaccctctctccccagcatggatggccacagctcagccgcctcctctgccaccagctgctcgcagcccatgcctgggggtgctgccatcttctctccccaccaccctttcacacattcctgaccagagatcccagccaggccctggaggtctgacagcccctccctcccagagctggttcctccctgggagggcaacttcagggctggccaccccccgtgttccccatcctcagttgaagtttgatgaattgaagtcgggcctctatgccaactggttccttttgttctcaataaatgttgggtttggt

SEQ ID NO: 288560 - DNA, 3415 bp, Artificial Sequence
  derived and/or modified sequence
tcatgccactgcactccatccaggcccccggtccctgagaagcggccccctgaaatacagcatttccgcatgagtgatgatgtccactcactgggaaaggtgacctcagatctggccaaaaggaggaagctgaactcaggaggtggcctgtcggaggagttaggttctgcccggcgttcaggagaagtgaccctgacgaaaggggaccccgggtccctggaggagtgggagacggtggtgggtgatgacttcagtctctactatgattcctactctgtggatgagcgcgtggactccgacagcaagtctgaagttgaagctctaactgaacaactaagtgaagaggaggaggaggaagaggaggaagaagaagaagaggaagaggaggaggaagaggaagaagaagaggaagatgaggagtcagggaatcagtcagataggagtggttccagtggccggcgcaaggccaagaagaaatggcgaaaagacagcccatgggtgaagccgtctcggaaacggcgcaagcgggagcctccgcgggccaaggagccacgaggagtgaatggtgtgggctcctcaggccccagtgagtacatggaggtccctctggggtccctggagctgcccagcgaggggaccctctcccccaaccacgctggggtgtccaatgacacatcttcgctggagacagagcgagggtttgaggagttgcccctgtgcagctgccgcatggaggcacccaagattgaccgcatcagcgagagggcggggcacaagtgcatggccactgagagtgtggacggagagctgtcaggctgcaatgccgccatcctcaagcgggagaccatgaggccatccagccgtgtggccctgatggtgctctgtgagacccaccgcgcccgcatggtcaaacaccactgctgcccgggctgcggctacttctgcacggcgggcaccttcctggagtgccaccctgacttccgtgtggcccaccgcttccacaaggcctgtgtgtctcagctgaatgggatggtcttctgtccccactgtggggaggatgcttctgaagctcaagaggtgaccatcccccggggtgacggggtgaccccaccggccggcactgcagctcctgcacccccacccctgtcccaggatgtccccgggagagcagacacttctcagcccagtgcccggatgcgagggcatggggaaccccggcgcccgccctgcgatcccctggctgacaccattgacagctcagggccctccctgaccctgcccaatgggggctgcctttcagccgtggggctgccactggggccaggccgggaggccctggaaaaggccctggtcatccaggagtcagagaggcggaagaagctccgtttccaccctcggcagttgtacctgtccgtgaagcagggcgagctgcagaaggtgatcctgatgctgttggacaacctggaccccaacttccagagcgaccagcagagcaagcgcacgcccctgcatgcagccgcccagaagggctccgtggagatctgccatgtgctgctgcaggctggagccaacataaatgcagtggacaaacagcagcggacgccactgatggaggccgtggtgaacaaccacctggaggtagcccgttacatggtgcagcgtggtggctgtgtctatagcaaggaggaggacggttccacctgcctccaccacgcagccaaaatcgggaacttggagatggtcagcctgctgctgagcacaggacaggtggacgtcaacgcccaggacagtggggggtggacgcccatcatctgggctgcagagcacaagcacatcgaggtgatccgcatgctactgacgcggggcgccgacgtcaccctcactgacaacgtgagtgagcgtttggttgaggaggagaacatctgcctgcactgggcctccttcacgggcagcgccgccatcgccgaagtccttctgaatgcgcgctgtgacctccatgctgtcaactaccatggggacacccccctgcacatcgcagctcgggagagctaccatgactgcgtgctgttattcctgtcacgtggggccaaccctgagctgcggaacaaagagggggacacagcatgggacctgactcccgagcgctccgacgtgtggtttgcgcttcaactcaaccgcaagctccgacttggggtgggaaatcgggccatccgcacagagaagatcatctgccgggacgtggctcggggctatgagaacgtgcccattccctgtgtcaacggtgtggatggggagccctgccctgaggattacaagtacatctcagagaactgcgagacgtccaccatgaacatcgatcgcaacatcacccacctgcagcactgcacgtgtgtggacgactgctctagctccaactgcctgtgcggccagctcagcatccggtgctggtatgacaaggatgggcgattgctccaggaatttaacaagattgagcctccgctgattttcgagtgtaaccaggcgtgctcatgctggagaaactgcaagaaccgggtcgtacagagtggcatcaaggtgcggctacagctctaccgaacagccaagatgggctggggggtccgcgccctgcagaccatcccacaggggaccttcatctgcgagtatgtcggggagctgatctctgatgctgaggctgatgtgagagaggatgattcttacctcttcgacttagacaacaaggatggagaggtgtactgcatagatgcccgttactatggcaacatcagccgcttcatcaaccacctgtgtgaccccaacatcattcccgtccgggtcttcatgctgcaccaagacctgcgatttccacgcatcgccttcttcagttcccgagacatccggactggggaggagctagggtttgactatggcgaccgcttctgggacatcaaaagcaaatatttcacctgccaatgtggctctgagaagtgcaagcactcagccgaagccattgccctggagcagagccgtctggcccgcctggacccacaccctgagctgctgcccgagctcggctccctgccccctgtcaacacatgagaacggaccacaccctctctccccagcatggatggccacagctcagccgcctcctctgccaccagctgctcgcagcccatgcctgggggtgctgccatcttctctccccaccaccctttcacacattcctgaccagagatcccagccaggccctggaggtctgacagcccctccctcccagagctggttcctccctgggagggcaacttcagggctggccaccccccgtgttccccatcctcagttgaagtttgatgaattgaagtcgggcctctatgccaactggttccttttgttctcaataaatgttgggtttggt

SEQ ID NO: 288561 - DNA, 3415 bp, Artificial Sequence
  derived and/or modified sequence
tcatgccactgcactccatcctggcccccggtccctgagaagcggccccctgaaatacagcatttccgcatgagtgatgatgtccactcactgggaaaggtgacctcagatctggccaaaaggaggaagctgaactcaggaggtggcctgtcggaggagttaggttctgcccggcgttcaggagaagtgaccctgacgaaaggggaccccgggtccctggaggagtgggagacggtggtgggtgatgacttcagtctctactatgattcctactctgtggatgagcgcgtggactccgacagcaagtctgaagttgaagctctaactgaacaactaagtgaagaggaggaggaggaagaggaggaagaagaagaagaggaagaggaggaggaagaggaagaagaagaggaagatgaggagtcagggaatcagtcagataggagtggttccagtggccggcgcaaggccaagaagaaatggcgaaaagacagcccatgggtgaagccgtctcggaaacggcgcaagcgggagcctccgcgggccaaggagccacgaggagtgaatggtgtgggctcctcaggccccagtgagtacatggaggtccctctggggtccctggagctgcccagcgaggggaccctctcccccaaccacgctggggtgtccaatgacacatcttcgctggagacagagcgagggtttgaggagttgcccctgtgcagctgccgcatggaggcacccaagattgaccgcatcagcgagagggcggggcacaagtgcatggccactgagagtgtggacggagagctgtcaggctgcaatgccgccatcctcaagcgggagaccatgaggccatccagccgtgtggccctgatggtgctctgtgagacccaccgcgcccgcatggtcaaacaccactgctgcccgggctgcggctacttctgcacggcgggcaccttcctggagtgccaccctgacttccgtgtggcccaccgcttccacaaggcctgtgtgtctcagctgaatgggatggtcttctgtccccactgtggggaggatgcttctgaagctcaagaggtgaccatcccccggggtgacggggtgaccccaccggccggcactgcagctcctgcacccccacccctgtcccaggatgtccccgggagagcagacacttctcagcccagtgcccggatgcgagggcatggggaaccccggcgcccgccctgcgatcccctggctgacaccattgacagctcagggccctccctgaccctgcccaatgggggctgcctttcagccgtggggctgccactggggccaggccgggaggccctggaaaaggccctggtcatccaggagtcagagaggcggaagaagctccgtttccaccctcggcagttgtacctgtccgtgaagcagggcgagctgcagaaggtgatcctgatgctgttggacaacctggaccccaacttccagagcgaccagcagagcaagcgcacgcccctgcatgcagccgcccagaagggctccgtggagatctgccatgtgctgctgcaggctggagccaacataaatgcagtggacaaacagcagcggacgccactgatggaggccgtggtgaacaaccacctggaggtagcccgttacatggtgcagcgtggtggctgtgtctatagcaaggaggaggacggttccacctgcctccaccacgcagccaaaatcgggaacttggagatggtcagcctgctgctgagcacaggacaggtggacgtcaacgcccaggacagtggggggtggacgcccatcatctgggctgcagagcacaagcacatcgaggtgatccgcatgctactgacgcggggcgccgacgtcaccctcactgacaacgtgagtgagcgtttggttgaggaggagaacatctgcctgcactgggcctccttcacgggcagcgccgccatcgccgaagtccttctgaatgcgcgctgtgacctccatgctgtcaactaccatggggacacccccctgcacatcgcagctcgggagagctaccatgactgcgtgctgttattcctgtcacgtggggccaaccctgagctgcggaacaaagagggggacacagcatgggacctgactcccgagcgctccgacgtgtggtttgcgcttcaactcaaccgcaagctccgacttggggtgggaaatcgggccatccgcacagagaagatcatctgccgggacgtggctcggggctatgagaacgtgcccattccctgtgtcaacggtgtggatggggagccctgccctgaggattacaagtacatctcagagaactgcgagacgtccaccatgaacatcgatcgcaacatcacccacctgcagcactgcacgtgtgtggacgactgctctagctccaactgcctgtgcggccagctcagcatccggtgctggtatgacaaggatgggcgattgctccaggaatttaacaagattgagcctccgctgattttcgagtgtaaccaggcgtgctcatgctggagaaactgcaagaaccgggtcgtacagagtggcatcaaggtgcggctacagctctaccgaacagccaagatgggctggggggtccgcgccctgcagaccatcccacaggggaccttcatctgcgagtatgtcggggagctgatctctgatgctgaggctgatgtgagagaggatgattcttacctcttcgacttagacaacaaggatggagaggtgtactgcatagatgcccgttactatggcaacatcagccgcttcatcaaccacctgtgtgaccccaacatcattcccgtccgggtcttcatgctgcaccaagacctgcgatttccacgcatcgccttcttcagttcccgagacatccggactggggaggagctagggtttgactatggcgaccgcttctgggacatcaaaagcaaatatttcacctgccaatgtggctctgagaagtgcaagcactcagccgaagccattgccctggagcagagccgtctggcccgcctggacccacaccctgagctgctgcccgagctcggctccctgccccctgtcaacacatgagaacggaccacaccctctctccccagcatggatggccacagctcagccgcctcctctgccaccagctgctcgcagcccatgcctgggggtgctgccatcttctctccccaccaccctttcacacattcctgaccagagatcccagccaggccctggaggtctgacagcccctccctcccagagctggttcctccctgggagggcaacttcagggctggccaccccccgtgttccccatcctcagttgaagtttgatgaattgaagtcgggcctctatgccaactggttccttttgttctcaataaatgttgggtttggt

SEQ ID NO: 288562 - DNA, 852 bp, Artificial Sequence
  derived and/or modified sequence
atgaagcacgagaacgtgatcggcctgctggacgtgttcacccccgccagaagcctggaggagttcaacgacgtgtacctggtgacccacctgatgggcgccgacctgaacaacatcgtgaagtgccagaagctgaccgacgaccacgtgcagttcctgatctaccagatcctgagaggcctgaagtacatccacagcgccgacatcatccacagagacctgaagcccagcaacctggccgtgaacgaggactgcgagctgaagatcctggacttcggcctggccagacacaccgacgacgagatgaccggctacgtggccaccagatggtacagagcccccgagatcatgctgaactggatgcactacaaccagaccgtggacatctggagcgtgggctgcatcatggccgagctgctgaccggcagaaccctgttccccggcaccgaccacatcgaccagctgaagctgatcctgagactggtgggcacccccggcgccgagctgctgaagaagatcagcagcgagagcgccagaaactacatccagagcctgacccagatgcccaagatgaacttcgccaacgtgttcatcggcgccaaccccctggccgtggacctgctggagaagatgctggtgctggacagcgacaagagaatcaccgccgcccaggccctggcccacgcctacttcgcccagtaccacgaccccgacgacgagcccgtggccgacccctacgaccagagcttcgagagcagagacctgctgatcgacgagtggaagagcctgacctacgacgaggtgatcagcttcgtgcccccccccctggaccaggaggagatggagagctag

SEQ ID NO: 288563 - DNA, 852 bp, Artificial Sequence
  derived and/or modified sequence
atgaagcacgagaacgtgattggactgttagacgttttcactccagctcgctcgttagaggaattcaacgacgtttatctggttacgcatctgatgggcgcggaccttaataacatcgttaagtgccagaaactgaccgacgatcatgtgcagttcctgatttaccaaatactccgtggactgaaatatattcattctgccgatataattcatcgtgatcttaagccaagcaatctagccgtcaacgaggattgcgaactgaagatcctggattttggcctcgcgagacataccgatgatgaaatgacggggtatgtagctactcggtggtaccgcgcacccgaaattatgctgaattggatgcattataaccagacggtggatatctggtccgtcgggtgtatcatggccgagctgctcaccgggagaactctgttcccggggacagatcacattgatcagttgaagttgattttaaggctggtcggaactcccggcgccgaactcttgaagaagatcagcagtgagtcagcccgcaattacattcaaagcttaacccagatgccgaagatgaattttgcaaacgtttttattggtgcaaatcccttagccgtggacctgcttgaaaagatgctcgtgctggattccgacaagcgcattactgcagcgcaggctcttgcacacgcttacttcgcccagtaccacgacccagatgacgagcccgtggcagatccgtatgaccaaagttttgagtctagagatttgttaatcgacgagtggaagagtctgacatatgacgaggttatcagctttgtccccccccccctcgaccaggaagagatggaatcttag

SEQ ID NO: 288564 - DNA, 852 bp, Artificial Sequence
  derived and/or modified sequence
atgaagcatgaaaatgtgattggcctgctggatgtgttcaccccagcccggagcctggaggagttcaatgatgtgtacctggtgacccacctgatgggcgctgacctgaacaacatcgtgaagtgccagaagctgacagatgaccacgtgcagttcctgatctaccagatcctgcggggcctgaagtacatccacagcgctgacatcatccaccgggacctgaagcccagcaacctggccgtgaatgaagactgtgagctgaagatcctggactttggcctggcccggcacacagatgatgagatgacaggctacgtggccacccgctggtaccgggcccctgagatcatgctgaactggatgcactacaaccagacagtggacatctggagcgtgggctgcatcatggccgagctgctgactggaagaaccctcttccctggaacagaccacatcgaccagctgaagctgatcctgcggctggtgggcaccccaggagctgagctgctgaagaagatcagcagcgagagcgccaggaactacatccagagcctgacccagatgcccaagatgaactttgccaacgtgttcatcggggccaaccccctggccgtggacctgctggagaagatgctggtgctggacagcgacaagaggatcacagctgcccaggccctggcccacgcctactttgcccagtaccatgaccctgatgatgagcctgtggccgacccctatgaccagagctttgagagccgggacctgctgattgatgagtggaagagcctgacctatgatgaggtgatcagctttgtgcccccacccctggaccaggaggagatggagagctag

SEQ ID NO: 288565 - DNA, 852 bp, Artificial Sequence
  derived and/or modified sequence
atgaagcacgagaacgtgatcggcctgctggacgtgttcacccccgctcggtcgctcgaggaatttaacgacgtctacctggtcactcacctcatgggggcagacctgaacaacatcgtgaagtgtcaaaagctgacggacgatcacgttcagttcctgatctaccagattttgagagggctgaagtatatccactctgccgacataatccacagagatttaaaaccttctaatctagcagtaaacgaggactgtgagcttaagatactcgacttcgggttggcccgtcatactgacgatgaaatgactggatacgtggccacacggtggtatagagcgcccgaaatcatgctgaattggatgcactacaatcagactgtcgacatttggtccgtcgggtgtattatggctgagctcctgaccggtcggacactttttcctggaaccgaccatattgatcagctgaagctgattctgcgactcgtcggaacccccggagctgagctcctgaagaagattagctcagaaagcgcacggaattatattcagtcgctcacacagatgcccaaaatgaactttgcaaatgtgtttattggcgccaatccgctagcagtcgacctccttgaaaagatgctggttttggactcagacaaacggattacggctgcacaggccttagcccatgcctacttcgcccagtaccacgaccccgacgatgagcctgtggcagatccttacgaccagagctttgagtctcgggacctgctgatcgatgaatggaagagtctgacttatgatgaagtgatctccttcgtgcctcccccgctcgaccaggaagaaatggagtcctag

SEQ ID NO: 288566 - DNA, 852 bp, Artificial Sequence
  derived and/or modified sequence
atgaagcacgagaatgtgattggcctcctggatgtgttcacgccagccaggtccttagaggagttcaatgatgtgtatttggttacccacctgatgggagccgacttgaataacattgtgaaatgccagaaactgaccgacgatcatgtgcagttcctgatatatcagatcctgagaggactaaagtacatccattcagccgacatcatccaccgggacctaaagccttcgaacctggcagtgaatgaggattgcgaattgaaaatcttggacttcggtctggcacgccacaccgacgatgagatgaccggatacgtggcgaccaggtggtaccgggcaccagagattatgctaaattggatgcactataaccaaacggtagatatatggagcgtcgggtgcatcatggcagaactcttgacagggaggacgttgttccccggtactgatcacattgatcagctgaagcttatcctccgcctggtaggaacaccaggggcagagctgcttaaaaagatctcatctgagtctgcacgcaattacattcagagtcttacacaaatgcccaagatgaacttcgccaacgttttcatcggggcaaatccactagcagtcgatttactggaaaagatgctcgtcctcgactccgacaagcgcataaccgccgctcaggccctggcacatgcttattttgcacagtaccacgacccggatgatgaaccagtggccgatccttacgaccagtcgttcgaatcaagagatttgttaattgacgagtggaagtcgcttacctacgatgaagtgataagctttgtgccacctcccctggatcaggaagaaatggagagttag

SEQ ID NO: 288567 - protein, 346 aa, Artificial Sequence
  derived and/or modified sequence
MEFSLRIFLGLGRRAEDLSAEQHRLAIKVKPSFLEYLSYLLNFMSVIAGPCNNFKDYIAFIEGKHIHMKLLEVNWKRKGFHSLPEPSPTGAVIHKLGITLVSLLLFLTLTKTFPVTCLVDDWFVHKASFPARLCYLYVVMQASKPKYYFAWTLADAVNNAAGFGFSGVDKNGNFCWDLLSNLNIWKIETATSFKMYLENWNIQTATWLKCVCYQRVPWYPTVLTFILSALWHGVYPGYYFTFLTGILVTLAARAVRNNYRHYFLSSRALKAVYDAGTWAVTQLAVSYTVAPFVMLAVEPTISLYKSMYFYLHIISLLIILFLPMKPQAHTQRRPQTLNSINKRKTD

SEQ ID NO: 288568 - DNA, 1041 bp, Artificial Sequence
  derived and/or modified sequence
atggagttctccctgcggatttttttagggctcggacgccgggccgaggatttatccgcagagcagcaccgattggccataaaagtcaagcctagctttctggagtacctgtcttacttgctgaatttcatgtcagtgatcgccggcccgtgtaacaacttcaaggactacattgccttcattgaagggaagcacattcatatgaaactgctagaagtcaattggaaacggaagggattccactcactgcctgagccttcacctacaggggccgtaatacataagttagggattactctcgtgtctttgttactgttcctcaccctgaccaagacgttccccgtcacatgcctggtagatgactggttcgttcataaagcgtcgttccctgccaggctgtgttatttatacgttgtcatgcaggcttcaaaaccgaaatactacttcgcttggaccttagctgacgccgtgaataatgccgccggcttcggcttttctggggtcgacaagaacgggaacttctgctgggaccttctgagtaatttgaatatttggaagattgagacagccaccagctttaagatgtacctggaaaactggaacatacagaccgctacttggctcaagtgcgtctgctatcaacgggtgccttggtatccaacagtactcacttttattctgtccgcgctgtggcacggcgtgtacccgggatactatttcacattccttacagggattctcgtcaccttggctgcaagagcggtgcgtaacaactaccgtcactacttcctgtcctcccgggcgttaaaagccgtgtatgacgctggtacctgggccgtgactcaactggccgtgagctacacagttgcccctttcgttatgttggctgtggagcctaccatttcactatacaaatccatgtatttttatctgcacataattagtctgcttatcatcctgttcctgcctatgaagccccaggcccatacccagcgacgaccccagaccctcaacagtatcaacaaacgcaagactgactag

SEQ ID NO: 288569 - DNA, 1041 bp, Artificial Sequence
  derived and/or modified sequence
atggagttcagcctgcgcatcttcctgggcctgggcagaagagctgaggacctgtctgctgagcagcaccggctggccatcaaggtgaagcccagcttcctggagtacctgagctacctgctgaacttcatgtctgtgattgctggcccctgcaacaacttcaaggactacatcgccttcatcgagggcaagcacatccacatgaagctgctggaggtgaactggaagaggaagggcttccacagcctgcctgagcccagccccactggagctgtgatccacaagctgggcatcaccctggtgtccctgctgctcttcctgaccctgaccaagaccttccctgtgacctgcctggtggatgactggtttgtgcacaaggccagcttccctgcccggctgtgctacctgtatgtggtgatgcaggccagcaagcccaagtactactttgcctggaccctggctgatgctgtgaacaatgctgctggcttcggcttcagcggcgtggacaagaatggaaacttctgctgggacctgctgagcaacctgaacatctggaagattgaaacagccaccagcttcaagatgtacctggagaactggaacatccagacagccacctggctgaagtgtgtgtgctaccagagggtgccctggtaccccaccgtgctgaccttcatcctgagcgccctgtggcacggcgtgtacccaggctactacttcaccttcctgaccggcatcctggtgaccctggccgcccgggctgtgaggaacaactaccgccactacttcctgagcagccgggccctgaaggctgtgtatgatgctggcacctgggccgtgacccagctggccgtgtcctacacagtggccccctttgtgatgctggccgtggagcccaccatcagcctgtacaagtccatgtacttctacctgcacatcatcagcctgctgatcatcctcttcctgcccatgaagccccaggcccacacccagaggcggccccagaccctgaacagcatcaacaagaggaagacagactag

SEQ ID NO: 288570 - DNA, 3219 bp, Artificial Sequence
  derived and/or modified sequence
agcgccaaagccaagtttgcgcctcgagagtttgcgcctcgagagtttgcgccggttcgcattccccggcctcccgttcgctcccccgcgaaccaggcggccgtgcgcctctcggggcaaccacccaagagcacccgggcgggaggacgccgagcagggggtgttgcgggctgggacaggggcagccacctcccgaagatgcaggatggcagcagagccgcagccgtccagcctttcctaccgcaccacgggctccacctacctgcacccgctcagcgagctcctgggcatcccgctggaccaggtgaattttgtggtatgccagcttgttgctctgtttgctgctttctggtttcgcatctacttacgtcctggtacaaccagctctgatgtccggcatgcggttgccaccatttttggcatctattttgtcatcttttgtttcggctggtactctgtgcatctttttgtgctggtgttaatgtgctatgcaatcatggtcactgctagtgtatccaatattcacagatattccttttttgtagcaatgggatatcttacaatatgccacatcagccgaatatacatcttccactatggaattctcactacggatttttctgggattaggtcgaagagctgaagacctttctgctgaacaacatcgacttgctatcaaagtgaaaccctcttttttggaatacttaagttaccttctcaatttcatgagtgtcatagctggtccttgtaacaatttcaaggactacatagccttcattgaggggaagcatatacacatgaagttgctggaggtgaactggaagcgaaaaggtttccacagcttgccagaaccttctcccacaggagctgtgatacacaagttgggcatcaccttggtgtctctccttttgtttttgacgctaacgaagacctttcctgtcacctgccttgtggatgactggtttgtccataaagcaagctttccggctcgactctgctacttatatgttgtcatgcaagcctcaaagcccaagtattactttgcatggacattagctgatgcagtgaataacgcagctggctttgggttcagcggagtggataagaatgggaatttctgttgggatctgctttcgaacctaaacatctggaaaattgagactgccacaagtttcaaaatgtacttggaaaactggaatattcagacagctacttggctaaagtgtgtgtgctatcagcgggttccatggtaccccacggtgctaaccttcatcctgtctgctttgtggcatggtgtctaccctggatactattttaccttcttaactggaattcttgtcacattagcagctagagcggtcaggaacaactacagacattacttcctttcttcaagagctctcaaggctgtgtatgatgcaggcacctgggccgtcactcagctggctgtctcttacacggtagcaccctttgtgatgttggcagttgaaccgaccatcagcttatacaagtccatgtacttttatttgcacatcataagtctcctgataatactatttctgccaatgaaaccacaagctcatacgcaaaggcggcctcagactctgaactctattaataagagaaaaacagattgatacctccaagagaagcggaacaagcaaaactgcagaacgttcgaaagatgagatgacaaggcttcaagggctcctccggtggcttagaggcgatgtttacatgcatctttattttgttcttttttaaagtgcagggagtatttttttttttttttttttttttttttttttgagacggagtctcgctctgtcgcccaggctggagtgcagtggcgggatctcggctcactgcaagctccgcctcccgggttcacgccattctcctgcctcagcctcccaagtagctgggactacaggcgcccgccactacgcccggctaattttttgtatttttagtagagacggggtttcaccgttttagccgggatggtctcgatctcctgacctcgtgatccgcccgcctcggcctcccaaagtgctgggattacaggcgtgagccaccgcgcccggccgggagtatttttataaagcctttttgtacagattaatcggccatgtccaggttattggttttgatattttataggacatttgagtggtgtggcgatgtgtagagaatgtgccagagctgcagagacagtccattctgggctgctggctttttgcccttcctgcatgatttccagctactgtgacctggatgctgggaacccaggcatcggctccaaaaattagaaggcgagtgctgagaagacttgtcacaggtttctcaaatcagaatatactcagtcatagtggttccctgggaagccccagaccctttgacttgtgacattactggtttgcagacataataactacactcagaggaccatggaggcagagggatcatggtttcagggcactgaaaactctacgagccaagaggactagtgcatggactgaaagtcaggcatgccctcaaataggctgtattttctttccaggaatgtaacctttcccctttttcttctgacctgagccaagattggaaatcagaaagtctcctgtacatggagctgaagaggggctgctgttttccgaatgttttccatttcacaggcgccacctgcttgcccggggttggtcttgagaagacacccaaatgttcatgcctcagaaaggcagcagaatgccttttaggaaatttttttaaagtaatttgaagttatatagaagtttggtaagaagaagcagttgtttctctcttttctccctcatttcatggaggtgttaatgatcatggctggccgtgatgtacacatgggctgattttcattttttcagtttcatagctgagaaattcagctttgttttagttgaatcatcatattggaaagcagacattgaaagttttcttttctatctttgttatgaatgtgctatggccccttttggagacttctattgggtaatattctatgtgagagaaggaaacttggtattaaatgttgtggaaaataataatgatgataataataaagtatatgctgcaatggtgtactgccaatcagattgcttgggagaagaaaatttattcaaatccaacgataaaaaattaatttcttattgaataaacagtatgttcccatataaaagaaat

SEQ ID NO: 288571 - DNA, 1041 bp, Artificial Sequence
  derived and/or modified sequence
atggagttcagcctgcggatcttcctgggcctgggccggcgggccgaagatctgagcgcggaacagcatcggctggcaatcaaggtcaagccctcatttcttgagtacttgtcatatttgctgaatttcatgtccgtgatcgctgggccgtgcaataattttaaggactacattgccttcattgaagggaagcacatccatatgaaactgctagaggtcaactggaagagaaagggcttccactctttaccagagccctcgccgacaggcgccgtcattcacaagttgggcatcacgcttgtgagtttgctgctgttcctgactctaacaaagacattcccggtcacctgcttggtagatgactggttcgtgcataaggccagctttcccgcccgcctatgttacctctacgtggtcatgcaggctagcaagcctaaatattattttgcttggacgttggcagacgccgtcaacaacgcagctggctttggcttttcaggagtcgacaagaatggcaatttctgttgggatttactgtctaaccttaatatctggaagatcgagacagccacatctttcaaaatgtacttggagaactggaacatccagacagcaacctggctaaagtgtgtgtgctaccagcgggtgccgtggtaccctacggtgttgacttttatcctgagcgccttgtggcatggcgtgtaccccgggtactacttcacatttctgactggcattctggtcacactggcggcacgcgctgtcagaaataattataggcactacttcctgtctagccgagcgctcaaagcagtgtacgacgccggtacctgggccgtaacacagctggccgtgtcctacacagtagcacccttcgtcatgttagctgttgaacccaccatttcactgtacaagagcatgtatttttacttgcacatcataagcctactgataatcctctttcttccaatgaagccacaggcacacacccagaggcgcccacagaccttgaactccatcaataaacgcaagacggactag

SEQ ID NO: 288572 - DNA, 1041 bp, Artificial Sequence
  derived and/or modified sequence
atggagttttctctgaggatcttcttgggactcgggcgtagggcagaggatctgtccgccgagcaacatagattagccatcaaggtcaagccaagcttcttagagtatctatcatacttgttgaattttatgtctgtcattgctggtccttgtaataattttaaagactacatagcattcattgaaggcaaacacattcacatgaaactgttagaggtgaattggaaacgcaaagggttccatagccttccagagccgtctcctaccggagctgtaatacataagctgggaatcacacttgtcagccttctgctgtttctgaccctgactaagacattccctgtgacctgtctggtcgacgattggtttgtacataaggcttccttcccggcacggctctgttatctgtacgttgtaatgcaggctagcaagccaaaatattatttcgcctggacacttgctgatgctgtaaacaacgctgccggatttggtttctctggcgttgacaaaaacgggaatttctgttgggatctactgagcaatttaaatatctggaaaattgagaccgccaccagcttcaaaatgtacctggaaaactggaatatccagacagccacttggctgaaatgtgtgtgctatcagcgggtcccttggtacccaaccgtgcttacattcatcttatcagccctgtggcacggggtatacccaggatactacttcacattcctgactggcattctagtcacactcgctgcgcgagctgtcagaaacaactaccgtcactactttctcagctcgagggctctgaaggccgtgtacgatgctggaacctgggcggtcacccaactcgctgtgagttacaccgtcgcacctttcgttatgttggcagtggagccgacaatctccctgtacaaatccatgtatttttatctgcatattatatctctcctgatcatcctgttcttacccatgaagccccaggcccacacccaacgcagaccccaaactcttaactccatcaacaagcggaaaacagactag

SEQ ID NO: 288573 - DNA, 1041 bp, Artificial Sequence
  derived and/or modified sequence
atggagttcagcctgagaatcttcctgggcctgggcagaagagccgaggacctgagcgccgagcagcacagactggccatcaaggtgaagcccagcttcctggagtacctgagctacctgctgaacttcatgagcgtgatcgccggcccctgcaacaacttcaaggactacatcgccttcatcgagggcaagcacatccacatgaagctgctggaggtgaactggaagagaaagggcttccacagcctgcccgagcccagccccaccggcgccgtgatccacaagctgggcatcaccctggtgagcctgctgctgttcctgaccctgaccaagaccttccccgtgacctgcctggtggacgactggttcgtgcacaaggccagcttccccgccagactgtgctacctgtacgtggtgatgcaggccagcaagcccaagtactacttcgcctggaccctggccgacgccgtgaacaacgccgccggcttcggcttcagcggcgtggacaagaacggcaacttctgctgggacctgctgagcaacctgaacatctggaagatcgagaccgccaccagcttcaagatgtacctggagaactggaacatccagaccgccacctggctgaagtgcgtgtgctaccagagagtgccctggtaccccaccgtgctgaccttcatcctgagcgccctgtggcacggcgtgtaccccggctactacttcaccttcctgaccggcatcctggtgaccctggccgccagagccgtgagaaacaactacagacactacttcctgagcagcagagccctgaaggccgtgtacgacgccggcacctgggccgtgacccagctggccgtgagctacaccgtggcccccttcgtgatgctggccgtggagcccaccatcagcctgtacaagagcatgtacttctacctgcacatcatcagcctgctgatcatcctgttcctgcccatgaagccccaggcccacacccagagaagaccccagaccctgaacagcatcaacaagagaaagaccgactag

SEQ ID NO: 288574 - protein, 396 aa, Artificial Sequence
  derived and/or modified sequence
MDPRGTKRGAEKTEVAEPRNKLPRPAPSLPTDPALYSGPFPFYRRPSELGCFSLDAQRQYHGDARALRYYSPPPTNGPGPNFDLRDGYPDRYQPRDEEVQERLDHLLCWLLEHRGRLEGGPGWLAEAIVTWRGHLTKLLTTPYERQEGWQLAASRFQGTLYLSEVETPNARAQRLARPPLLRELMYMGYKFEQYMCADKPGSSPDPSGEVNTNVAFCSVLRSRLGSHPLLFSGEVDCTDPQAPSTQPPTCYVELKTSKEMHSPGQWRSFYRHKLLKWWAQSFLPGVPNVVAGFRNPDGFVSSLKTFPTMKMFEYVRNDRDGWNPSVCMNFCAAFLSFAQSTVVQDDPRLVHLFSWEPGGPVTVSVHQDAPYAFLPIWYVEAMTQDLPSPPKTPSPK

SEQ ID NO: 288575 - DNA, 1191 bp, Artificial Sequence
  derived and/or modified sequence
atggaccccagggggacgaaacgcggtgccgaaaagactgaggtcgcggagccacggaacaaactgcctcggcctgccccgagtctgccgactgaccctgcactgtatagcgggccctttcctttctaccgacggccttcggagttgggctgcttcagcttggatgcacagcggcagtatcacggcgacgctcgcgctcttcgctattatagccccccccccacaaacggtccaggcccaaatttcgacttgcgagacgggtaccctgacagatatcaaccccgcgatgaggaagttcaggagcggctggaccacttactgtgttggctgctggaacacagagggcggctggaggggggacctggctggttggctgaggctatcgtcacttggaggggtcacctaactaaactcctaaccaccccatacgagagacaggaggggtggcaactagccgcatccagatttcaggggactctctacctgagcgaggtggaaaccccgaatgcacgggctcagagactggcccggccacctctgctgcgtgaattgatgtatatgggctacaaattcgagcagtatatgtgcgccgacaagccaggaagtagcccggatccatctggggaggtcaatactaatgtggccttctgctctgtgctgaggtcaaggctggggtcacacccgctgctgtttagtggagaggtggactgtacagatccacaagccccaagcacacagccgccgacatgttatgttgagctaaagacatcaaaggagatgcactcccctgggcaatggaggagcttttacagacacaagttgctgaaatggtgggcccagagttttttgcctggggttccaaacgtcgtcgctggcttccgtaacccagatggttttgtgagttccctgaagacttttccgacaatgaagatgttcgagtatgtccgcaatgatagggacgggtggaatccaagtgtctgcatgaacttctgtgccgcttttcttagcttcgcacagtcgacagtcgtccaggatgatccgcgacttgttcaccttttcagttgggaaccaggtggacctgtgacagtgagtgtacaccaggacgccccttatgctttcctgccgatctggtatgtcgaggccatgacccaggatctgccctcccctcccaaaaccccatccccaaagtag

SEQ ID NO: 288576 - DNA, 1191 bp, Artificial Sequence
  derived and/or modified sequence
atggatccgaggggaacaaagagaggtgccgagaaaacagaggtcgcagagcctagaaacaaactgcctcggccggccccatctcttcctacagaccctgccttgtactctgggccattccctttctatcgacggccgtcagagctcggctgtttttctttggatgcgcagcgacagtaccatggagacgcccgggcccttaggtactactcgccaccacccacgaatggcccgggaccgaactttgatcttcgagacggctaccccgaccgttaccagccccgtgacgaagaagtacaagaaagactggaccacctgctgtgctggttactcgagcaccggggcaggttggaggggggccctggctggctagctgaggcaatagttacctggagaggccacttgactaaactgttgaccacaccctacgagaggcaggagggttggcagcttgccgcctcccggttccaaggaactctgtacctgtccgaggtggagacgccaaacgccagggctcagagactcgcacgtcccccattgctcagggagctcatgtatatgggttacaagtttgaacagtacatgtgcgccgataagcctggcagcagtcccgatccatctggggaggtgaataccaacgtggctttttgttccgtactgagaagcagattagggtctcatccactccttttcagcggtgaggtcgattgcacagatcctcaggcccctagtacacaacctccaacgtgctacgtggagttgaaaacctctaaagaaatgcatagccccggccagtggcggagtttttatagacacaaactccttaaatggtgggcccagtccttcctgcccggagtgcccaacgtcgtggcaggatttcgcaaccctgacggatttgtgagcagcctcaaaactttcccaaccatgaaaatgttcgaatacgtccgtaacgaccgggacggctggaatccttcagtgtgcatgaacttttgtgctgccttcctaagttttgcccaatctactgttgtgcaagatgacccccgtctggtgcatctgttttcctgggagcccggtggaccagttactgtgagtgtgcaccaggacgccccatacgcttttctgccgatttggtatgtggaggccatgacacaggaccttccctcgccccctaagactccatccccgaagtag

SEQ ID NO: 288577 - DNA, 1191 bp, Artificial Sequence
  derived and/or modified sequence
atggaccccaggggaactaaacgaggagcagagaagacagaggtcgctgagcctagaaacaagctcccacgtccagccccaagcttacctacagaccctgccctgtattccggcccatttccattttaccgcagaccctcagaacttggatgtttcagcctggacgcccagcggcagtatcacggcgatgctcgcgctctgcggtattactcaccacctccaacaaatgggccaggccccaacttcgacctgagagatggataccccgatcggtaccaaccccgtgacgaggaagttcaggaacgccttgatcatctcttatgttggttgctcgaacacagggggcgcctggaaggaggccccgggtggctggccgaggccatcgtgacttggagaggacatcttactaaattgttgacaaccccctacgagagacaggagggctggcaactggcagcatccagatttcagggcaccctgtatctgtccgaagtcgaaacacccaatgccagggcgcagcgcctggcccggccaccgttgctccgcgagttgatgtatatggggtataaattcgaacagtatatgtgcgccgataaaccaggatcaagccctgacccgagtggcgaagtgaacacgaacgtggcattttgctccgttctccggtccaggctcgggtcccatcctctgctgtttagcggtgaggtcgattgtaccgatcctcaggcgcccagcacccagcctccaacatgttacgtcgaacttaaaaccagtaaggagatgcactcacccgggcaatggcgtagtttttatcgacataagttgttgaagtggtgggctcaaagctttctgcctggagtccccaacgtggtggctggcttcaggaatcccgacggttttgtgtcctcgttgaaaacgtttcctacaatgaaaatgttcgagtacgtccggaatgaccgggacggatggaacccttcggtgtgcatgaacttctgcgccgcattcctcagttttgcacagtccaccgtggttcaggacgatccacggttggtgcatttgtttagctgggaacccggcggtcccgttaccgtgtcggttcaccaggacgccccttacgctttcttgcccatctggtatgtcgaggccatgacacaggacctcccgtccccaccaaagactccatctcctaagtag

SEQ ID NO: 288578 - DNA, 1191 bp, Artificial Sequence
  derived and/or modified sequence
atggacccgcggggtactaagcgtggcgccgagaagaccgaggtcgcggaaccgcgaaacaaactcccgagaccagctccaagcctgccaactgatcctgcgctctacagcgggccctttccattctacaggcgcccctccgagctaggatgtttcagtctcgatgcgcaaaggcaataccacggggacgctcgggcgttaagatattattcccccccacctaccaacggcccgggtcccaattttgacctccgagatgggtacccagaccggtatcaacctagagacgaggaagtacaagagcgactggaccaccttctgtgctggctcttggaacatcgtggtagactggagggcgggcccggctggctggcagaggccatcgtgacctggcgggggcatctcacaaaactgttaaccacgccatacgagagacaggaaggatggcagttggcagccagcaggtttcagggtaccctttatcttagcgaggttgaaacgcctaatgctcgggcgcagcggctcgctaggccacctctcctgcgggagttgatgtacatgggatataagtttgagcagtacatgtgtgctgacaagccgggttctagtcctgacccttcaggagaagtgaataccaacgtcgcgttctgctccgtgctgaggtccaggcttggctcgcatccactgctgtttagcggtgaagtagactgtacagatccccaggctccctccacccagccaccaacctgctacgtcgagctgaaaaccagtaaggaaatgcattcccctggacaatggcggtcgttctatcgacataaactgctcaaatggtgggcacagtcattcctgcccggtgtcccaaatgtggtggccggcttccgtaatcccgacgggtttgtgtctagtcttaagactttcccaaccatgaaaatgttcgagtatgtgcggaatgaccgcgacgggtggaatccttcagtctgtatgaatttctgtgccgctttcttaagttttgctcagagcaccgtggtgcaggatgacccccggttagtacatcttttcagttgggaacctggtggcccagtgaccgtgtcagttcatcaggacgccccctatgccttcctgccaatatggtacgtggaggctatgacacaggatctgccctccccacccaagaccccgagccctaagtag

SEQ ID NO: 288579 - DNA, 1191 bp, Artificial Sequence
  derived and/or modified sequence
atggatcctagagggactaaaaggggcgccgagaagaccgaggtggccgaaccaagaaataagttacccaggccagccccaagtctcccaactgaccctgctttgtactcagggcctttccctttttatagacggccatccgagctgggctgcttctcactggacgcccagaggcagtaccacggggatgctcgagcactgcggtattattctcccccaccaaccaacgggccgggccccaacttcgatttgagagacgggtatcccgatcggtatcagccccgggatgaggaagtccaagagcgtctggatcacttgctgtgttggctgctggagcatcgtgggaggttggaagggggtccaggatggctggccgaggctatagtgacctggcggggtcacctgacaaagctcctgacaacgccgtacgagaggcaggagggttggcagttagcagcctccagatttcagggtactctgtatctgtcggaagttgaaacacccaatgcccgtgcccaaaggctcgctcggcctcccctgctgcgtgagctgatgtacatgggatacaagttcgagcaatacatgtgcgcagacaagcctgggagctcccccgatccctccggagaggtgaataccaatgttgctttctgttcggtactgcgcagtagattgggatcacatcctcttcttttctcaggggaagtggattgtacagacccgcaagctccgagcacccagcctcctacgtgttacgtcgaactcaagacttctaaggaaatgcattcaccaggacagtggcgctctttttacagacacaagctactcaaatggtgggcccaaagcttccttcccggcgttcctaacgttgttgccggttttcggaatccagacgggttcgtttcatctctcaaaaccttccccactatgaagatgtttgagtatgttcggaatgatcgagacggatggaaccccagtgtctgcatgaacttttgtgccgcttttctgagttttgcccagtcaactgtggttcaggacgatcctcggctggtccaccttttcagctgggagcccggaggccctgtgaccgtctccgtccaccaggatgcaccctatgcctttctgccgatttggtacgtagaggcgatgacccaggacctgccttctccccctaaaacacctagcccaaaatag

SEQ ID NO: 288580 - DNA, 1191 bp, Artificial Sequence
  derived and/or modified sequence
atggatccacggggaactaaacgcggggccgagaagactgaagtcgcagagccaagaaataagttgcctcgccccgccccgtccttgcccaccgatccagctctgtacagcggcccattccccttttatcggcgaccttccgaattggggtgtttctctctggatgcccaacgacagtaccatggggacgcccgtgctctccgatattactcacccccacctacgaatgggcccggccccaattttgatctgcgtgacggttacccagacaggtaccagccgagggatgaagaagtgcaagagcggctcgatcatctgctgtgctggctgctggaacaccggggccggctcgagggcggacccggttggcttgctgaggccatcgtaacctggcggggccatctgaccaagctactcactacaccttacgaaagacaggagggctggcagctagcggcatccaggttccagggaaccctctacctctccgaggtggagacaccaaacgcccgagcccaacgtctcgcccggcctccgcttttgcgggaactgatgtatatgggctacaagttcgagcagtacatgtgcgccgacaagccagggagcagcccagatccatcaggagaggtcaatactaatgtcgcattttgttctgtcctgcggagccgtctgggaagccacccactcctattcagcggagaggttgattgtacagaccctcaggcaccttccactcagccgccaacctgttacgttgagcttaaaacctccaaggagatgcatagtccgggacagtggcggtctttctatcgtcacaagctccttaaatggtgggcccagagttttctgcccggcgtgccgaacgtggttgctgggttcaggaaccccgatggcttcgtgtcctcactcaaaacctttcccaccatgaaaatgtttgagtacgttcgaaatgacagagacggctggaacccatccgtctgtatgaacttttgcgctgcctttctgtcattcgctcagtctacagtggtgcaagacgatccccggctagttcacctgttttcttgggagcccgggggacccgtaacagtcagcgttcatcaggacgccccctatgcctttttacccatttggtacgtggaagcaatgacacaagacctgccatctcctccaaagactccgtctcctaaatag

SEQ ID NO: 288581 - DNA, 1191 bp, Artificial Sequence
  derived and/or modified sequence
atggatccacgaggaaccaagagaggcgcagaaaaaaccgaagtggccgaaccgcggaataagttaccaagaccagctccctctctgcccacagaccccgcgctgtatagtggcccatttcctttctaccgtcgaccgtcagagctaggctgcttttccctcgacgcacagagacagtaccatggagacgccagggccttaaggtactatagcccaccgccgacaaatggcccagggcctaattttgatttgagggatggatacccggaccgttaccaaccccgcgatgaagaggttcaagaaagactcgaccatctgctttgctggctcctggagcataggggcaggttggagggcggccccgggtggttggcagaggcaatcgtgacatggaggggtcacctgactaagctgctcactactccttacgagcgccaagagggttggcagctcgccgcaagtaggtttcaagggaccctatacctctctgaggtggaaacccccaacgcccgcgcgcagaggctggcgagacctcccctcctgcgggagctgatgtacatgggctacaagttcgaacagtatatgtgcgcggacaagcccggatcttcacccgatccttctggcgaggtgaacacaaacgtagccttctgctctgtactgcgatccaggttgggatcccaccctctgctgttcagtggggaggtcgattgcacagatccgcaggcaccatccacacagccccccacttgctatgttgaattgaagaccagcaaggaaatgcacagtcctggccaatggcgcagcttctaccgccataagcttcttaagtggtgggcccagtccttccttcccggcgtacctaacgtggttgccggattccggaaccctgacggcttcgtgtctagcctgaagaccttcccaaccatgaaaatgtttgagtacgttcgcaatgatagagacgggtggaacccatctgtctgcatgaacttctgcgctgcattcctcagtttcgcacagtcgaccgtggtgcaggacgacccaaggctggttcaccttttttcgtgggaaccaggcggcccagtgaccgtgtccgtgcatcaagatgcgccttacgcttttctgccgatctggtatgtcgaggccatgactcaggacctgccttcccctccaaaaactccgagtccaaaatag

SEQ ID NO: 288582 - DNA, 1191 bp, Artificial Sequence
  derived and/or modified sequence
atggatccgaggggtactaagcgcggggcagagaaaacagaggtggctgagcctcgtaataagctaccacggcctgccccgtccctcccaaccgatcccgccttatatagcgggccgtttcccttctatcgaaggccatccgaattgggctgcttctctctggatgcgcaaaggcagtaccatggggacgcccgagctctgcggtattattctcctccaccaacgaatgggcctggccccaattttgacttgcgcgacgggtaccctgacagataccagcctagagacgaagaggtccaggagcgactggaccatcttctctgttggctgctggagcatcggggcagactggaggggggcccggggtggcttgccgaggccattgttacttggcggggccaccttacaaagctgctcaccacaccttacgagaggcaggaaggatggcagttggccgccagccgcttccaggggacactttatttgtccgaggtggagacacctaatgccagagctcagcggctcgcgagacccccgctcttgcgtgagctcatgtatatgggctacaaatttgaacagtacatgtgtgcagacaagccaggatctagtcccgacccttctggggaagtgaacacgaatgtcgccttttgcagcgtattgagatctcgcctgggctcacacccgcttctctttagcggtgaggtagactgtactgaccctcaggctccgtccacacagccacctacttgctacgtcgaactgaaaacttctaaggaaatgcactcgcccggtcaatggcgtagtttctatagacacaaactcctgaagtggtgggcccaaagtttcctgcctggggtacccaatgtggtggctggattcagaaatcctgacggctttgtgagctccctgaaaaccttccccacgatgaagatgttcgagtatgtcagaaacgatagagacggatggaacccatcagtctgtatgaacttttgtgccgctttcctttcatttgcgcagtcgactgttgtgcaggacgaccctcgcttagtgcatttgttctcttgggagcccggggggcccgtgaccgtttcagtgcaccaggatgcaccatacgcctttctccccatttggtatgtcgaggctatgacgcaggatctgccaagcccccccaaaactccatcacccaagtag

SEQ ID NO: 288583 - DNA, 1191 bp, Artificial Sequence
  derived and/or modified sequence
atggaccctcgagggacaaagcgcggtgccgagaagacagaggtggccgagcccaggaataagcttccaagacccgccccaagccttcccaccgatcctgcactgtacagcggccctttcccgttttacaggaggcccagtgagctgggctgtttcagcctggatgctcagagacagtaccacggggacgcccgggctctacgctactactctcctccgccaacgaacggacctggtccgaatttcgatctgcgggatggctatccagacagataccagccgagggatgaggaagtgcaggagagactggatcacctcctgtgttggctgctggagcatcggggccgattggaaggaggaccaggatggctcgccgaggctatcgtcacatggcgggggcatttgaccaagcttctgacaactccgtatgagcggcaggaggggtggcagttggctgcctcgagattccaaggaaccctctacctgtcagaggtcgaaactcccaatgcacgggctcagcgactggcgagaccacctctgcttcgcgagttaatgtacatgggctacaaattcgagcagtatatgtgcgccgataaacccggatcatctcctgatccgtctggcgaggtgaatacaaacgtagccttctgctctgtgctgcgttctcggctgggctcacaccccctgctgttctcaggcgaagttgactgcactgacccccaagcgccaagcacccagcctccgacctgctacgtggagctcaaaacatcaaaagagatgcactctcccggacagtggaggagtttctataggcacaagttacttaagtggtgggcccaatcgtttctccccggcgtgcctaatgtagtcgcaggcttcaggaaccctgatggatttgtgtcatctctgaagactttccccacaatgaagatgttcgagtatgtgcgtaatgatagagacggttggaatccaagtgtgtgtatgaatttttgtgcggcttttctttcttttgctcagagtacagtggtgcaggacgatccgagactggtacacttgttttcgtgggaacctggcggccctgtcactgtctccgtccaccaagatgccccctatgcgttcctcccaatttggtatgtggaagctatgacccaggacttaccttccccgccaaagactccctctccgaagtag

SEQ ID NO: 288584 - DNA, 1191 bp, Artificial Sequence
  derived and/or modified sequence
atggacccccgaggtacaaagaggggggccgagaaaacagaggtggcagaaccaagaaataaactgccaagaccagccccaagcctccctaccgatcccgcgctttactctggccctttccccttctacagaagaccatcggagctaggctgcttctccctagacgctcaacggcagtatcacggggacgctcgcgctctcagatattatagtcccccccccaccaatgggccagggccgaacttcgatttacgtgatggctatccggatcgctaccaacctagagacgaagaggttcaagaaaggctggatcatttgctgtgctggctcctggagcaccgcggccgactggagggcggacctggctggcttgctgaggctattgtgacatggcggggtcatttaactaagttgctcacaaccccatacgagaggcaggaagggtggcagttggctgcgagccgattccagggcaccctatacctgtccgaagttgagacccccaacgcccgggcccagcggctggcaaggccacccctcctgcgcgaacttatgtacatgggctataagtttgaacagtacatgtgtgctgataagcccgggtcctcgcctgatcctagcggagaggtcaacactaatgtggctttctgttcggtgctgcgatcacgactaggctcccacccactgttgttttctggagaagtagactgcacagacccacaggccccttctactcagccccctacatgttatgtcgaactgaagactagcaaggaaatgcattcccctggccagtggcgttcattttaccgacataagctgctgaaatggtgggctcagtctttcctgcctggcgttccaaacgtggtggctggctttagaaatccggacgggttcgtcagttcattgaagacatttcctactatgaaaatgttcgagtacgtccgcaacgacagagatggctggaacccaagtgtctgcatgaacttctgtgctgcttttcttagtttcgcacagtctacagttgtgcaggacgacccgcgcctggtgcacctatttagctgggagcctggagggccagtcacagtatccgtgcaccaagatgccccttatgccttcctacctatctggtatgtggaggcaatgacccaagatctgccgtcaccacctaagacaccctctccaaagtag

SEQ ID NO: 288585 - DNA, 1191 bp, Artificial Sequence
  derived and/or modified sequence
atggatccgcggggcactaaacggggcgcagagaagacagaggtggccgagccacggaataaactccctcgtcctgccccatctctgccaacggacccagccttatatagtggcccctttcccttttacagacggcctagtgaattgggatgtttttcactggacgctcagcgtcaataccacggcgacgcaagggcactaagatactacagccctccccccaccaatggacccggccccaactttgacctcagagacgggtatccggatcgttaccaaccgagagatgaggaggtgcaagaaaggctggatcacctgttgtgctggctcctagagcataggggccggctggagggggggccaggttggcttgcagaagccatcgttacctggaggggacatctgacgaaactgctaacaactccatacgagcgccaggaagggtggcagcttgcagccagtcgctttcagggaacattgtatctcagcgaagtcgagactcctaacgccagggcccagcgactggcccggcccccattgctccgagagcttatgtacatggggtacaaattcgagcaatacatgtgcgccgacaaacctggatcctcccctgatccttccggggaggtgaataccaatgtggcattttgcagcgtgttgcgctcgagactcggcagccatcctttgctattcagcggtgaggtggattgtacagatccacaggctcctagtacccagccgcccacatgctacgtggagctgaagactagtaaggagatgcacagccccggccaatggagatctttctaccggcacaaactgctcaagtggtgggcccaaagtttcctgcccggcgtgccaaacgtcgtcgctggatttaggaatcctgatggctttgtgtcaagcctcaaaacattccccacaatgaaaatgtttgaatacgtccgcaacgatagagacgggtggaatccgtcagtgtgcatgaacttttgtgcagcctttctttcgttcgctcagagcaccgtggtccaggacgacccccgcctcgtgcatctgtttagttgggagcccggtggccccgtcacagtctcggtgcaccaggacgcaccctacgcctttcttcccatttggtacgtggaggccatgacccaggaccttcctagcccaccaaagactccaagcccaaaatag

SEQ ID NO: 288586 - DNA, 1191 bp, Artificial Sequence
  derived and/or modified sequence
atggacccgagggggaccaagcgaggagcagagaaaactgaagtcgccgagcctcgtaacaagctgccgcggcccgcaccaagcctccctacggaccccgctctatacagtggccccttcccattctaccgtagaccgagtgaacttgggtgctttagtctcgacgcgcagaggcagtatcatggcgacgccagagccctgagatattatagtccacctccaaccaatggccccgggcctaactttgacttgagggatggatacccagataggtatcaaccacgggatgaggaagtgcaagagcggctggatcacctcctttgctggttgctggagcataggggccgactggaaggggggcctggttggctggcagaagccattgtgacttggagagggcacttgacgaaactgctgactacgccatacgaacgtcaagaaggttggcagctggccgccagccggtttcaggggactctgtacctttcagaggttgagacaccaaacgccagggcccaaaggctggcgcggccacccctgcttagagaactgatgtatatggggtataagttcgagcagtatatgtgcgccgacaagccaggttcttccccggacccatccggcgaggtaaacactaacgtagctttctgttcggtcctccgatccagacttggctcacatccacttctctttagcggtgaagtggattgcactgatcctcaggccccgagtacgcagccgccgacctgttacgttgaattgaagacatccaaagagatgcactcccctggccaatggaggtcattctacagacacaagctgctgaagtggtgggcgcaaagctttctgccgggagtgcctaacgtcgtcgcggggtttcggaatccagatgggttcgttagcagcttgaaaacattccctacaatgaaaatgtttgaatacgtgagaaatgatagggatggttggaaccccagcgtgtgtatgaacttctgtgcggcgttcctgagctttgcccaatcaactgtggtccaggatgaccctaggttagtgcacctgttcagctgggaaccaggcggacctgtgactgtatcagtgcatcaagacgccccctatgcattcctcccaatttggtatgtcgaggccatgacgcaggatctgccctcccctccaaaaacgccgtcccccaaatag

SEQ ID NO: 288587 - DNA, 1191 bp, Artificial Sequence
  derived and/or modified sequence
atggatcccaggggcacaaagcgcggcgcggagaagacagaagtggcagaacccagaaataaactaccacgccccgcacccagcctccccacagatcctgccttgtatagtggtccgttccctttctatcgacgccccagcgaactcgggtgtttctcactggacgctcagcgtcagtatcatggggacgcccgggctctgagatactacagccctccaccaacaaacggcccagggcccaatttcgacctccgcgacggttacccagatcggtaccagccaagggatgaggaagtgcaggagcgccttgatcatctcctctgctggctcctcgagcataggggacgcttggagggaggtccaggatggctcgccgaggccattgtaacttggaggggccaccttaccaagttgttgaccacgccctacgagcgacaggaaggatggcagcttgctgccagtcggttccaaggcacgctttatcttagcgaagtggaaacgccgaatgcccgggcacagcgactcgcaagaccaccactgctgagggaacttatgtacatgggttataagtttgagcagtacatgtgtgcagataaacccggtagcagtccggatcctagcggagaagttaacacaaatgtggctttctgcagcgtcttacgctccagattaggctcacatcccctgctgttttctggggaggtggactgcaccgacccacaggcccccagcactcagccaccgacctgctatgttgagctgaagacctcaaaagagatgcactcaccaggacagtggcgtagtttctacaggcacaagctgctgaagtggtgggcccagtcgtttctgccaggagtccctaacgtggtcgccgggtttaggaatcctgacggttttgtgtccagccttaaaacttttcctaccatgaaaatgtttgagtacgtgagaaacgacagggacggatggaacccctctgtctgcatgaacttttgcgccgccttcctgagctttgcccaatctacagttgtgcaggacgaccccaggctcgtgcatttgttctcctgggaacccggcgggcctgtcaccgtgtccgtacaccaggatgctccctatgctttcttgccaatttggtacgttgaagctatgactcaggatcttccatcacccccaaagaccccgtctcccaagtag

SEQ ID NO: 288588 - DNA, 1191 bp, Artificial Sequence
  derived and/or modified sequence
atggaccctcggggcacgaaacggggtgccgaaaaaactgaagtggcagagcctagaaacaagttaccgcgacccgctccgagcttgcccacggatcccgccctgtacagcggacctttcccattttataggagaccctcagaattgggatgttttagcctcgatgcacaaaggcagtatcatggggatgcccgtgccctcaggtattatagccctccacctactaatggcccgggacctaatttcgacctgcgggacggataccccgaccgctaccagcctcgtgacgaggaggtccaagaacggctggaccacctgctttgttggctgctggagcatcggggccgactggagggaggaccgggatggttggctgaggctattgtcacctggcggggccatcttactaagttgctgactactccatacgaaaggcaggaggggtggcagcttgccgcgtctcggtttcagggcaccctgtacctgtctgaggtggagacccccaatgccagggcgcagaggcttgccaggcccccgcttctccgcgagcttatgtatatggggtacaagtttgagcagtacatgtgtgccgacaagccggggagcagcccagatccatctggggaagtgaacactaatgtggccttctgcagcgtgttgagatctagattaggctcacaccccctgctgttttccggcgaggtggactgtactgacccccaggcccctagcacccagcccccaacctgctacgtggagctgaagactagcaaagagatgcacagcccgggccagtggagatctttctatagacacaagctcctgaagtggtgggcccagtcttttctgccaggcgtccccaatgttgtcgccgggttccggaatcctgacgggttcgtcagcagtttgaaaaccttccctacaatgaaaatgtttgagtacgtccggaatgaccgggacggatggaatcccagcgtgtgtatgaatttctgtgctgctttcttgtccttcgcacagtcaacagtggtccaggatgacccgcggctggtgcaccttttttcctgggagccaggaggccctgttaccgtctctgtccatcaggacgctccctacgccttcttaccgatctggtacgtcgaggcgatgacccaggatcttccaagcccacccaagactccaagcccaaagtag

SEQ ID NO: 288589 - DNA, 1191 bp, Artificial Sequence
  derived and/or modified sequence
atggacccccgcgggaccaagcgtggcgccgagaaaaccgaggtggcagagcctcggaacaagctccccaggccagcaccgtccctgccaaccgatccggccctctactccggacccttccctttctaccggaggcccagtgagcttgggtgttttagcctggatgcccagcgacagtaccacggtgacgctagggccctgagatactacagtcccccacccactaatgggcccggccccaattttgacttacgagacggatatccagaccgttatcagcctagagatgaagaggtgcaggaaagattggaccacctcctctgctggctcctggagcaccgaggccgtctggagggaggccccggatggctggccgaggccatcgttacctggcgtgggcacttgaccaaactcctcactactccttacgagcgccaagagggctggcagctggccgcttctcgatttcagggtactctgtatctgtccgaggttgagacccctaatgccagggctcaacggttggctcgacccccacttctgagagagctcatgtatatgggatataagttcgaacagtatatgtgcgctgataagcctggatcttcacctgatcccagtggggaagtgaacactaacgtggccttttgcagcgtgttaaggtccaggctcggtagccatccattattgtttagcggagaggtcgattgcaccgacccacaagcccccagtacccagcctcccacgtgctatgtggagctcaagacatcaaaggagatgcactccccaggccagtggcggagcttctatagacacaagctgctgaagtggtgggcccagagtttcctgcctggagtgcctaacgttgtggccggcttccggaaccccgacggctttgtcagttctctgaagaccttccctacaatgaagatgtttgaatacgtgaggaacgatcgcgatggttggaatcccagcgtctgcatgaacttttgcgccgcctttctgagcttcgcccagagtaccgtcgtgcaggacgaccctcgattagtgcacctgttctcctgggaacccggggggcccgttactgtttctgtgcatcaggacgcaccatacgcctttctgcctatctggtatgtagaggccatgacacaggaccttccttctccccctaaaaccccttctcctaaatag

SEQ ID NO: 288590 - DNA, 1191 bp, Artificial Sequence
  derived and/or modified sequence
atggacccccggggcaccaagagaggagctgagaagacagaggtggccgagcccaggaacaagctgcccaggcctgcccccagcctgcccacagatcctgccctgtacagcggccccttccccttctaccgccggcccagcgagctgggctgcttcagcctggatgcccagaggcagtaccatggagatgcccgggccctgcgctactacagccccccacccaccaacggccctggccccaactttgacctgagagatggctacccagaccgctaccagcccagagatgaggaggtgcaggagcggctggaccacctgctgtgctggctgctggagcaccggggccgcctggagggcggccctggctggctggccgaggccatcgtgacctggaggggccacctgaccaagctgctgaccaccccctatgagcggcaggagggctggcagctggccgccagccgcttccagggcaccctgtacctgtctgaggtggagaccccaaatgcccgggcccagaggctggcccggccccccctgctgcgggagctgatgtacatgggctacaagtttgagcagtacatgtgtgccgacaagccaggcagcagcccagaccccagcggggaggtgaacaccaacgtggccttctgcagcgtgctgcggagccggctgggcagccaccccctgctcttcagcggggaggtggactgcacagacccccaggcccccagcacccagccccccacctgctacgtggagctgaagaccagcaaggagatgcacagccctggccagtggaggagcttctaccgccacaagctgctgaagtggtgggcccagagcttcctgcccggggtgcccaacgtggtggccggcttcaggaacccagatggctttgtgagcagcctgaagaccttccccaccatgaagatgtttgaatatgtgagaaatgacagagatggctggaaccccagcgtgtgcatgaacttctgtgccgccttcctgagctttgcccagagcacagtggtgcaggatgacccccggctggtgcacctgttctcctgggagcccggcggccctgtgacagtgtctgtgcaccaggatgccccctatgccttcctgcccatctggtacgtggaggccatgacccaggacctgcccagcccccccaagacccccagccccaagtag

SEQ ID NO: 288591 - DNA, 1191 bp, Artificial Sequence
  derived and/or modified sequence
atggacccccggggcaccaagcggggcgccgagaagaccgaggtggccgagcccagaaacaagctcccgcggcccgcgccttccttaccaaccgatcccgcgttgtacagtggacccttcccattttacaggcgaccctccgagctgggctgtttttctcttgacgcacagcggcagtaccatggagacgcacgcgccctgcgctactattcgcctccaccaaccaacggccctggccccaattttgatttacgggacgggtaccccgacagataccagcccagagatgaagaagttcaggaaaggctggatcacttactgtgctggctcttagagcaccgagggcgcctggaaggaggacccgggtggctcgcagaggcaatcgtgacctggcgcggccatctgaccaagctcttgaccacaccttacgagcggcaggaaggatggcagctggccgcctcacggttccagggtactctgtatctctcggaggtagagactccgaacgcaagagcccagcgcctggctcgcccacctttgctgagggagcttatgtacatgggatacaaattcgagcagtatatgtgcgcggataaacccgggtcctctcccgacccatcaggggaggtgaatactaacgtcgcattctgttccgttctgcgcagccgcttggggtcacatcctcttctctttagtggcgaagtggactgcaccgatccccaggcaccctccacccaacccccaacatgttacgtagaactgaagacatcaaaggagatgcattcccctggacaatggagaagcttctacaggcacaagttactgaaatggtgggctcagtccttcttacctggagtccctaatgtagtggcaggctttcggaatcccgacggcttcgtaagttccctcaagacttttccaaccatgaaaatgtttgagtatgttaggaacgacagagacggatggaacccaagtgtgtgcatgaacttctgcgctgctttcctctcattcgcgcaaagtacagtggtgcaggatgacccgaggctcgtgcatctgttctcttgggagcccggcgggcccgtcacggtgagcgtgcaccaggatgctccttacgctttcctgcccatatggtacgttgaggcgatgacgcaagatctgccaagccccccgaaaacacctagtcccaaatag

SEQ ID NO: 288592 - DNA, 1191 bp, Artificial Sequence
  derived and/or modified sequence
atggacccccggggcaccaagcggggcgccgagaagaccgaggtggccgagcctagaaacaagctgccccgtcccgccccttccctcccaaccgatccagccctgtatagtggccctttccccttctacagacggcccagcgaactgggctgcttttcactggacgcccagagacagtatcatggagatgcccgagctcttaggtattattcgccaccccccaccaacggaccaggtccgaactttgacctgcgcgacggttatcccgaccggtaccagcctcgagatgaagaggtgcaagaacgtctggaccacttgctgtgctggctgctggaacatcgtggacgcttagaaggaggtccaggatggctagctgaagctatagtcacgtggcgtggtcacttgactaaattattgacaacaccatacgagcgccaggagggatggcagttggcagcctcacggtttcagggaacattatatttgtctgaggtggaaacccccaatgctcgggcccagcgtctggccaggcctcctttattgcgagaactaatgtacatgggttataagtttgaacagtatatgtgtgcggacaaaccgggttcctcaccagatccgagtggtgaggtgaacaccaatgtggcgttttgttccgtactgcgaagcagactggggtcgcacccgttgctcttttctggtgaagtggattgtacagaccctcaggctccctccacacagccacctacatgttatgtcgaactgaagacttccaaggagatgcactctcccggtcagtggaggtcattctatcggcataagctattaaagtggtgggcacagtctttcctgcctggggtgccaaatgtagtggccggttttcggaatccagatgggttcgtaagttctcttaaaactttccctacaatgaaaatgtttgaatatgttcggaatgacagagatggctggaatccctccgtgtgcatgaatttctgcgcggcctttctcagtttcgctcagtccactgtcgtgcaagacgaccctcggctggtgcatcttttctcttgggagccagggggaccagtcaccgtctctgtccaccaggatgctccgtacgcttttttaccaatctggtacgtggaagcaatgacacaggacctgccctctcctcccaaaacaccctcacccaaatag

SEQ ID NO: 288593 - DNA, 1191 bp, Artificial Sequence
  derived and/or modified sequence
atggacccccggggcaccaagcggggcgccgagaagaccgaggtggctgagcccaggaacaagcttccccgccctgcaccctcactgcccactgatccggccctgtactccggacctttcccattttaccggaggccttcagagctgggttgttttagcctggacgcccagcggcagtaccatggtgacgctcgggccctcagatattacagcccacctcccaccaacggcccaggcccaaattttgatcttcgggatggctacccagacagataccagcctagggacgaggaagtgcaggaacggctggaccacctgctgtgttggctcctggaacaccgcggccgcttggaggggggtcccggttggctggccgaagctattgtgacgtggagaggccacctcacaaagctgctcacgactccctatgaacggcaggagggctggcagttggcggcaagccgattccagggcacattatatctctccgaggttgaaacccccaatgcacgcgcccagcgacttgcgcggccacccctcctgcgcgaactgatgtatatgggatataagtttgagcagtatatgtgcgctgacaaaccagggagctctcccgacccttcaggggaggttaataccaatgttgctttctgcagtgtgctcagatctagactgggcagccatcctctcctgttctctggcgaggtggattgcactgaccctcaagctccctcgacccagcccccaacttgctacgtcgaactcaagacttccaaggagatgcactcacccggccagtggcggtcattttataggcataagcttctgaagtggtgggcccagtcattcctgcctggcgtccccaatgtagttgccgggtttcgcaacccagatggcttcgtgtcctctttaaaaacatttccaactatgaagatgtttgaatatgtcaggaatgacagagacggatggaacccgagtgtgtgcatgaacttctgtgctgcttttttatcttttgcacaaagcaccgtagttcaagacgacccgcggctagttcacttattcagttgggagcctgggggccccgtgactgtctccgtacaccaggatgctccatatgcattcttacccatttggtatgttgaggcaatgacccaggacctgcccagcccaccaaagactcctagccccaagtag

SEQ ID NO: 288594 - DNA, 1191 bp, Artificial Sequence
  derived and/or modified sequence
atggacccccggggcaccaagcggggcgccgagaagaccgaggtggctgaaccacgtaataagctaccccgtccagctcccagtttgccgaccgaccccgctctgtattccggaccctttccattttaccgccgtccaagtgagctggggtgtttcagcctggatgcccaaagacagtatcacggagatgcccgggcattgaggtactattcacccccacccacaaacgggcccggacccaatttcgatctacgcgacggttacccggatagataccaaccccgggacgaggaggtgcaggagcggctcgaccacctcctttgttggttgcttgaacatcgcggccgcctggaagggggccccgggtggcttgcagaagcaatcgtgacttggcgggggcacctgaccaagctgctgaccacgccttatgaacgccaggagggatggcaactggctgccagtaggtttcaggggactctgtacttgtctgaagtcgaaacccccaatgcccgcgcccagaggcttgcaagacccccgcttctgagagagcttatgtacatgggctataagttcgagcaatacatgtgcgccgataagccgggatcctcacccgatcctagcggggaagtgaacaccaatgtggccttttgttccgtactgcgctctcggttgggttcccacccattgcttttttcgggagaagtggattgcacggatccacaggccccctcaacacagcccccaacatgctatgtggaactaaagacgtctaaagagatgcattcacctggacagtggcgatctttttaccggcacaagttgctgaaatggtgggctcagtcttttcttcctggggtgcctaacgtagtggccggattccgcaatcctgacggttttgtcagctctctcaagacttttccaactatgaaaatgttcgaatacgtcaggaacgatcgtgacggctggaatcccagtgtttgtatgaacttctgcgccgcttttctgagttttgctcagtctaccgtggtccaggatgaccctagactggtgcacttgttctcttgggagcctggcggaccagtcactgttagcgttcaccaggatgccccttatgcgttcctacctatatggtacgtagaggccatgacgcaagacctcccatctcccccaaagactccgagccccaagtag

SEQ ID NO: 288595 - DNA, 1191 bp, Artificial Sequence
  derived and/or modified sequence
atggacccccggggcaccaagcggggcgccgagaagaccgaggtggccgagcctcgcaacaagctgccccgtcctgccccctccctcccaacagaccctgcactgtacagcgggccgttcccgttctatagacggccttcagagctggggtgtttcagcttggacgctcagcggcagtatcacggggatgcccgcgccctgcgatactacagccccccccccaccaatggcccgggccctaactttgacctacgggatggctaccctgaccgatatcagccacgtgatgaggaggtgcaggagcggcttgatcacttattgtgttggttgttggagcataggggcagactagagggcggacctggctggctggctgaagctattgtgacctggagggggcacttaacaaagcttctcaccacaccctatgaacgtcaggaagggtggcagctggcggccagccgattccagggcacactctacctgtccgaagttgagacgcctaatgcacgagcgcaacgcctggctaggcccccgctgctccgcgagttgatgtacatgggctataagttcgagcaatacatgtgtgctgataaacctggcagttctcccgacccatctggggaggtcaatacaaatgttgcgttctgcagtgtactgcggagtcgtctgggatcccaccccttactgttcagcggggaagtcgactgtacggatccgcaggcacccagtactcaaccccctacttgttatgtcgagctgaaaaccagcaaagagatgcactcccctgggcagtggcggtctttctatcgccacaagctcctgaaatggtgggcccagagtttcctccctggagttcccaacgtggttgctggcttcagaaaccctgacggtttcgtatcttcacttaagaccttccccaccatgaagatgtttgagtacgtccgcaatgatagggacgggtggaatccatctgtgtgtatgaacttttgcgccgccttcctcagctttgcccagtcgaccgtggtacaggacgacccacgtctggtgcacctgttcagctgggaacccggcggcccagtcacagtgtccgtccatcaagatgccccctacgccttcctgcctatctggtatgttgaggccatgacccaggacctcccaagcccccctaagacaccatctccgaagtag

SEQ ID NO: 288596 - DNA, 1191 bp, Artificial Sequence
  derived and/or modified sequence
atggacccccggggcaccaagcggggcgccgagaagaccgaggtggctgagccacggaacaaacttccaaggcccgctccctcccttcccactgatcccgctctgtatagtggaccctttccgttctaccgacggcctagcgagctggggtgtttctccttggatgcacagcgtcagtaccacggcgatgctcgcgcgctcagatactatagcccaccccctacaaatggacctggacccaatttcgatctcagagatggctatcccgaccggtatcaacctcgggatgaagaggtccaagagagattagatcacctgctctgttggctcctggaacacagaggcaggctcgaaggcggtccagggtggttggctgaggctatagtaacatggcgaggacacttgacgaagctgctcactactccttacgagcgacaagagggctggcaactggcagccagcaggttccagggaaccctgtatctgagcgaggtggagactcctaacgcaagagcccaacgactagcacgtccacccctccttcgggagctgatgtacatggggtataaattcgagcagtacatgtgcgcggataaaccgggaagctcccccgatccttccggggaagttaatactaatgtagccttttgtagtgtactgcgttctagactgggctctcatcccctgctgttttccggagaggtggattgcaccgatccacaggctccttcaacacagcctcccacatgctatgtcgaactgaaaacttctaaggaaatgcactccccaggtcaatggcgatccttttatcgccataaactgctcaaatggtgggctcaatcctttctgcctggcgtaccaaatgtcgtggccggattccgtaatcccgacgggttcgttagcagtctgaaaacattccccacaatgaaaatgtttgaatacgtacggaacgaccgggatggctggaatccctcagtgtgcatgaacttttgcgcggccttccttagcttcgcccagagtacagttgtccaggatgatcccaggctcgttcatcttttttcatgggaacctggcgggccggtgacagttagtgtgcaccaagatgctccttacgcattcctgccaatctggtacgttgaggccatgacccaggacctcccttcccccccgaagactccatctcctaaatag

SEQ ID NO: 288597 - DNA, 1191 bp, Artificial Sequence
  derived and/or modified sequence
atggacccccggggcaccaagcggggcgccgagaagaccgaggtggctgaaccaagaaataagctcccaaggcccgccccttccctgccgacggatcctgctctgtattccggtccctttccgttctatagacgcccttcagaactcggttgcttctcccttgacgctcagcgtcaataccacggggatgcacgggcgttgaggtactatagccctccaccaacaaacgggccaggacctaatttcgatctcagggatggttacccggatagatatcagcctagagatgaggaggtgcaggagcggctggatcatctcctttgttggctcctggagcatagggggcggcttgaaggtgggcctggttggctcgccgaggcaatagtgacctggcgcggccatctgaccaagctgctcactaccccatatgaacgtcaggagggctggcagctcgctgcttctcggtttcagggaacactttatctgagtgaagtcgagacacctaatgccagggcgcaacggcttgcccgacctcctctgttaagggaacttatgtacatggggtacaaattcgagcagtacatgtgcgcagataagcccggatcgtcaccagacccctccggtgaagttaacaccaacgtcgcattctgctcagtgctgagatcgaggctgggaagtcatccactcctctttagtggggaagtcgactgtactgaccctcaagccccatctacacagcccccgacctgttacgtggaactcaaaacctcaaaagagatgcactcacctggacagtggagatccttttaccgccacaagctgctcaaatggtgggcccagtcgttcctccccggcgtaccgaacgtggtggccggcttcagaaatccagacgggtttgtgagctccctgaagacatttcccacaatgaaaatgttcgagtacgtgcgcaacgaccgagatggatggaatccttccgtttgtatgaatttttgtgcagccttcttgtcattcgcacagtccacggttgtgcaggacgaccccaggctggtacacttgttcagctgggaacctgggggccccgtgaccgtttcagtgcatcaggatgctccttacgcttttctgccaatttggtatgtcgaggctatgactcaagatttgccttctccaccaaagacgcccagccctaagtag

SEQ ID NO: 288598 - DNA, 1191 bp, Artificial Sequence
  derived and/or modified sequence
atggacccccggggcaccaagcggggcgccgagaagaccgaggtggcggagccgaggaacaagctcccccgaccagcaccgagccttccgactgatcccgccctgtacagtggacccttcccattttaccggcgtcccagcgagcttggttgcttctctttagatgcacagagacagtaccatggcgatgcccgcgctctccgctattattcccctccaccaaccaatggccctggcccgaatttcgatcttcgggatggctacccggaccggtaccagccgcgggacgaggaggttcaggagcggctagaccacctgctgtgttggttactggaacacaggggccggctcgagggaggtcccgggtggttggctgaggcgattgttacctggcggggacatctaaccaaactcctgacaacaccatatgagcggcaggaaggctggcaactagccgcaagcagatttcaaggaacgctgtacctgagcgaagtcgaaacacctaacgctagagcacagaggctggccagaccgcccttgctgagagaattgatgtatatgggctacaagttcgagcagtatatgtgcgccgacaaaccaggtagttcgcctgatccatccggcgaggtcaacacgaatgtggcattttgctcagtgctgaggagccgcctcggatcccatccattattattcagcggtgaggtggattgtaccgatcctcaagcccccagtacacaaccaccaacctgttacgtggaattgaagacctccaaagagatgcattcgcctggacagtggcgtagcttttacaggcataagctgttgaaatggtgggcccaatccttcctacccggggttccgaatgtcgtagctggttttcgcaatcctgacggctttgtgtctagcctgaaaacctttccaactatgaagatgtttgaatatgtcagaaacgatcgggatgggtggaaccccagcgtctgcatgaatttctgcgctgcctttctgtccttcgcccagtctacggtggtgcaggacgatccacgcctggtgcacttgttttcatgggagcctggcggccccgtgacagtgagcgtccatcaagacgcgccctatgctttcctccccatttggtacgtggaggcgatgacccaggatctcccctcacctccaaagacccccagcccaaaatag

SEQ ID NO: 288599 - DNA, 1191 bp, Artificial Sequence
  derived and/or modified sequence
atggacccccggggcaccaagcggggcgccgagaagaccgaggtggccgagccacgtaataaactgccacggcccgctccctcgctccctaccgatcctgctctctacagcgggccttttcccttttatcgacgcccttctgagctagggtgcttctcactcgacgctcagcgccagtaccatggtgacgccagggctctaaggtattattccccacctccaactaacggcccaggcccaaatttcgacctgagagacgggtatccggatcggtaccagccccgagatgaggaagtgcaggagaggctagatcacctattatgctggttgttagaacataggggcaggttggaagggggacctggttggctggcagaggcgatagtgacatggcgcggccacctcaccaagttgctgacaaccccttatgaacgccaggagggttggcaactcgccgcctcaagatttcaaggcaccctgtacctatccgaggtggagactcctaatgcaagggcccagcggctggcccgaccccccctgctgagggaacttatgtacatgggttacaagttcgagcagtacatgtgcgccgataaacctggatcctctcccgacccttctggcgaggtcaatacaaacgtggccttttgttcagtactcagatcccgactgggcagccaccccctcctattcagcggggaagtggattgcacggaccctcaggctcccagcactcagccaccaacctgttacgtggagctgaaaacaagtaaggagatgcactcaccaggacagtggcggtctttctatcggcataagctgttgaagtggtgggctcaaagtttcctacccggagttcctaacgtggttgccgggttcagaaatccggacggctttgtctcgtcactgaagacttttcccactatgaagatgttcgaatatgtacgaaatgatagggacggatggaatcctagcgtatgtatgaacttttgcgccgcattcctctctttcgcccagagtaccgtggttcaagatgatcctcgccttgtgcacctgttttcttgggagcctggtggacctgtgactgtgtctgtccatcaggacgcaccgtacgctttcctgcccatttggtatgtggaagccatgacccaggacctgccctcccccccaaaaacaccttcacccaaatag

SEQ ID NO: 288600 - DNA, 1191 bp, Artificial Sequence
  derived and/or modified sequence
atggacccccggggcaccaagcggggcgccgagaagaccgaggtggccgagccccggaataaactacccaggcccgcccctagcttacctaccgaccctgccctttacagcggcccgttccccttctaccgccggccgtccgaactgggatgtttctctctggatgcacagaggcagtatcatggcgatgctagagctctccgttattactctccaccccccaccaacggacctgggccgaacttcgatttgcgagacggataccccgaccggtatcagccccgagacgaggaagtccaggaaagactggaccacctgctgtgctggctgctcgagcacagagggaggctcgaagggggccccgggtggctcgccgaggccattgtgacctggcggggtcaccttactaagcttctgaccactccatatgagaggcaggagggttggcaactggccgcttcgaggttccaggggaccctgtacctttcagaagtggaaacccctaacgcacgcgcccagcggttggcacgaccaccactcttaagagagttgatgtacatgggttacaaatttgagcagtatatgtgcgcagataaacccggctcatccccggacccatctggcgaagttaacaccaatgtcgctttttgctcggttctcaggagcaggctcggcagccatccactccttttctccggagaggtagattgcaccgacccgcaggccccctccactcaaccccccacatgctatgtcgaactaaaaacgtcaaaagaaatgcactcccctggccagtggcggtctttttaccgacacaagcttctgaaatggtgggcgcaaagctttttacccggagtgccaaacgtggtagccggctttagaaaccccgacggcttcgtttcctcccttaagacttttccaaccatgaagatgttcgagtatgtgcggaacgatagagacgggtggaacccttcagtttgcatgaacttctgcgctgcctttctatcatttgcacaatcaactgtggtgcaagacgaccccagactggtgcacttgttctcttgggagccaggaggacccgtcaccgtcagcgtgcatcaggacgccccatacgcatttcttccaatttggtatgtggaggcgatgacgcaggacctgccctcgcctccaaaaaccccctctccaaaatag

SEQ ID NO: 288601 - DNA, 1191 bp, Artificial Sequence
  derived and/or modified sequence
atggacccccggggcaccaagcggggcgccgagaagaccgaggtggcagaaccccggaataaactccccaggccagctccctcccttcccacagacccggcactgtacagcgggcccttccctttctacaggaggccctccgaactggggtgctttagcctcgacgcccaaaggcagtatcatggagatgctcgcgctctgcgatactatagcccaccgccaacaaatggacctgggccaaacttcgatctgagagacgggtaccccgatcgctaccagcctcgcgatgaagaagtgcaggagaggttagatcacctgctttgttggctgctggagcataggggccggctggagggcggtcccggatggctggccgaggccattgtgacatggagaggccaccttactaagctcctcaccaccccctatgagcggcaagagggctggcaactggcggcaagcagatttcagggcaccctgtatctgagcgaggtggagactcctaacgcaagggcccagcgattggctcggccaccccttcttagggagctgatgtacatgggctataagtttgaacagtacatgtgcgctgataaacctggttcttctcctgatcccagcggggaggtcaatacgaacgtggccttctgctctgtcttgaggtctcggttgggcagccacccactgctcttctcgggcgaggtggactgtactgatccacaggcccctagtacacagcctccaacatgctacgtggagctgaaaacctcgaaggaaatgcactcaccaggccaatggaggtccttctaccgacacaaactattaaagtggtgggctcagtcatttctccctggggtgcccaatgtcgtagcagggttcaggaacccggatggattcgtgagctcgctgaagacatttcctaccatgaagatgtttgaatatgtcaggaatgatcgggatgggtggaacccgagcgtctgcatgaatttttgcgccgccttcttaagtttcgcacaatccacagtcgtccaggatgaccctcgtcttgttcacctcttctcttgggaaccggggggccctgtaactgtgagcgtacatcaagacgctccttatgcattcctcccaatctggtacgttgaggctatgacccaggacctgccctctccacccaagacaccatctcccaaatag

SEQ ID NO: 288602 - DNA, 1191 bp, Artificial Sequence
  derived and/or modified sequence
atggacccccggggcaccaagcggggcgccgagaagaccgaggtggcagagcccagaaacaaactacccaggcctgcgccatccctgccgacagatcccgccctgtactccggaccctttccattttaccgccgccccagcgagctgggttgcttttccctggacgctcagaggcagtatcatggcgacgcccgagcgttacggtactattcccctcccccaaccaatgggccaggaccgaacttcgacctcagagatggttaccctgacaggtaccagccacgggatgaggaggtacaagagcgcttagaccacctgctgtgctggcttcttgagcaccggggtagactggagggggggcccggttggctggccgaagccatagtgacatggaggggccatcttacaaaactcttaactaccccttatgagcggcaggagggctggcagttggccgccagtcggttccagggaaccctttacctgtcagaagttgaaacccccaacgccagagcccaacgcctcgcccggcctcccctcctgcgggaactaatgtatatgggatacaagtttgagcaatatatgtgcgctgataaacccggttcttcgcctgacccctctggcgaggttaataccaatgtggctttttgttctgtgttgcggtctcgccttggtagccatcctcttttatttagtggggaagtcgactgtaccgacccgcaggcccctagcacgcagcctcctacatgctacgtggagctcaagacctccaaggaaatgcacagccctgggcaatggcggtctttttacagacacaagctattaaagtggtgggcacagagcttcttgcctggcgtaccaaatgtggtggccgggtttagaaaccccgatggctttgtttccagtctgaagacttttcctacgatgaagatgttcgagtacgtgcgcaacgaccgggatgggtggaatccaagcgtgtgcatgaatttttgtgcggcctttttgtcttttgctcagagcacggttgtccaggacgaccctagactcgtacatctttttagttgggaaccgggcgggccagtcaccgtctccgttcatcaggatgccccttacgcctttctgcccatctggtacgtggaggcaatgactcaagatcttccttcacctcctaaaacccccagcccaaagtag

SEQ ID NO: 288603 - DNA, 1191 bp, Artificial Sequence
  derived and/or modified sequence
atggacccccggggcaccaagcggggcgccgagaagaccgaggtggcagaaccgcgcaacaagcttccccggcccgctccctctctgcctacagacccggcgctgtatagcggccctttcccattttacaggaggccatctgagttgggatgcttctctctcgatgcccagcgccagtatcacggggacgctagagccctccggtactactcaccacctccaacaaatggaccggggcccaactttgatttgagggatggctatccagatcgataccagccaagggacgaagaggttcaggagaggctggatcacctgctatgttggcttctcgagcaccgcgggcgcctagaaggggggccaggatggctggctgaggctattgtcacatggagagggcaccttactaaattgctgaccaccccctatgaacgtcaggaggggtggcaactcgcggccagcaggtttcagggaaccctatatttatccgaggtggaaacacccaatgcacgcgcacagcgcttggctcgccccccactcctgagggagctcatgtacatgggctacaaattcgagcagtacatgtgcgcagataagccagggagctccccagacccaagcggagaggtgaacaccaacgttgcattctgctctgtgcttcgcagccgtctcggcagccaccccctgcttttcagcggtgaagtggattgcacagacccccaggcgccaagcactcagcctccaacgtgttatgtggagctgaagaccagcaaagaaatgcactcaccagggcagtggagatcattctacagacacaaactactcaagtggtgggcccagtcatttcttccaggggtgccaaacgtagtcgcgggattcagaaatcccgacgggtttgtgtcttccttaaagacctttcctacgatgaagatgttcgagtatgtccggaatgatcgggatggatggaatcctagcgtatgcatgaatttctgtgctgcgtttctatcttttgcccagtcgacagtcgtccaagacgaccctaggttagtgcacctttttagctgggaacctggcggaccggtaacggtgtccgttcatcaagacgccccgtatgccttcctacctatttggtacgtggaagccatgacccaggacctgccttccccaccgaaaacccccagccccaaatag

SEQ ID NO: 288604 - DNA, 1191 bp, Artificial Sequence
  derived and/or modified sequence
atggacccccggggcaccaagcggggcgccgagaagaccgaggtggccgaaccacgcaacaagttaccaaggcctgctccttcactaccgacagaccccgccctctactctgggccattccccttctatcggaggccttctgaactgggatgcttttctttagacgcccagcggcagtaccacggggatgctagggccctgcgctactacagcccccccccaacgaatggacctggccccaactttgacttgcgcgacggatacccagacaggtaccagccccgtgatgaggaggttcaagagcgcttggaccacctattatgttggctgcttgagcacaggggcaggctcgagggaggcccagggtggttggccgaggccatcgtaacgtggagaggccatcttactaagctactcaccacgccctacgaacgccaagagggctggcagctagctgcttcccgtttccagggaactctttacctgagtgaggtggagacccctaacgccagagcacagcgactggccaggcctcctctcctgcgcgaattgatgtacatggggtacaagttcgaacagtatatgtgtgccgacaagccgggatctagccccgacccgtctggggaagttaacacaaacgtagcgttttgcagcgtgctcaggtctcggttgggctctcacccattgctcttttcgggagaggttgactgtactgacccacaagcaccctctactcagcctccgacctgttacgttgaactcaagacctccaaagagatgcactcacccggccaatggagatctttttacaggcataagctcctgaaatggtgggcccagagctttctgcctggcgtacctaatgtcgtcgctggtttcagaaatccagacgggtttgtcagcagcctcaagacgttccctactatgaagatgttcgagtacgtgcgcaatgaccgagacggctggaatccttcggtgtgcatgaatttttgtgccgcctttctgagcttcgcgcagagcactgtggtgcaggatgacccaagactcgtgcacctgttctcatgggaacccgggggaccagtgaccgtgtccgtccatcaggatgcaccttacgcattcctgcctatctggtatgtggaagccatgacccaggatttgcctagccctcctaaaaccccaagtccaaagtag

SEQ ID NO: 288605 - DNA, 1191 bp, Artificial Sequence
  derived and/or modified sequence
atggacccccggggcaccaagcggggcgccgagaagaccgaggtggcagagcctagaaacaaactacctcgcccagcccccagcttacccacggatccagctctgtactcaggcccattccccttttatcggcggccatcagaactggggtgtttctccttggatgctcaacggcagtaccacggcgacgccagagctctgcggtattatagtccccctccaaccaatggcccagggccgaacttcgacctgcgggatggatacccagatagataccagccaagagacgaagaagtccaggaaagattagatcatttgctttgctggctactcgagcatcgcggtagattggagggcggaccaggttggctggctgaggcgatcgtgacttggagaggacatctgactaaactgctgacaacaccgtatgagagacaggagggatggcaactggctgcttcacgctttcagggtactctgtacctctccgaggtggagacacctaatgccagagctcagagactggcaagacctcctttgttgagggaattaatgtacatggggtacaagttcgaacagtacatgtgtgctgacaaaccaggatcgagccccgatccaagcggcgaagtgaatacaaacgtcgcattctgcagcgtgctgcgttcccgccttgggtcccatcctctgctcttctccggtgaggtagactgcacggacccacaggctcccagtacccagcctcctacctgctacgtcgagctgaagaccagtaaggagatgcactccccggggcaatggcgatctttttatcgccataagctgctgaagtggtgggcccagtcctttttaccaggcgtacctaacgtggtcgctgggttccgcaacccggatggcttcgtttcttcactgaaaacttttcccacaatgaagatgtttgaatacgtgaggaacgacagagacggctggaatccctctgtgtgtatgaatttctgtgccgcctttctcagcttcgcacaatcgaccgtcgttcaggacgaccctcggcttgtccacctgttctcctgggagcccggaggccctgtcacggtgagtgtgcatcaggacgcaccttatgcctttctgcctatctggtacgttgaggccatgactcaggacctcccaagcccacctaaaacaccaagccccaagtag

SEQ ID NO: 288606 - DNA, 1191 bp, Artificial Sequence
  derived and/or modified sequence
atggatcctcgtggcactaagaggggcgcagaaaaaacggaagttgctgagcctcgcaataaactgcccaggccagctccttcactccccacagacccagcactgtacagtggccctttcccattttacagacgcccttccgaacttggttgtttttcactggacgctcaacggcaataccacggagatgccagggcactgcgctactactctccaccgcctacaaacgggccaggcccaaatttcgatctgcgcgacggatatccagaccgataccagcctagagatgaagaagttcaggagcgcctggaccatctgctttgttggttgctggaacaccgagggagactcgaaggcggacctggctggctagccgaggctatcgtgacctggcggggtcatctgaccaagctactgactaccccctacgagaggcaggagggctggcagttggccgctagcaggttccagggaacactgtacttatccgaagtggaaacacccaacgccagagctcaaagattagcgcgtccacctttgctgcgtgagctaatgtacatgggatacaaattcgaacagtacatgtgcgccgacaaacccggaagctctccagatccttctggtgaagtcaataccaatgtggctttttgcagcgtgctgaggagccggctgggctcccatcccctcctcttctcaggtgaagtggactgtaccgatcctcaagctcccagtactcaaccgcctacctgctacgtggaattaaagacttcaaaggaaatgcattctcctggacagtggcgctcattttaccgacacaagctgctcaagtggtgggctcagtctttcctaccaggggtgcccaatgtcgtggccggttttcgcaaccctgatggctttgtgtcctcactgaagacctttcccaccatgaaaatgttcgaatacgtcagaaatgatcgtgacggttggaacccatcagtgtgtatgaacttctgtgcggcattcctgagtttcgcccagagcacagtagttcaagatgacccccgactggtgcatcttttctcctgggagcctggcggaccagttactgtttccgtccatcaggatgcgccatacgccttcctgcccatatggtatgtagaggctatgacacaggatcttcccagcccgcctaagactccctcaccaaaatag

SEQ ID NO: 288607 - DNA, 1191 bp, Artificial Sequence
  derived and/or modified sequence
atggatcctagggggactaagagaggcgctgagaagactgaagtggccgagcctagaaataagctccctcgacctgctccaagcctgcccacagatccagcactgtactctggccctttccctttttatagacgcccatccgaactaggctgcttctccctcgacgctcagcggcagtaccatggcgatgcccgagcactgcgctactattcccccccaccaactaatgggcctggccctaacttcgatctgcgcgacggctatccagacagataccagccacgggatgaagaagtacaggagcgccttgaccatctgctgtgctggctgttggagcaccgaggaagacttgagggtggaccaggttggttggcagaggctattgtgacatggcggggtcacctgaccaaactgcttaccaccccctacgagcggcaagaggggtggcagctggcagcttctcgcttccaaggaaccctttacttgagcgaggtggaaaccccgaatgccagagcccagcggctggcaaggccacccctgctccgggagctgatgtatatgggatacaaattcgagcaatatatgtgtgcggacaaacctggctctagcccggacccaagcggggaagtgaatactaacgtggcattctgctctgtgctgaggtcacggcttgggtcacacccgctgctttttagcggcgaagtcgattgcacagacccacaagccccttctactcagccaccaacctgctacgtggagctgaaaacttccaaagagatgcactcgcccggacaatggagaagcttctatcgccacaaattacttaagtggtgggctcagagttttctgcccggagttcccaacgtggttgcaggattccgtaaccccgatggcttcgtctccagtctgaagacttttcctactatgaagatgttcgaatacgtaagaaacgaccgggatggctggaacccctctgtgtgtatgaatttctgtgcagcgttcttatcttttgcccagtctactgttgttcaagacgatccaagactcgtgcatctgttttcctgggagcccggtggccctgttaccgtcagcgtccaccaggacgctccatatgcgttcctaccaatctggtatgtcgaagcaatgacccaggatctgccgtcacctcctaagaccccctcacctaagtag

SEQ ID NO: 288608 - DNA, 1191 bp, Artificial Sequence
  derived and/or modified sequence
atggatccacgtggcaccaagcgtggggctgagaagaccgaggttgcagaacccagaaacaagctgcccaggccagcccctagcctacccaccgaccccgcattatacagtgggcctttccctttctaccgtagaccaagcgagctagggtgctttagcctcgacgcacagcgtcagtaccatggagacgctcgggcactgcggtactactctcccccacccaccaacggtccaggtccgaatttcgatctgcgtgatggctatcctgacagatatcagcccagggacgaagaagtgcaggagcgtttagaccatttgctgtgttggttacttgaacatcgcggtcgtctagaagggggtccaggctggctggctgaggctattgtgacttggagaggccacctgaccaaactcctcactacaccctatgaacggcaagaaggatggcaactggccgcatcgaggttccagggaacgctctacctctcggaagtcgagacccctaatgccagagcacagagattggcaagaccccctctcctgcgggagctgatgtatatgggctacaaatttgaacaatacatgtgtgctgacaaacccggaagctcgccagaccccagtggagaggttaacacaaacgtcgcattctgttctgtcttgcggtcacgcctgggcagccaccccctcctcttttcgggtgaggtagactgcactgaccctcaagctccatctacccaaccccctacctgttatgttgagttaaaaacatctaaggaaatgcactctccgggacagtggcgctccttttatcggcacaagttgctcaagtggtgggcccagtctttccttcccggagtgccaaatgtggtggcgggatttcggaatcctgatggctttgtgtcctctctgaagactttccctactatgaagatgtttgagtacgtgcggaacgaccgagatggatggaacccctctgtctgcatgaatttctgtgccgcttttctctcttttgcccagagcaccgtggtgcaagatgacccgcgactcgtgcacttattcagttgggagcctggtggacctgtcacggtgtctgtccatcaggatgcaccatacgccttccttccaatctggtatgtggaggccatgacccaggatcttccatctccacccaaaacaccctctcccaaatag

SEQ ID NO: 288609 - DNA, 1191 bp, Artificial Sequence
  derived and/or modified sequence
atggatccgagaggcaccaagcgcggagcggaaaaaaccgaggtcgctgaacccagaaataaactgcccaggccggcacctagcctcccaaccgacccggctctttactccggaccgttccctttctaccgcaggccttcagagctggggtgtttctcactggacgctcagagacagtaccacggagatgccagggctctgcgatactacagcccacccccaacgaacggccctggtccaaactttgatctgcgggatgggtacccagatcgataccaacctagggatgaggaagtgcaggaacgcttagaccacctgctgtgttggttattggaacacagaggcagactggaaggagggcctggatggctggcggaggcaattgtgacctggagaggtcatttgactaagctgctgaccaccccatatgagagacaggaaggatggcagctggcagcatctcggtttcagggaacattatatctcagtgaagtagagacccctaacgcaagagctcagaggctggctcgcccaccattgctccgggagctgatgtacatgggctataaattcgaacagtatatgtgcgcggataaacccggtagcagtccggacccctccggcgaggtcaacacaaatgtggcattctgtagtgtgcttcggtctcgccttggttcccacccactgctattctctggcgaagtggattgcacagacccgcaggccccatcaacgcagccacccacatgttatgtggaactgaaaacttcaaaagagatgcactcaccagggcagtggagaagtttctacagacataaactccttaagtggtgggcccagtccttcctgcccggagttcctaatgtggtcgcaggcttccgtaacccagacggattcgtgtccagcttaaagaccttccccacaatgaagatgttcgaatacgtgcgcaacgatcgggacgggtggaatcctagtgtgtgtatgaacttctgcgccgcatttttaagctttgctcaaagtacagtcgtccaagatgacccccgactggtgcatctgttttcttgggagccgggagggccagtgacggtttctgtacaccaggatgccccttacgctttcctgcctatctggtatgtggaagcaatgacacaggatctaccttcccccccaaaaacacctagtccaaagtag

SEQ ID NO: 288610 - DNA, 1191 bp, Artificial Sequence
  derived and/or modified sequence
atggatccgcgtggaaccaaacggggagccgaaaaaacagaagtggcggagccacggaacaaattaccgagacccgcacccagcctgcccactgaccccgcactctactctggaccctttcctttttacaggcgtccctctgagttgggctgcttctctctggatgcacagagacaataccacggggatgcccgagctttaagatattattcacctccacccaccaatggccctgggccaaatttcgacctccgagacggttacccagatcgatatcaaccgcgagacgaggaagtgcaggaacggcttgatcatttactatgttggctgctggaacatcgtggtcgtctagagggcggacctggctggctggccgaagccattgtcacctggaggggtcacctgactaagctactgaccacaccctacgagcgccaggagggatggcaactcgctgcgtcccgatttcagggaaccttgtacctgagcgaggtggagaccccaaatgcgagagcccaaaggttggctcgacccccactcttgagagaattgatgtatatgggttataagttcgagcagtacatgtgcgcagacaagccaggtagctccccggatccctctggcgaggtaaacaccaatgtggcattttgctccgttctgcgcagtagactgggatctcatcctctgctctttagcggcgaggttgactgtaccgatccccaggccccaagtacccaacctccgacatgttacgtcgaactgaaaacctccaaagaaatgcacagccctggtcagtggcggtcattctaccgccataagctgttgaagtggtgggcccagagctttctgccaggggtaccaaatgtggtagcgggatttcggaatccagatggcttcgtatcctccctgaaaacttttccaaccatgaaaatgttcgagtatgtgcggaatgacagggacgggtggaatccatcagtgtgcatgaacttttgtgctgctttcttatcatttgctcagagcactgtcgtacaggacgacccaagactcgttcacctcttttcttgggagcccggtggaccagtgaccgtgtcggtacaccaagacgcaccctatgcgtttctacccatatggtatgtcgaggccatgacccaagatctgccatcgcctcccaagactccaagtcctaagtag

SEQ ID NO: 288611 - DNA, 1191 bp, Artificial Sequence
  derived and/or modified sequence
atggaccctcgaggcaccaaacggggagctgagaagaccgaggtggcggagcctcgaaacaagctgcctaggccggctcctagtctgcccactgaccctgcactgtactccggcccttttccgttctatcgcaggccgagcgagctggggtgtttcagcctggacgctcagcgccagtaccacggggacgctcgcgcactccggtattacagcccaccccctaccaacggtcctggcccaaattttgatctcagagacgggtaccccgaccggtatcagcccagagacgaggaagtgcaggagagactggaccaccttttgtgctggcttctggagcaccgcggacgcctggaaggaggaccaggatggctcgccgaagccattgtcacgtggagagggcatctaaccaagctattgaccaccccatatgagcggcaggaaggttggcagctcgcagcaagcagatttcagggaacactgtatctgtcggaggttgagactccgaatgctcgggcacagagactcgcccgtccacctctgctcagggagcttatgtacatgggatataagtttgaacagtacatgtgcgccgacaagcctggatccagcccagacccatccggggaggtgaacacgaatgtcgcgttttgtagcgttcttagaagtagactcggttcccatcctctgctcttctctggcgaagtggattgcactgatccgcaagctccttccacccaaccgcctacctgctacgttgaactcaagacctcgaaagagatgcattctccaggccaatggcgctctttctaccgacataaactgctcaaatggtgggcccagagcttcctgcccggtgtcccaaacgtggttgcagggttccggaaccctgatgggtttgtctccagcttgaaaacctttccaaccatgaagatgttcgagtacgtaagaaacgacagagacgggtggaatcccagtgtgtgcatgaacttctgtgctgcatttctgagtttcgcacagagcacggtagtgcaggacgacccccgactcgtgcaccttttttcctgggagcccggaggccctgtcacagtcagcgtccatcaggacgccccatacgccttcctccccatatggtacgtggaggccatgacgcaggaccttccaagtccacccaaaactccctcccccaaatag

SEQ ID NO: 288612 - DNA, 1191 bp, Artificial Sequence
  derived and/or modified sequence
atggatccacggggaactaagagaggcgctgagaaaacggaggtggctgaaccacgcaataaactcccgaggcccgctccttcactccctaccgatcctgccctgtatagtggacctttccctttctatagacgaccctcagaattaggatgcttctctctagacgcacaacgtcagtatcatggcgatgcacgcgcattgcggtattattcccctcctcccactaatggcccaggacccaatttcgacctaagagacggataccctgatagatatcagcctagagacgaggaagtccaagagcggctcgaccaccttctgtgttggcttttggaacatcggggacgtctagaaggaggacccggttggctcgcagaagccatagttacgtggcggggacacctgacaaagttgctgactacaccttatgaaagacaagaaggatggcaactagccgcttctcgtttccagggaactctctatctcagcgaggtggagacacccaacgccagggcgcaacgccttgccaggccaccgttgctgcgagagctaatgtacatggggtacaaattcgaacaatatatgtgtgcagacaaaccaggctccagccccgacccctcgggcgaggtgaataccaacgtggcgttctgttcagttcttcggagtagacttggctcacaccctctgctgttctccggcgaagtggattgcaccgaccctcaggccccaagtacccagcctcccacatgctatgtggagctcaagacatcgaaagagatgcactcacccggtcagtggaggagcttctaccgccataaattactgaaatggtgggcgcagtcatttctgcccggagttcctaatgtggttgcaggttttaggaatcccgatggatttgtgtcctctctgaaaaccttccccacaatgaaaatgtttgaatacgtgcgcaatgacagagatggctggaacccgtccgtatgtatgaacttctgcgctgctttcttgtcctttgcccagagtacagtagtccaggacgaccctcgcctagttcatttattcagttgggaacccggaggacccgtaactgtgagcgtccaccaggatgctccgtacgcctttctccctatctggtacgtggaggccatgacacaggacttgccatctcccccaaaaacaccatcgcccaaatag

SEQ ID NO: 288613 - DNA, 1191 bp, Artificial Sequence
  derived and/or modified sequence
atggaccctagagggaccaagcgcggtgctgagaagactgaagttgctgagccaagaaacaagctccctcgtcccgctccttcgttgccaaccgacccggctctctattctggtccatttcctttctacagaaggccaagtgaacttggttgcttttcattggacgcccagagacaataccacggagacgccagagctctccgctactattcgccaccccctactaatgggccagggccaaattttgatctgagggacgggtacccagacaggtatcagccccgtgatgaggaggttcaggagcggttggaccaccttctgtgttggttgttagaacacagaggaagactcgaaggagggccaggttggctggccgaggcaatcgtaacctggagggggcacttgacaaagctcttgacgacaccatatgagcgccaggaaggttggcagctcgccgcttctaggttccagggtacactttatctgagtgaagtggagacccctaacgcaagggctcagcggcttgctcgcccaccgcttctgcgggagctgatgtatatgggctataaattcgagcagtacatgtgcgctgataaacccggaagcagccccgatccgtccggcgaggtaaacaccaacgttgcattctgctcagtacttcggagtagactgggaagccatccccttctgttcagcggggaggtcgactgtacagacccacaagcgccaagtacccagcctccgacttgttatgttgaactgaagacatctaaagaaatgcactccccaggacagtggcgatcattctatagacacaagttgctcaagtggtgggcccagagttttctcccgggtgtgccaaatgtggtcgccggtttccgtaatcccgacggtttcgtgtctagtctgaaaacattccccacgatgaaaatgttcgaatacgttcgaaatgatcgggatggttggaaccctagtgtctgcatgaacttctgcgctgctttcctctctttcgcacagtcgaccgtggttcaagacgatccgagactggtgcacctgttctcgtgggagccgggaggacctgtgaccgtgtccgtccaccaggatgccccttacgcattccttcctatttggtacgttgaggctatgactcaagacctcccttctccacccaaaacacccagccctaaatag

SEQ ID NO: 288614 - DNA, 1191 bp, Artificial Sequence
  derived and/or modified sequence
atggaccctcgaggtaccaaacgaggcgcagaaaagaccgaggtcgctgaaccaagaaacaagttgccgaggccagcaccatcgcttccaacggacccggctctgtacagcgggccattcccattttataggcgtccctctgaactcggatgtttttctctagatgcacagaggcaatatcacggcgacgcaagggcccttaggtattattctccccctcctactaacgggccaggtccgaacttcgatttacgcgacggttacccggatcgctatcagccacgagatgaagaagtccaggaacgtctggatcatctattgtgctggctcctcgagcaccggggtcgcttagaagggggaccaggctggctcgccgaagccatagttacatggcggggacacctgaccaagttgctgactacaccttacgagagacaggaagggtggcagctggcagcaagcaggttccaaggcaccctgtatttatctgaagttgagacacccaatgccagagcccagcggctcgctcggcctcctttactcagggagctgatgtacatgggttacaagttcgagcagtacatgtgcgccgataaacctggctcaagcccagatccaagcggcgaggttaacacaaatgttgctttttgttccgtgcttcgatcaaggcttggatcacatcctctactgttttctggcgaggtcgattgcactgatccacaggcacccagcactcaaccgccaacgtgttatgtggagctgaagacttcaaaggagatgcacagcccaggacaatggaggagcttctatcgccacaaattactcaagtggtgggcccagagcttcctgcctggggtgccaaacgtggtggccggttttcggaatcctgatgggtttgtgtctagcttaaaaacatttcctacgatgaagatgttcgagtatgtgcgaaatgatcgggacggctggaacccatccgtgtgtatgaatttctgcgcagcctttctgagctttgcacaatctacggtcgtgcaggacgatccacggttagtgcacctctttagctgggaacctggcggaccagtgaccgtgtccgtgcatcaggacgcgccttacgcttttctcccaatctggtatgtagaggctatgacacaagatttacccagtccaccaaaaactcctagtcctaaatag

SEQ ID NO: 288615 - DNA, 1191 bp, Artificial Sequence
  derived and/or modified sequence
atggacccacggggtacaaaacgcggagcagaaaagacagaggttgcggaacccagaaacaagcttccaagacctgccccatctctgcccacagaccctgctttgtattccggccctttcccattctatagacggccatccgagctagggtgtttctctctggatgcccaacgccaataccatggcgatgccagagcgctacgttactactccccaccacctaccaacgggcctggcccaaattttgacctgagggacggataccccgacagatatcaaccgcgagatgaggaagtgcaggagagactggaccatctcttgtgttggctccttgagcacagaggtcggctggaggggggacccggatggctggccgaagccatagtgacctggcgcggacacctgacaaagctgttgacaaccccttacgagcgccaggagggctggcagctggctgctagcaggttccagggcactctgtatctgtctgaagtcgaaactcccaacgcaagggctcagcgactggccaggcctccacttctcagagaactgatgtatatgggctacaaattcgaacagtacatgtgcgccgacaagcctggctctagtcctgatccctctggcgaggtaaacactaatgtagccttctgttcggtgctaaggagtagactgggctctcatcctctgttattctcaggtgaggtcgactgcaccgatccgcaggctccttctacccagccacctacctgctatgtggagttaaagacaagcaaggagatgcatagccccggacagtggcggagtttctacaggcacaagctgttgaagtggtgggcccagtcctttcttccaggtgtacccaacgttgtggccggattccgaaatccagacggcttcgtctcctccctgaaaacatttccaaccatgaaaatgttcgagtacgttcgaaacgacagggacggctggaatccaagtgtgtgtatgaacttttgcgcggctttccttagctttgcgcagtctacagtggtgcaggacgatccacgccttgtccatctgttcagctgggagcctggaggtccggtcacagtctcagtacaccaagacgctccctatgcattcctgccaatctggtacgttgaggccatgacccaggatttgccgagccctcctaagactccatcccccaaatag

SEQ ID NO: 288616 - DNA, 1191 bp, Artificial Sequence
  derived and/or modified sequence
atggacccccgtggcaccaaacgtggcgctgagaaaaccgaagtggcggagcccagaaataagttgccaagaccagccccttccttaccaaccgacccggcactgtactcgggtcccttcccattctacaggagacctagtgagctcgggtgtttcagtttagatgctcagaggcagtatcacggagacgcacgggctctgagatattattcaccccctcctactaacggacctgggcctaactttgacctacgagatgggtatccagaccgatatcagccacgagatgaggaggtccaggaacgactagatcatcttttatgctggcttttggagcaccgaggcaggctggaaggaggtccgggttggcttgcagaggccatcgttacctggagaggtcacttaacaaagctgctcactactccctacgaacggcaggaaggctggcagcttgccgcaagtaggtttcaggggaccctctacctcagtgaagtggagaccccaaacgccagggcccaacgtctggctagacctcctctgctgcgagaattaatgtatatggggtataaattcgaacagtacatgtgcgccgataagcccggatcaagccctgacccatctggtgaggtgaatactaacgtggccttctgctcagtgctgcgtagccgcctcgggtctcaccctctcttgttctcaggagaagtggactgcaccgacccacaggccccaagcacgcagccaccgacatgctatgtggaactcaagacatcgaaggaaatgcacagccccggtcaatggcggtctttttacagacacaagcttctgaagtggtgggctcagtcttttctgccgggtgtgcctaacgttgtggcagggtttcggaatcccgatggttttgtcagcagcttaaaaacatttcccactatgaaaatgtttgagtatgtgcgcaacgatcgagacggatggaatccttcagtctgtatgaacttctgcgcagcttttctgagctttgctcagtcaaccgttgtccaagatgacccacgactggtccacctcttcagctgggaaccaggcggaccagtgaccgtctcagtccatcaggacgccccttacgcgttcctgcccatttggtatgttgaggcaatgactcaggacttacctagcccccctaagacacccagtcctaaatag

SEQ ID NO: 288617 - DNA, 1191 bp, Artificial Sequence
  derived and/or modified sequence
atggacccgaggggaaccaaacggggagccgagaagactgaggtcgcagaaccacgcaacaaactgcccagacccgcaccctcgttaccaactgaccccgcactgtactccgggccttttcctttctacagaagaccatctgaactgggatgctttagcctagatgctcaacgccaataccacggcgacgccagggcactgaggtactacagcccgcctcccacgaacggccctggcccaaacttcgacctcagagacgggtacccggacagatatcagccacgggacgaggaggtgcaggaaagattagatcatcttctttgttggcttttggagcaccggggacgcttggaaggagggccaggatggcttgccgaagcaattgttacgtggcggggtcacctcactaaactgttgaccactccatacgagagacaagaaggctggcaattagcggctagccgcttccaaggtacactgtacctgagcgaggtggagactccgaacgccagggcacagcgcctggctcgccctccattgttaagggagcttatgtatatgggctacaaattcgagcaatatatgtgtgcggacaagcccggatcaagtcccgacccctcaggcgaagtaaacacaaacgtggcattttgtagcgtgctgcgctcgcgccttggatctcacccgctgctgttctccggcgaggtggattgtacagatcctcaggccccttctactcagccccctacttgttacgtcgaactcaagacatccaaggaaatgcattcacccggacagtggcggagcttctaccggcacaaactattgaaatggtgggcccaatctttcctgccaggtgtgccgaatgttgttgcaggctttaggaaccctgatggcttcgtatcatccctgaagacatttcccaccatgaaaatgttcgaatacgtccgcaatgacagggatggttggaatccatcggtctgtatgaatttctgtgcagcatttcttagcttcgcccaatcaacagttgttcaggacgacccaagactggtgcatttgttttcttgggagccaggaggacccgtcacggtttcagtacaccaggacgccccttatgccttcctcccgatttggtatgtcgaagccatgacccaagaccttccgagcccgccaaaaacaccctctcccaagtag

SEQ ID NO: 288618 - DNA, 1191 bp, Artificial Sequence
  derived and/or modified sequence
atggaccctcgcggaacaaagaggggagctgagaagaccgaggttgctgagcctcgcaacaagcttccaagacctgcaccctccctcccaaccgacccagcactgtattcaggtccatttcctttctacagaagaccatctgaattgggatgctttagtctcgatgctcagcgacagtaccatggggatgccagagctctgaggtactacagtccaccacctacaaacggaccaggccctaatttcgacctgcgcgacggatatcctgaccgatatcaacccagagatgaggaggtgcaggagcggctcgaccacctcctgtgctggctgctggagcatcgcggaagacttgaaggtggtcctggatggctggcagaggcgatcgtgacgtggcgcggtcacctcaccaagttgctcacaacaccttatgaaaggcaggaggggtggcaactggccgcttcccggttccagggaactctgtatctgtcggaggtcgaaacccctaacgcaagggcccagcgactggcacgccctcctctcttaagggaactcatgtatatgggctacaaattcgagcagtacatgtgtgccgacaagcctggatccagccctgatccgtctggcgaggtgaataccaacgtggcattttgctctgtcctgcgctctcgactgggcagtcatcccctcctgtttagcggtgaagtcgattgcaccgatcctcaggccccttctacgcagcctccaacctgctatgtagaactgaaaacaagcaaagaaatgcattcacccggtcagtggcgaagcttttatagacataagttgttgaagtggtgggcacaaagttttctgccgggtgtcccaaacgtggtagccggattccgaaaccccgatgggttcgtatcttctctgaagacatttcctacgatgaagatgtttgagtatgtacggaacgaccgggacggctggaacccctccgtgtgcatgaatttctgcgcagcttttctttcctttgcccaatctacagttgtgcaggacgatcctcgcctggtacacctgttcagctgggagccagggggtcccgttacagtgtcagtgcaccaggacgctccatacgcattcctgccaatctggtatgtggaagcaatgacacaagatcttccaagtccgcctaaaaccccctctcccaagtag

SEQ ID NO: 288619 - DNA, 1191 bp, Artificial Sequence
  derived and/or modified sequence
atggatcctcgcggtaccaaacgcggtgccgaaaaaacagaggtggctgagcccagaaataaactgcctcgccctgcaccttccctccccaccgatccagccctgtattcaggccctttccctttttataggcgaccctccgagttgggctgcttctccctcgatgcccagcgacagtaccacggagatgccagggcactccggtactacagccctcctccaactaatggtccgggtccaaacttcgatctacgcgacggctaccctgacaggtatcagcctcgagacgaggaagttcaggagcgtctggatcaccttttatgttggctcttggaacacagggggagactcgaagggggtcccggttggctggcggaagccattgtcacgtggcgtgggcacctgaccaagcttttaacgaccccatacgaaagacaagaaggctggcaattggctgcctctaggttccagggtacactttacctctcagaagtcgaaacgccaaatgcccgagcccaacgcttggcgaggcccccactactcagagagctgatgtacatggggtataaatttgaacagtatatgtgcgccgataagcccggtagtagccctgacccctccggcgaggtcaacaccaacgtcgcattctgtagcgtccttaggtcacggctggggtctcaccctttactattctccggcgaggtcgattgtactgacccccaggcgccttcgacacagcctccaacctgttatgtggagctgaagacaagtaaagaaatgcacagccctggacagtggcgatccttctacagacacaaactgctgaagtggtgggcacagagttttctccccggtgtgccaaacgtggtagcaggttttcgcaaccccgatggcttcgtctctagcctgaaaactttccccacaatgaaaatgtttgagtacgtgaggaatgacagggacgggtggaatccttcagtgtgcatgaacttctgcgcagccttcctgtcgtttgcccaatccaccgtggtgcaggatgatcctagactggtgcatctcttcagctgggaacctggaggtcctgtgaccgtttccgtacatcaagacgctccttatgctttcctcccaatctggtatgttgaagccatgactcaggatctgccctcaccacctaaaacccccagcccaaagtag

SEQ ID NO: 288620 - DNA, 1191 bp, Artificial Sequence
  derived and/or modified sequence
atggaccctcgcggtactaagaggggagccgagaagacagaagtagcagaacccaggaataagctgcctcggcctgccccttccttgcctacggaccctgccctatactctggaccttttccattctatcgacgcccttctgaactcggttgttttagtcttgatgcccagaggcaatatcatggagatgcccgagccctacgatattattctccaccccctacaaacggcccaggtcccaactttgacctccgcgacggataccccgatagataccagccacgggatgaggaagtgcaggaacgactggaccacttgctgtgttggctgcttgagcatcgcggaagactggagggcggtcctggatggcttgctgaggccattgttacatggaggggccatctgactaagctgctgaccacaccttatgaaaggcaggaagggtggcagctggccgctagtcgcttccagggcacgctttacctaagcgaagtggaaacccctaatgcccgagcccagcgccttgctcggcctcccctgctccgggaacttatgtacatggggtataaattcgagcaatacatgtgcgctgacaagccaggttccagtccagacccgagcggtgaggtgaacacaaatgttgccttctgcagtgtgctcagaagtagactcggctcccaccctttactgttttccggggaagtggattgcactgacccccaagccccaagcacccagccacccacatgctacgttgaactcaagacgagcaaggaaatgcactcgccagggcagtggcgatctttttatcgccacaaactcttgaaatggtgggctcagtcgtttctccccggagtgcccaacgtcgtagccggattcagaaatcctgacggatttgtgtcttcccttaaaacgtttcctaccatgaaaatgtttgagtatgtcagaaatgatcgggacggctggaaccccagcgtctgtatgaacttttgtgccgcttttctgagctttgctcagtccactgtcgtgcaggatgaccctcgtctggttcacctgtttagttgggagcccggaggcccagtgactgtatccgtacatcaagacgctccatatgcctttcttcccatttggtacgtcgaagccatgacacaggatctcccttctccaccgaaaactcccagtcctaagtag

SEQ ID NO: 288621 - DNA, 1191 bp, Artificial Sequence
  derived and/or modified sequence
atggaccccagaggcaccaagagaggcgccgagaagaccgaggtggccgagcccagaaacaagctgcccagacccgcccccagcctgcccaccgaccccgccctgtacagcggccccttccccttctacagaagacccagcgagctgggctgcttcagcctggacgcccagagacagtaccacggcgacgccagagccctgagatactacagccccccccccaccaacggccccggccccaacttcgacctgagagacggctaccccgacagataccagcccagagacgaggaggtgcaggagagactggaccacctgctgtgctggctgctggagcacagaggcagactggagggcggccccggctggctggccgaggccatcgtgacctggagaggccacctgaccaagctgctgaccaccccctacgagagacaggagggctggcagctggccgccagcagattccagggcaccctgtacctgagcgaggtggagacccccaacgccagagcccagagactggccagaccccccctgctgagagagctgatgtacatgggctacaagttcgagcagtacatgtgcgccgacaagcccggcagcagccccgaccccagcggcgaggtgaacaccaacgtggccttctgcagcgtgctgagaagcagactgggcagccaccccctgctgttcagcggcgaggtggactgcaccgacccccaggcccccagcacccagccccccacctgctacgtggagctgaagaccagcaaggagatgcacagccccggccagtggagaagcttctacagacacaagctgctgaagtggtgggcccagagcttcctgcccggcgtgcccaacgtggtggccggcttcagaaaccccgacggcttcgtgagcagcctgaagaccttccccaccatgaagatgttcgagtacgtgagaaacgacagagacggctggaaccccagcgtgtgcatgaacttctgcgccgccttcctgagcttcgcccagagcaccgtggtgcaggacgaccccagactggtgcacctgttcagctgggagcccggcggccccgtgaccgtgagcgtgcaccaggacgccccctacgccttcctgcccatctggtacgtggaggccatgacccaggacctgcccagcccccccaagacccccagccccaagtag

SEQ ID NO: 288622 - DNA, 1628 bp, Artificial Sequence
  derived and/or modified sequence
gtgatgacgaaaggagcgtcaacttgtcgtccctcaggcccgtcagtgctgggaggggcggtggcgacgcacataccagcatcacctccgccaggccgggccccacgccggccgcggattggctccctccaagggcacgcacgcccggggactcgttggcggcgtggaggggcgccggtggccacgttggtgtcaacctccttcgtgaagctcacacctcccccgccccgggaggggtttgcccgccactgtcgctgaatgattgcatcatcgaaagcagaaaaccacttttgcatccttcggcctctggcgtgcctgccatgacgtcatagctctgcggaggtggaagttggggagctttgaggacctcatggatcccagggggaccaagagaggagctgagaagacagaggtagctgagcctcggaacaaactacctcgtccagcaccttctctgcccacagaccctgccctctactctgggccctttcctttctaccggcgcccttcggaactgggctgcttctccctggatgctcaacgccagtaccatggagatgcccgagccctgcgctactatagcccaccccccactaacggtccaggccccaactttgacctcagagacggatacccggatcgataccagccccgggacgaggaggtccaggaaaggctggaccacctgctgtgctggctcctggaacaccgaggccggttggaggggggtccaggctggctggcagaggccatagtgacgtggcgggggcacctgacaaaactgctgacgacaccgtatgagcggcaggagggctggcagctggcagcctcccggttccagggaacactatacctgagtgaagtggagacaccgaacgctcgggcccagaggcttgctcggccaccgctcctccgggagcttatgtacatgggatacaaatttgagcagtacatgtgtgcagacaaacctggaagctccccagacccctctggggaggttaacaccaacgtggccttctgctctgtgctacgcagccgcctgggaagccaccctctgctcttctcaggggaggtagactgcacagacccccaagccccatccacacagcccccaacctgctatgtggagctcaagacctccaaggagatgcacagccctggccaatggaggagtttctacagacacaagctcctgaaatggtgggctcagtcattcctcccaggggtcccgaatgttgttgctggcttccgtaacccagacggttttgtctcttccctcaagacctttcctaccatgaagatgtttgaatatgtcaggaatgaccgtgacggctggaatccctctgtgtgcatgaacttctgtgccgccttccttagctttgcccagagcacggttgtccaggatgaccccaggctcgttcatctcttctcttgggagcctggcggcccagtcaccgtgtctgtacaccaagatgcaccttacgccttcctgcccatatggtatgtggaagctatgactcaggacctcccatcaccccccaagactccctctcccaaatagtaatgctttagagggaggcagtcatatctctgtgtgcagataataaaagcatatttctaagaggttc

SEQ ID NO: 288623 - DNA, 1667 bp, Artificial Sequence
  derived and/or modified sequence
gatgacgaaaggagcgtcaacttgtcgtccctcaggcccgtcagtgctgggaggggcggtggcgacgcacataccagcatcacctccgccaggccgggccccacgccggccgcggattggctccctccaagggcacgcacgcccggggactcgttggcggcgtggaggggcgccggtggccacgttggtgtcaacctccttcgtgaagctcacacctcccccgccccgggaggggtttgcccgccactgtcgctgaatgattgcatcatcgaaagcagaaaaccacttttgcatccttcggcctctggcgtgcctgccatgacgtcatagctctgcggaggtggaagttggggagctttgaggcctcctctgtagaatggaaactctgtacccctgcttgtcttaggacctcatggatcccagggggaccaagagaggagctgagaagacagaggtagctgagcctcggaacaaactacctcgtccagcaccttctctgcccacagaccctgccctctactctgggccctttcctttctaccggcgcccttcggaactgggctgcttctccctggatgctcaacgccagtaccatggagatgcccgagccctgcgctactatagcccaccccccactaacggtccaggccccaactttgacctcagagacggatacccggatcgataccagccccgggacgaggaggtccaggaaaggctggaccacctgctgtgctggctcctggaacaccgaggccggttggaggggggtccaggctggctggcagaggccatagtgacgtggcgggggcacctgacaaaactgctgacgacaccgtatgagcggcaggagggctggcagctggcagcctcccggttccagggaacactatacctgagtgaagtggagacaccgaacgctcgggcccagaggcttgctcggccaccgctcctccgggagcttatgtacatgggatacaaatttgagcagtacatgtgtgcagacaaacctggaagctccccagacccctctggggaggttaacaccaacgtggccttctgctctgtgctacgcagccgcctgggaagccaccctctgctcttctcaggggaggtagactgcacagacccccaagccccatccacacagcccccaacctgctatgtggagctcaagacctccaaggagatgcacagccctggccaatggaggagtttctacagacacaagctcctgaaatggtgggctcagtcattcctcccaggggtcccgaatgttgttgctggcttccgtaacccagacggttttgtctcttccctcaagacctttcctaccatgaagatgtttgaatatgtcaggaatgaccgtgacggctggaatccctctgtgtgcatgaacttctgtgccgccttccttagctttgcccagagcacggttgtccaggatgaccccaggctcgttcatctcttctcttgggagcctggcggcccagtcaccgtgtctgtacaccaagatgcaccttacgccttcctgcccatatggtatgtggaagctatgactcaggacctcccatcaccccccaagactccctctcccaaatagtaatgctttagagggaggcagtcatatctctgtgtgcagataataaaagcatatttctaagagg

SEQ ID NO: 288624 - DNA, 1533 bp, Artificial Sequence
  derived and/or modified sequence
ggcgtgcctgccatgacgtcatagctctgcggaggtggaagttggggagctttgaggtaactggattcttgatctgagcgcagacgtccttcctaacctcactgcatttggaggacctggagggagggtgggtgaagggcaaggaaagaggcaggatgagagcttggccgcggtggcgtctgaggggcctgaatgtttcaaggccagagcctggcgatcaggtggctcgcttagtcctaaaccagtcatccttctccaggcctcctctgtagaatggaaactctgtacccctgcttgtcttaggacctcatggatcccagggggaccaagagaggagctgagaagacagaggtagctgagcctcggaacaaactacctcgtccagcaccttctctgcccacagaccctgccctctactctgggccctttcctttctaccggcgcccttcggaactgggctgcttctccctggatgctcaacgccagtaccatggagatgcccgagccctgcgctactatagcccaccccccactaacggtccaggccccaactttgacctcagagacggatacccggatcgataccagccccgggacgaggaggtccaggaaaggctggaccacctgctgtgctggctcctggaacaccgaggccggttggaggggggtccaggctggctggcagaggccatagtgacgtggcgggggcacctgacaaaactgctgacgacaccgtatgagcggcaggagggctggcagctggcagcctcccggttccagggaacactatacctgagtgaagtggagacaccgaacgctcgggcccagaggcttgctcggccaccgctcctccgggagcttatgtacatgggatacaaatttgagcagtacatgtgtgcagacaaacctggaagctccccagacccctctggggaggttaacaccaacgtggccttctgctctgtgctacgcagccgcctgggaagccaccctctgctcttctcaggggaggtagactgcacagacccccaagccccatccacacagcccccaacctgctatgtggagctcaagacctccaaggagatgcacagccctggccaatggaggagtttctacagacacaagctcctgaaatggtgggctcagtcattcctcccaggggtcccgaatgttgttgctggcttccgtaacccagacggttttgtctcttccctcaagacctttcctaccatgaagatgtttgaatatgtcaggaatgaccgtgacggctggaatccctctgtgtgcatgaacttctgtgccgccttccttagctttgcccagagcacggttgtccaggatgaccccaggctcgttcatctcttctcttgggagcctggcggcccagtcaccgtgtctgtacaccaagatgcaccttacgccttcctgcccatatggtatgtggaagctatgactcaggacctcccatcaccccccaagactccctctcccaaatagtaatgctttagagggaggcagtcatatctctgt

SEQ ID NO: 288625 - DNA, 1554 bp, Artificial Sequence
  derived and/or modified sequence
tgacgtcatagctctgcggaggtggaagttggggagctttgaggtaactggattcttgatctgagcgcagacgtccttcctaacctcactgcatttggaggacctggagggagggtgggtgaagggcaaggaaagaggcaggatgagagcttggccgcggtggcgtctgaggggcctgaatgtttcaaggccagagcctggcgatcaggtggctcgcttagtcctaaaccagtcatccttctccaggcctcctctgtagaatggaaactctgtacccctgcttgtcttaggacctcatggatcccagggggaccaagagaggagctgagaagacagaggtagctgagcctcggaacaaactacctcgtccagcaccttctctgcccacagaccctgccctctactctgggccctttcctttctaccggcgcccttcggaactgggctgcttctccctggatgctcaacgccagtaccatggagatgcccgagccctgcgctactatagcccaccccccactaacggtccaggccccaactttgacctcagagacggatacccggatcgataccagccccgggacgaggaggtccaggaaaggctggaccacctgctgtgctggctcctggaacaccgaggccggttggaggggggtccaggctggctggcagaggccatagtgacgtggcgggggcacctgacaaaactgctgacgacaccgtatgagcggcaggagggctggcagctggcagcctcccggttccagggaacactatacctgagtgaagtggagacaccgaacgctcgggcccagaggcttgctcggccaccgctcctccgggagcttatgtacatgggatacaaatttgagcagtacatgtgtgcagacaaacctggaagctccccagacccctctggggaggttaacaccaacgtggccttctgctctgtgctacgcagccgcctgggaagccaccctctgctcttctcaggggaggtagactgcacagacccccaagccccatccacacagcccccaacctgctatgtggagctcaagacctccaaggagatgcacagccctggccaatggaggagtttctacagacacaagctcctgaaatggtgggctcagtcattcctcccaggggtcccgaatgttgttgctggcttccgtaacccagacggttttgtctcttccctcaagacctttcctaccatgaagatgtttgaatatgtcaggaatgaccgtgacggctggaatccctctgtgtgcatgaacttctgtgccgccttccttagctttgcccagagcacggttgtccaggatgaccccaggctcgttcatctcttctcttgggagcctggcggcccagtcaccgtgtctgtacaccaagatgcaccttacgccttcctgcccatatggtatgtggaagctatgactcaggacctcccatcaccccccaagactccctctcccaaatagtaatgctttagagggaggcagtcatatctctgtgtgcagataataaaagcatatttctaagaggttc

SEQ ID NO: 288626 - DNA, 1516 bp, Artificial Sequence
  derived and/or modified sequence
tggcggcgtggaggggcgccggtggccacgttggtgtcaacctccttcgtgaagctcacacctcccccgccccgggaggggtttgcccgccactgtcgctgaatgattgcatcatcgaaagcagaaaaccacttttgcatccttcggcctctggcgtgcctgccatgacgtcatagctctgcggaggtggaagttggggagctttgaggcctcctctgtagaatggaaactctgtacccctgcttgtcttaggacctcatggatcccagggggaccaagagaggagctgagaagacagaggtagctgagcctcggaacaaactacctcgtccagcaccttctctgcccacagaccctgccctctactctgggccctttcctttctaccggcgcccttcggaactgggctgcttctccctggatgctcaacgccagtaccatggagatgcccgagccctgcgctactatagcccaccccccactaacggtccaggccccaactttgacctcagagacggatacccggatcgataccagccccgggacgaggaggtccaggaaaggctggaccacctgctgtgctggctcctggaacaccgaggccggttggaggggggtccaggctggctggcagaggccatagtgacgtggcgggggcacctgacaaaactgctgacgacaccgtatgagcggcaggagggctggcagctggcagcctcccggttccagggaacactatacctgagtgaagtggagacaccgaacgctcgggcccagaggcttgctcggccaccgctcctccgggagcttatgtacatgggatacaaatttgagcagtacatgtgtgcagacaaacctggaagctccccagacccctctggggaggttaacaccaacgtggccttctgctctgtgctacgcagccgcctgggaagccaccctctgctcttctcaggggaggtagactgcacagacccccaagccccatccacacagcccccaacctgctatgtggagctcaagacctccaaggagatgcacagccctggccaatggaggagtttctacagacacaagctcctgaaatggtgggctcagtcattcctcccaggggtcccgaatgttgttgctggcttccgtaacccagacggttttgtctcttccctcaagacctttcctaccatgaagatgtttgaatatgtcaggaatgaccgtgacggctggaatccctctgtgtgcatgaacttctgtgccgccttccttagctttgcccagagcacggttgtccaggatgaccccaggctcgttcatctcttctcttgggagcctggcggcccagtcaccgtgtctgtacaccaagatgcaccttacgccttcctgcccatatggtatgtggaagctatgactcaggacctcccatcaccccccaagactccctctcccaaatagtaatgctttagagggaggcagtcatatctctgtgtgcagataataaaagcatatttctaagaggttc

SEQ ID NO: 288627 - protein, 372 aa, Artificial Sequence
  derived and/or modified sequence
MKRRTDPECTAPIKKQKKRVAELALSLSSTSDDEPPSSVSHGAKASTTSLSGSDSETEGKQHSSDSFDDAFKADSLVEGTSSRYSMYNSVSQKLMAKMGFREGEGLGKYSQGRKDIVEASSQKGRRGLGLTLRGFDQELNVDWRDEPEPSACEQVSWFPECTTEIPDTQEMSDWMVVGKRKMIIEDETEFCGEELLHSVLQCKKPLVKDREAELLYFADVCAGPGGFSEYVLWRKKWHAKGFGMTLKGPNDFKLEDFYSASSELFEPYYGEGGIDGDGDITRPENISAFRNFVLDNTDRKGVHFLMADGGFSVEGQENLQEILSKQLLLCQFLMALSIVRTGGHFICKTFDLFTPFSVGLVYLLYCCFERVC

SEQ ID NO: 288628 - protein, 148 aa, Artificial Sequence
  derived and/or modified sequence
AIHILDVLVLNGTDVREQHFNQRIQLAEKFVKAVSKPSRPDMNPIRVKEVYRLEEMEKIFVRLEMKIIKGSSGTPKLSYTGRDDRHFVPMGLYIVRTVNEPWTMGFSKSFKKKFFYNKKTKDSTFDLPYYPFPSFFFPNRRYNLLLFV

SEQ ID NO: 288629 - DNA, 1119 bp, Artificial Sequence
  derived and/or modified sequence
atgaagagaagaaccgaccccgagtgcaccgcccccatcaagaagcagaagaagagagtggccgagctggccctgagcctgagcagcaccagcgacgacgagccccccagcagcgtgagccacggcgccaaggccagcaccaccagcctgagcggcagcgacagcgagaccgagggcaagcagcacagcagcgacagcttcgacgacgccttcaaggccgacagcctggtggagggcaccagcagcagatacagcatgtacaacagcgtgagccagaagctgatggccaagatgggcttcagagagggcgagggcctgggcaagtacagccagggcagaaaggacatcgtggaggccagcagccagaagggcagaagaggcctgggcctgaccctgagaggcttcgaccaggagctgaacgtggactggagagacgagcccgagcccagcgcctgcgagcaggtgagctggttccccgagtgcaccaccgagatccccgacacccaggagatgagcgactggatggtggtgggcaagagaaagatgatcatcgaggacgagaccgagttctgcggcgaggagctgctgcacagcgtgctgcagtgcaagaagcccctggtgaaggacagagaggccgagctgctgtacttcgccgacgtgtgcgccggccccggcggcttcagcgagtacgtgctgtggagaaagaagtggcacgccaagggcttcggcatgaccctgaagggccccaacgacttcaagctggaggacttctacagcgccagcagcgagctgttcgagccctactacggcgagggcggcatcgacggcgacggcgacatcaccagacccgagaacatcagcgccttcagaaacttcgtgctggacaacaccgacagaaagggcgtgcacttcctgatggccgacggcggcttcagcgtggagggccaggagaacctgcaggagatcctgagcaagcagctgctgctgtgccagttcctgatggccctgagcatcgtgagaaccggcggccacttcatctgcaagaccttcgacctgttcacccccttcagcgtgggcctggtgtacctgctgtactgctgcttcgagagagtgtgctag

SEQ ID NO: 288630 - DNA, 447 bp, Artificial Sequence
  derived and/or modified sequence
gccatccacatcctggacgtgctggtgctgaacggcaccgacgtgagagagcagcacttcaaccagagaatccagctggccgagaagttcgtgaaggccgtgagcaagcccagcagacccgacatgaaccccatcagagtgaaggaggtgtacagactggaggagatggagaagatcttcgtgagactggagatgaagatcatcaagggcagcagcggcacccccaagctgagctacaccggcagagacgacagacacttcgtgcccatgggcctgtacatcgtgagaaccgtgaacgagccctggaccatgggcttcagcaagagcttcaagaagaagttcttctacaacaagaagaccaaggacagcaccttcgacctgccctactaccccttccccagcttcttcttccccaacagaagatacaacctgctgctgttcgtgtag

SEQ ID NO: 288631 - DNA, 1119 bp, Artificial Sequence
  derived and/or modified sequence
atgaagcgcagaacagaccccgagtgcactgctccgatcaagaagcaaaagaaacgggtcgccgagctcgctctcagcttgagctctacttccgatgacgagcctcctagtagcgtgagtcatggcgccaaagcctcaaccacctctctgtctggcagtgactccgaaacagaagggaaacagcactcaagtgatagttttgacgacgcatttaaagcagactcactcgtggaggggacctctagcagatacagcatgtacaacagtgtatcacagaaattgatggccaagatggggttccgggaaggggaagggctgggcaagtattcacaaggcagaaaggacatcgtcgaggcctcttcgcaaaagggtcgtagaggattggggctgacattgcgaggcttcgatcaggagctgaatgtggattggcgagacgagccggaaccaagcgcatgtgaacaggtgtcctggttcccagagtgtactacagagatccccgacacacaagagatgtctgactggatggtcgtcggaaaaaggaagatgataattgaggacgagacggagttctgcggggaagagctcctgcactcggtcctgcaatgcaaaaagccactcgtaaaagatagggaagcagagctgctgtattttgcagacgtatgtgccggacctggagggttttcagagtatgttttgtggcgcaagaagtggcacgcaaaaggtttcggaatgacactaaaaggcccaaatgacttcaagctggaggacttttactccgcgagcagcgagctttttgagccctattatggtgaaggtggaatcgatggcgatggcgacatcacccggccagagaatatttccgccttccggaactttgtgctcgataacactgataggaagggggtgcatttcttgatggccgatgggggcttttctgtcgaagggcaggaaaacttacaggaaatcctgtctaagcagctcctcctctgtcagtttctaatggctctgtctattgtccggaccggagggcacttcatatgcaaaaccttcgatctcttcacccctttttcagtgggcctggtgtacctgttatattgttgcttcgagcgggtctgttag

SEQ ID NO: 288632 - DNA, 447 bp, Artificial Sequence
  derived and/or modified sequence
gcaatccatatattggatgttctggtgctgaatggcaccgacgtgagagagcagcactttaatcagcggattcagctggccgagaaattcgtgaaggctgtcagtaaaccttctagacctgatatgaacccaattcgggtgaaggaagtttatcgcctggaggagatggagaagattttcgtaaggctcgaaatgaagatcatcaaagggtcttctggcactccaaagttgtcatatacagggagagatgatagacatttcgttccaatggggctgtatattgtccgcacagttaacgaaccgtggacaatggggttctccaaaagttttaagaagaaatttttttacaataagaaaacaaaggactcgacctttgacctgccctactatccatttccctcctttttctttcctaaccgtcgttataaccttcttcttttcgtgtag

SEQ ID NO: 288633 - DNA, 1119 bp, Artificial Sequence
  derived and/or modified sequence
atgaagcgcagaactgaccccgaatgtactgcccccatcaaaaaacagaaaaagcgcgtggcagagctggctctgagcctgtcgtctacctctgatgatgagcccccatctagcgtcagtcacggcgctaaagcctcaacgacctccctgtctggcagtgatagtgagacggagggcaaacaacacagcagtgactcattcgacgacgcctttaaggccgattctctggtggaaggcacctcaagtaggtattctatgtacaattccgtttcacagaagctgatggccaagatgggatttcgtgaaggcgagggcctgggcaaatatagccagggccggaaggacatcgtcgaagcatcaagccagaagggccggaggggactggggcttaccctaagggggtttgatcaggagttaaatgttgactggcgcgacgagcctgaaccctccgcctgtgagcaggtttcttggttccctgagtgtaccactgaaattcctgacacacaggaaatgtctgactggatggtggtcgggaaacgcaagatgataatcgaagatgagacagagttttgcggcgaagagctcctgcattccgtactccagtgcaaaaagccactggtcaaggaccgtgaagccgagctcctgtactttgccgatgtttgcgccgggccagggggcttctctgaatatgtgctgtggcggaaaaagtggcatgcaaaagggtttggaatgacacttaagggtccaaacgacttcaaactggaggatttttacagcgcctcatccgagctgtttgagccctattacggagagggggggattgacggagatggggatattaccaggccggagaacatcagcgcattccgcaatttcgtactcgacaatacagacaggaaaggcgttcactttcttatggctgatggtggcttctcggtggagggacaagagaacctgcaggagatattatccaagcagctcctgctatgccagttcttaatggccttgtcaatcgtaaggaccggaggccactttatctgcaaaaccttcgaccttttcacccccttcagcgttggcctggtttacctgttgtattgctgctttgaaagggtgtgctag

SEQ ID NO: 288634 - DNA, 1116 bp, Artificial Sequence
  derived and/or modified sequence
atgaagaggagaactgacccagaatgcactgcccccatcaagaaacagaaaaaaagagttgcagagcttgccctgagcctcagctccacgtccgatgatgaacctccctcctctgtcagtcatggagcaaaagcatctactacaagccttagtgggtctgatagtgagaccgaggggaaacaacacagctctgactcttttgacgatgcattcaaagcagactctcttgtggaaggaacttcttctcgctattccatgtataatagcgtctcccagaagcttatggccaagatgggcttcagggaaggtgaaggattgggtaaatacagccagggtcggaaggacatcgttgaggcttccagtcagaaaggtcgaagaggcttgggtctgacactccggggctttgaccaggagctgaacgtggactggcgagatgagccagagcccagtgcttgtgagcaggtgtcatggtttccagaatgtaccactgaaattcctgacactcaggaaatgagcgattggatggtggtgggaaagagaaagatgattattgaagatgaaacagagttttgtggggaagagctgcttcacagtgtgttgcagtgtaagaagccactggtgaaggaccgggaagctgagcttctgtactttgctgatgtctgcgcaggcccaggtggcttctcagagtatgtgctgtggaggaagaagtggcatgcaaagggctttggaatgactttgaagggccctaatgacttcaagctggaggacttctactctgcttccagtgaactcttcgaaccctactatggtgagggtgggattgatggagatggagatatcacccgcccagagaacatctctgcttttcggaattttgtcctggataacacagatcgcaagggtgtccattttctgatggctgatgggggtttctcggtggaggggcaggagaacctgcaggagatcctcagcaagcagctgcttctgtgtcagttcctcatggcgctgtccattgtccggacaggaggccacttcatctgtaaaacctttgacctgttcacaccgtttagtgtggggcttgtctacctgctgtactgctgctttgaacgagtttgt

SEQ ID NO: 288635 - DNA, 1119 bp, Artificial Sequence
  derived and/or modified sequence
atgaagagaagaacagatcctgagtgcacagcccccatcaagaagcagaagaagagggtggccgagctggccctgagcctgagcagcaccagtgatgatgagccccccagctctgtgtcccatggagccaaggccagcaccaccagcctgagcggcagtgacagcgagacagagggcaagcagcacagcagtgacagctttgatgatgccttcaaggctgacagcctggtggagggcaccagcagccgctacagcatgtacaacagcgtgtcccagaagctgatggccaagatgggcttccgggagggggagggcctgggcaagtacagccagggcaggaaggacatcgtggaggccagcagccagaagggcagaagaggcctgggcctgaccctgcggggctttgaccaggagctgaatgtggactggagagatgagcctgagcccagcgcctgtgagcaggtgtcctggttccctgagtgcaccacagagatcccagacacccaggagatgtctgactggatggtggtgggcaagaggaagatgatcattgaagatgaaacagagttctgtggggaggagctgctgcacagcgtgctgcagtgcaagaagcccctggtgaaggaccgggaggccgagctgctgtactttgctgatgtgtgtgccggccctgggggcttctctgaatatgtgctgtggaggaagaagtggcacgccaagggcttcggcatgaccctgaagggccccaatgacttcaagctggaggacttctacagcgccagcagcgagctgtttgagccctactatggagagggcggcattgatggagatggagacatcaccaggcctgagaacatcagcgccttcaggaactttgtgctggacaacacagacaggaagggcgtgcacttcctgatggctgatggcggcttctctgtggagggccaggagaacctgcaggagatcctgagcaagcagctgctgctgtgccagttcctgatggccctgagcatcgtgaggactggaggccacttcatctgcaagacctttgacctcttcacccccttctctgtgggcctggtgtacctgctgtactgctgctttgagcgggtgtgctag

SEQ ID NO: 288636 - DNA, 447 bp, Artificial Sequence
  derived and/or modified sequence
gccatccacatcctggatgtgctggtgctgaatggaacagatgtgcgggagcagcacttcaaccagaggatccagctggccgagaagtttgtgaaggctgtgtccaagcccagcaggccagacatgaaccccatccgggtgaaggaggtgtaccgcctggaggagatggagaagatctttgtgcggctggagatgaagatcatcaagggcagcagcggcacccccaagctgagctacacaggaagagatgacagacactttgtgcccatgggcctgtacatcgtgaggacagtgaatgagccctggaccatgggcttcagcaagagcttcaagaagaagttcttctacaacaagaagaccaaggacagcacctttgacctgccctactaccccttccccagcttcttcttccccaacagacgctacaacctgctgctgtttgtgtag

SEQ ID NO: 288637 - DNA, 1119 bp, Artificial Sequence
  derived and/or modified sequence
atgaagcggcggaccgaccccgagtgcaccgcccccatcaagaagcagaaaaaaagagtcgcagaactagcactgagcctgtccagcacctctgatgatgaaccaccatcatctgtaagccacggagctaaagcttctacaacatctctgtctggtagtgattcagaaacagagggcaagcagcactcatctgactcgtttgatgacgccttcaaagcagactctttggtcgagggaacctcttccagatactcgatgtataactccgtgtctcagaagctgatggcaaagatggggttcagagagggcgaagggttgggcaagtacagccagggccgcaaagatatcgtggaagcatcctcccagaaaggccgccgggggctgggactcactctgagaggattcgatcaggaacttaacgtggattggcgggacgagcctgaaccgtctgcctgtgagcaggtatcttggtttccagaatgcaccaccgaaattcctgacacgcaggagatgagcgactggatggtagtggggaaacgtaagatgataattgaagacgagaccgaattctgcggtgaagagctcctacatagtgtccttcaatgcaaaaaacccctagtcaaggatagagaggcagagctcctttacttcgccgacgtctgtgccggccccggtggcttcagtgaatatgtcttatggcgcaagaagtggcacgccaaagggttcggcatgactctcaagggccctaatgacttcaagctggaagatttctacagcgctagctccgagctcttcgagccttactacggcgaaggcggcatagacggcgacggggacattactcggcctgaaaatataagcgcttttcgcaactttgtgttggataataccgaccgtaaaggtgtgcatttcttgatggccgatggtggcttcagtgtcgaaggacaggaaaatctccaggaaatcctatctaaacagttgctcctgtgtcaatttcttatggctctgtctattgtacgcaccggcgggcacttcatctgcaagaccttcgatctgttcacccctttctccgtgggattagtctaccttctctactgctgctttgagcgtgtttgctag

SEQ ID NO: 288638 - DNA, 447 bp, Artificial Sequence
  derived and/or modified sequence
gccatccacatcctggacgtgctggtgctgaacggcaccgacgtgagggagcagcatttcaaccagcggatccagctcgcagaaaaatttgtgaaggctgtgagcaagccatcccggcctgacatgaatcctattagggttaaagaggtataccgcctggaggaaatggagaaaatatttgtgaggttagagatgaaaattatcaaagggagcagtggcacgcctaaactctcatacacgggcagggatgaccggcacttcgtgcccatgggactgtatatcgtacggacggttaatgagccatggacaatgggattctccaagtccttcaaaaagaagtttttttataacaagaagactaaagactcgacttttgatctaccatattaccctttcccttctttctttttccccaatcgtcgatataacctgctgctgttcgtgtag

SEQ ID NO: 288639 - DNA, 1119 bp, Artificial Sequence
  derived and/or modified sequence
atgaagcggcggaccgaccccgagtgcaccgcccccatcaagaagcaaaagaaacgtgtggccgagctcgctttgagcctgtcatccacctccgacgatgaacccccaagctcagtgtcacatggtgctaaggctagcaccacttccctgagcggctctgattctgaaacagagggcaaacagcattcgtcggactcatttgacgacgccttcaaagccgactcgcttgttgagggcacaagcagcaggtactcgatgtacaacagtgtttcacagaagctgatggccaagatgggatttcgggaaggcgagggcctagggaaatacagccagggacgtaaagacatcgtggaggcctcatcccagaaaggtcggcgcggactgggcttgaccctgcgaggtttcgaccaggaactaaacgtggattggagggatgagccagaaccaagtgcttgcgagcaggtatcatggtttccggaatgtacaacagaaattcctgacactcaagaaatgagcgactggatggtggtcggaaagagaaaaatgattatcgaagacgaaacagagttctgtggagaggagctgctacacagtgtactgcaatgcaagaagcctttggtgaaggatcgagaggcggaactgctttacttcgccgatgtttgcgccggcccaggtgggttttctgagtacgtgctctggcgcaagaaatggcatgctaagggctttgggatgactctcaagggacctaacgatttcaaactggaggacttctacagcgctagcagcgaactgttcgagccatactacggcgagggggggatagacggagatggcgatatcaccagacctgaaaacatctcggctttccgaaactttgtcctggataacacggaccgaaaaggagtgcatttcctgatggccgacggggggttttccgtggaaggccaggagaatctccaggagatcctctctaaacagcttcttttgtgtcagttcctgatggccctctcaatcgtgagaactggtggccactttatctgcaagacattcgacctatttaccccattctcagtgggtctcgtgtacctcttgtattgttgctttgaacgggtctgctag

SEQ ID NO: 288640 - DNA, 1119 bp, Artificial Sequence
  derived and/or modified sequence
atgaagcggaggacggaccccgaatgcaccgcacctatcaagaaacaaaagaagagagtagcggaactcgccctgagtctgtccagcacctcagacgacgagccgccaagctccgtgtcccatggcgctaaggcatccacgacaagcctctcgggctcagatagtgagactgaaggaaaacagcatagttccgattctttcgacgatgccttcaaggccgacagtcttgtggaaggcaccagctctagatacagcatgtacaattcagtgagccagaaacttatggcaaaaatggggtttagagagggggagggactggggaaatattcgcaaggacgtaaagacattgtcgaggcgagttcacaaaaagggagacggggactaggactgacattgcgcggatttgatcaggagctaaacgtggactggcgggatgaaccagaaccctccgcttgcgagcaggtctcatggttccccgagtgcacaactgaaataccagatacacaggagatgtcagattggatggtggtggggaagagaaaaatgatcatagaggacgagaccgaattttgtggggaggaactgctgcactccgtcctacaatgcaagaagcccttggtgaaagatcgcgaagccgaactgctctactttgccgatgtgtgcgcagggcctggcggattcagcgaatatgttctgtggcgtaaaaaatggcatgctaagggctttggcatgacgctcaagggtcccaacgattttaagctggaagacttttactcggccagttccgagctctttgaaccctattatggcgagggcggaatcgacggagatggcgatattacccgaccggagaatatttccgcgttccgaaatttcgtcctcgacaatacagatcgtaaaggcgtccactttctcatggccgatgggggattcagcgttgaaggccaggagaacttacaagagatcctgtctaaacagctcttactttgccagtttttgatggccctatccatcgtgcgcaccgggggtcatttcatatgtaaaacgtttgatctgttcacgccattcagtgtcggcctggtttatctgttatattgttgtttcgaacgggtctgttag

SEQ ID NO: 288641 - DNA, 447 bp, Artificial Sequence
  derived and/or modified sequence
gccattcacatcctggacgtcctggtgttgaatggcaccgacgtccgggagcagcacttcaaccagcgcatacaactggctgagaagttcgtcaaagcagtgtcaaagcctagccggccagacatgaaccctattcgagtgaaggaagtctatagactggaggagatggaaaaaatattcgtgcggctggaaatgaaaatcatcaagggatcgagcggcactcccaagctgtcatatacaggtcgggatgacagacatttcgtgcccatgggcctctatattgttcgtaccgtgaatgaaccctggacgatggggttctccaagagctttaagaagaagttcttctataacaagaagactaaggattccacttttgacctcccctattatccatttccaagctttttttttccaaatcgccgatacaatttgctgttgtttgtgtag

SEQ ID NO: 288642 - DNA, 1119 bp, Artificial Sequence
  derived and/or modified sequence
atgaaaaggcgtactgacccagagtgtacagcccctatcaaaaagcagaagaagcgggttgccgagctggcgctgtccctgtcttcgacctcggacgatgagcctccttcttccgtctctcatggagcgaaggctagcacaacctccctgtctggtagcgatagcgaaacagagggcaagcagcattcgtcagactcattcgacgacgcctttaaggcggatagtctggttgaagggacaagttccagatactcgatgtacaacagcgtgagtcaaaaattaatggctaagatggggttccgtgaaggagaaggcctggggaagtactctcaaggtcggaaggacattgtagaagccagctcccaaaaagggaggcggggactaggactgacgctacgcggatttgatcaggagctcaatgtagactggcgcgatgagcccgaaccaagtgcttgcgagcaagtgagttggttccccgaatgtactaccgaaatcccagacacccaggaaatgtccgactggatggtcgtcggcaaaagaaagatgatcatcgaagacgagaccgaattctgtggtgaggagctcctgcatagcgtgctccagtgcaagaagccccttgtcaaggatagagaggctgaactactgtacttcgccgatgtctgcgcagggccaggtggcttcagcgagtatgtcttatggcgtaagaagtggcatgctaaaggcttcgggatgactttaaaggggccaaacgacttcaagttagaagacttttattccgcttcttcagagttattcgaaccatattacggggagggagggattgacggggacggagatatcacccgtccagaaaatatatcggccttccgcaacttcgtcctagataacacagatcgtaagggcgtccattttctcatggctgacgggggattttctgtggagggacaagagaatctgcaggagatcctcagtaagcagctgttactgtgtcagtttctaatggctctgtcgatcgtgaggaccggtgggcactttatttgcaaaacctttgacctgttcacacccttctcagttggactggtttacctcctgtattgctgctttgagcgagtctgctag

SEQ ID NO: 288643 - DNA, 445 bp, Artificial Sequence
  derived and/or modified sequence
gccatccacatcctcgatgtccttgtgctgaatggcaccgacgttcgggagcagcactttaaccagcgaattcagcttgccgagaaatttgtgaaagccgtttccaagcctagtcggcccgacatgaatcccatcagggtgaaggaggtgtacagactggaagagatggagaagatttttgtcaggttggagatgaagatcatcaagggctccagtggcaccccaaagctcagctacacagggcgtgatgaccggcactttgtacccatgggcctctacatcgtcaggacagtgaatgagccctggactatgggattcagcaaaagcttcaagaagaagttcttctacaacaagaaaaccaaggactctacttttgacctcccttactaccctttcccttcctttttcttccctaataggaggtacaatctgcttttgtttgtcg

SEQ ID NO: 288644 - DNA, 1280 bp, Artificial Sequence
  derived and/or modified sequence
cgcagtactggacccgagcgcgacggtgcggctggcggacccgggctggcttgtggggaaacgaaactgagggaggaggcggcggctctggcagcggcggcgacagtgtcggcctgaccccccctccgctccccggcagctcgctctctcccctcagcttaacgatgaagaggagaactgacccagaatgcactgcccccatcaagaaacagaaaaaaagagttgcagagcttgccctgagcctcagctccacgtccgatgatgaacctccctcctctgtcagtcatggagcaaaagcatctactacaagccttagtgggtctgatagtgagaccgaggggaaacaacacagctctgactcttttgacgatgcattcaaagcagactctcttgtggaaggaacttcttctcgctattccatgtataatagcgtctcccagaagcttatggccaagatgggcttcagggaaggtgaaggattgggtaaatacagccagggtcggaaggacatcgttgaggcttccagtcagaaaggtcgaagaggcttgggtctgacactccggggctttgaccaggagctgaacgtggactggcgagatgagccagagcccagtgcttgtgagcaggtgtcatggtttccagaatgtaccactgaaattcctgacactcaggaaatgagcgattggatggtggtgggaaagagaaagatgattattgaagatgaaacagagttttgtggggaagagctgcttcacagtgtgttgcagtgtaagaagccactggtgaaggaccgggaagctgagcttctgtactttgctgatgtctgcgcaggcccaggtggcttctcagagtatgtgctgtggaggaagaagtggcatgcaaagggctttggaatgactttgaagggccctaatgacttcaagctggaggacttctactctgcttccagtgaactcttcgaaccctactatggtgagggtgggattgatggagatggagatatcacccgcccagagaacatctctgcttttcggaattttgtcctggataacacagatcgcaagggtgtccattttctgatggctgatgggggtttctcggtggaggggcaggagaacctgcaggagatcctcagcaagcagctgcttctgtgtcagttcctcatggcgctgtccattgtccggacaggaggccacttcatctgtaaaacctttgacctgttcacaccgtttagtgtggggcttgtctacctgctgtactgctgctttgaacgagtttgt

SEQ ID NO: 288645 - DNA, 6194 bp, Artificial Sequence
  derived and/or modified sequence
gcttcccggggatagcgcggagcacgcagcagcgagcggagcgcgggcggcggcgccgtacctcgggctgcgggagcgcgggcgccctggggtcctcggaatcacaatgaggacctagggcatctgtctgctgacgccccctggcctgcagtgaccatggccccccgcaagaggagccaccatggcctgggcttcctgtgctgcttcgggggcagtgacatccccgaaatcaacctccgggacaaccaccctctgcagttcatggagttctccagccccatcccgaacgcagaggagctcaacatccgctttgcagagctggtggatgaattggatctcactgacaaaaaccgagaggctatgtttgcactgccccctgagaagaaatggcagatctactgcagcaagaagaaggagcaggaggaccccaacaagctggcaaccagctggcctgactattacatcgaccgcatcaattccatggctgcgatgcagagtctgtacgcgtttgatgaggaggagacggagatgaggaaccaagtcgtggaagacctgaagacagccctccggacacagcctatgaggtttgtgacccgcttcattgagctggagggcttgacctgtctgctaaatttcctccggagcatggaccacgccacctgtgagagccgcatccacacctcactcattggctgcatcaaagcattgatgaacaactcccaggggcgggcacatgtgctggcacagcctgaggccattagtaccatagcccagagcctacgcacagagaacagcaagaccaaggtggctgtgctggagatcctgggtgctgtgtgcctcgtgcctggtggccacaagaaggtgctgcaggccatgctgcactaccaggtgtatgcagcagagcgaacccgcttccagaccctgctgaacgagctagaccgaagtctgggccggtaccgggatgaagtgaatctgaaaacagccatcatgtccttcatcaatgctgtcctcaatgctggagctggagaggataatctggagttccgcctacatctacggtatgaattcctgatgctgggtatacagcctgtgattgacaagctccggcaacatgaaaatgccatcctggacaaacatttagacttcttcgagatggtgcggaatgaggatgacctggagctagccaggaggtttgacatggtccacatcgacaccaagagtgcttcccagatgtttgagttgatccacaagaagctgaagtacacggaggcctacccctgcctgctctctgtgctgcaccactgcctgcagatgccctacaaacggaacggtggctacttccagcagtggcagctcctggaccgcatcctccagcagattgtcctccaggatgagcggggtgtggaccctgacctggctcccttggagaacttcaatgtcaagaacatcgtcaacatgctcatcaacgagaatgaagtgaaacagtggcgagaccaggcagagaagttccggaaagaacacatggagcttgtgagccgtctggagaggaaggagcgggaatgcgagacaaagacattggagaaggaagagatgatgcggacgctgaacaaaatgaaggacaagctggcccgggagtcccaggagctgcgccaggctcggggacaagtggcagagctggtagcccagctcagtgaactctcaacaggccctgtatcttccccaccaccccctgggggcccactcaccttgtcttcctcaatgacaaccaatgacctgcctccaccccctcctcctctgccctttgcctgttgtccccctcccccaccaccaccccttcctcccgggggacccccgactcccccaggtgccccaccttgcctcggcatgggcctgcccctccctcaggacccctaccccagcagtgacgtcccactcaggaaaaagcgtgtcccccagccttctcacccactgaagtccttcaactgggtgaagctgaatgaggagcgtgtccctggcaccgtatggaatgagattgatgacatgcaggtatttcggatcctggacctagaggattttgaaaagatgttttcagcctaccagaggcaccagaaagagctgggctccactgaagacatctacctggcttcccgcaaggtcaaagagctgtcggtcattgatggccggagggcccaaaactgcatcatccttctttccaagttgaagctttctaacgaggagatccggcaggccatcttgaagatggatgagcaggaggaccttgctaaggacatgctggagcagctcctcaagttcatcccagagaagagtgacattgacctcctggaggagcacaagcatgaaattgagcggatggcccgtgctgaccgcttcctctatgaaatgagcaggattgaccactaccagcagcgactgcaagccctcttcttcaagaagaaattccaggagcggctggctgaggcaaagcccaaagtggaagccatcctgttggcctcccgggagctggtccgcagcaagcgtcttagacagatgctagaggtcatcctagccataggcaacttcatgaacaaagggcagcgtgggggcgcctacgggttccgggtggccagcctcaacaagatcgctgacaccaagtccagcatcgacagaaacatctctctgctccattacctgatcatgatcctggagaagcattttcctgatattctaaacatgccttcagagctgcaacatcttccagaagctgccaaagtcaacctagcagaactggagaaggaggtgggcaacctcaggaggggcctgagagcggtggaggtggagctggagtatcagaggcgccaggtacgggagcccagtgacaagtttgtccctgtcatgagcgacttcatcacggtgtccagcttcagcttctccgagctggaggaccagctaaatgaggccagggacaagttcgccaaggccttgatgcacttcggggagcatgacagcaagatgcagccagacgaattctttggcatctttgataccttcttgcaggccttctcagaggcccggcaggatctagaggccatgaggaggaggaaggaggaggaggagcggcgggcgcgcatggaagccatgctgaaggagcagagggaacgtgagcggtggcagcggcagcggaaggtcctggctgcaggcagctcgctggaggagggaggagagttcgatgacctggtgtcggccctgcgctctggggaggtcttcgacaaggacttatgcaagctcaagcgcagccgcaagcgatcagggagccaggccctggaagttacccgggagcgggcaataaaccggctaaattattgacctggggaactagccacacaggaggccgggagacagggactggtgagaatggggctgagtggaggaggtggtgatatttaaaccatttggtgcttggtttagagccttgggctgggtcctgggatggggggctgtgtgtggctggaccaggtgtctccccacgcttaccttaaggggctcctcttatctccccttcacatgattccttctgtgccctggccccaggtattattctgaggctgccttggatggcctcaggccaggtaaccccaggctgaaggggccctgctccccatcccctaccatgggcacccatgtgctggcacagaacagttccagatctagactggagaggtccacagccttgtccagagttcctgtgtagcacggggagcaatgatggagggagcccctgagagggaatctggtgagggaatccagactcccttctctcaaggggaggctcaacagaacattgacctgggggcaaactttcctcttgaatgggaacagaggaggcattatatattctagttagatcagctctggtaggttccagagaacagtcaatgttggaaggatgatgcagggaccaaagccatcaggacagagtagcagtgtctgtttcccatgtcacaagtcctctggcctctccctgcatgtcttaagtatctttcccttccttctctaccctcacctccatcctgtctactaatccacagtcctagaagactcaccttgggtttccacagctatggctcactaccaggtgcttgatgaatctggcgaggggctcaagacagacctcatgcatcaccacacctcatgccttttgggcatctcccatgtccccatctcctggacacctggccattgttgtgaagccagacagtgacctcaaatgttgccttggagtcccctacagcccctcagcagagggcagcacttgaatgcttagctccatcccatagttctctacttcatataaattgctcaggccctcccaccccttctctaacactagcttcaaggcagaagccacagcagcctctgtccagcctgcaggtggccacttggaaccatgtgtccactggcgttggggagttggttcctgagaggtctgagggccagagctgccctctacattaacatgctgtctctaagggtggcccctcctctcaggcgttcagatggtgcgaacagcagagcaggcaagggaaactggggagatggggatggaggaggaaggctgatatcctctggggagcacatcacctgaaggtgccaaggaggaaggctgagaggggggccaccccatttctggtacccaatttggttcttcagcccaacttgcaaggggttccttctggtcctcccatccactgccaccttccattttgtccatctcatgctggccttggtggatgggatggctgtatctagacaaaatttttctaaaactccatcaaggctcttattcaataccacgttccgagttggcctttcatcttctttgagactggccctgcctaacctctaccatcaatgagctcttggcccttctgcccttccctgtgtttctcactttccaacctaatccctggctcagggttattgccagtggagactggtgagctgggcctactctcagctgcctatcttctgcctttcacttgcatccaactcctggggctgggaccgtagtagctgcgggggggaagaaacacagggtcggtgagcccagcatgtgcgttggtttgagggggcgggcggtgtgtgtgtgttctggtgggagggatctgagcaagtgcaagcctggctgacacaggtgtgaagaggccatcctggaacccaggtgagggcaagatgaaggcttccaggcagaacagctgcagagagtttggctatatgcatctgcagccccaagagctcccactgcaagacaagtgttggggaagatgggaggttgtgggtgaggcctctaaaggtcctctcccaaactgaccaggctgatgtcaacctaaccccctcaggggcagggaacaggggagggctccacaagcgtgtctggcattcccacccaccatggaagactggatacgcacctggaaacaaaaggactatggaagctgttcaagatacatttgatcttcagaaaagcagaatttggttcaactgttgacagaggacacaaatacgttgttccagagctcagccttctcactctaaaagaaagatatttttctatttattttctacatctggccagtggctctggtgctagatgccactgtagccagatctccaacagtgccttggaccatggactcatactcaactgagtaagaaggggctggtgcccagtcggggtggctgagctggtccttaataggttgtttcttggtcttgctttcttcatgccctccccactgctcctgccacctttagataagtttctctagctaattttgtggccaatgtaaaattcgtcatcaacctaacaaacacaaccttctcagcagcatttctcccctgtgatggaaataaagtgtttagggcagtgggaggagaaaattctccaggtgaatggggaagggtctgttccagcctctccctactcccatcccatttccaccaactggggaactgtgactatctatctcccccgacttctaccagggatgccttcacgccaaggctgttctcaccagctgcctcagatgacaaatgaggctaatggacataatctacagtgtcctttttcacttgcaccttttttataagaatatattgtaatactaaaaaatattaaattcataccatccctaccc

SEQ ID NO: 288646 - DNA, 6220 bp, Artificial Sequence
  derived and/or modified sequence
aggaaaggggtccccggactctggggctctcagcacctgcggtcgcaaaccaacctcatgccctgactttaccaggcgtcgggactctgacttaaccggggaatgagggacttggtctggcggcagatcacaatgaggacctagggcatctgtctgctgacgccccctggcctgcagtgaccatggccccccgcaagaggagccaccatggcctgggcttcctgtgctgcttcgggggcagtgacatccccgaaatcaacctccgggacaaccaccctctgcagttcatggagttctccagccccatcccgaacgcagaggagctcaacatccgctttgcagagctggtggatgaattggatctcactgacaaaaaccgagaggctatgtttgcactgccccctgagaagaaatggcagatctactgcagcaagaagaaggagcaggaggaccccaacaagctggcaaccagctggcctgactattacatcgaccgcatcaattccatggctgcgatgcagagtctgtacgcgtttgatgaggaggagacggagatgaggaaccaagtcgtggaagacctgaagacagccctccggacacagcctatgaggtttgtgacccgcttcattgagctggagggcttgacctgtctgctaaatttcctccggagcatggaccacgccacctgtgagagccgcatccacacctcactcattggctgcatcaaagcattgatgaacaactcccaggggcgggcacatgtgctggcacagcctgaggccattagtaccatagcccagagcctacgcacagagaacagcaagaccaaggtggctgtgctggagatcctgggtgctgtgtgcctcgtgcctggtggccacaagaaggtgctgcaggccatgctgcactaccaggtgtatgcagcagagcgaacccgcttccagaccctgctgaacgagctagaccgaagtctgggccggtaccgggatgaagtgaatctgaaaacagccatcatgtccttcatcaatgctgtcctcaatgctggagctggagaggataatctggagttccgcctacatctacggtatgaattcctgatgctgggtatacagcctgtgattgacaagctccggcaacatgaaaatgccatcctggacaaacatttagacttcttcgagatggtgcggaatgaggatgacctggagctagccaggaggtttgacatggtccacatcgacaccaagagtgcttcccagatgtttgagttgatccacaagaagctgaagtacacggaggcctacccctgcctgctctctgtgctgcaccactgcctgcagatgccctacaaacggaacggtggctacttccagcagtggcagctcctggaccgcatcctccagcagattgtcctccaggatgagcggggtgtggaccctgacctggctcccttggagaacttcaatgtcaagaacatcgtcaacatgctcatcaacgagaatgaagtgaaacagtggcgagaccaggcagagaagttccggaaagaacacatggagcttgtgagccgtctggagaggaaggagcgggaatgcgagacaaagacattggagaaggaagagatgatgcggacgctgaacaaaatgaaggacaagctggcccgggagtcccaggagctgcgccaggctcggggacaagtggcagagctggtagcccagctcagtgaactctcaacaggccctgtatcttccccaccaccccctgggggcccactcaccttgtcttcctcaatgacaaccaatgacctgcctccaccccctcctcctctgccctttgcctgttgtccccctcccccaccaccaccccttcctcccgggggacccccgactcccccaggtgccccaccttgcctcggcatgggcctgcccctccctcaggacccctaccccagcagtgacgtcccactcaggaaaaagcgtgtcccccagccttctcacccactgaagtccttcaactgggtgaagctgaatgaggagcgtgtccctggcaccgtatggaatgagattgatgacatgcaggtatttcggatcctggacctagaggattttgaaaagatgttttcagcctaccagaggcaccagaaagagctgggctccactgaagacatctacctggcttcccgcaaggtcaaagagctgtcggtcattgatggccggagggcccaaaactgcatcatccttctttccaagttgaagctttctaacgaggagatccggcaggccatcttgaagatggatgagcaggaggaccttgctaaggacatgctggagcagctcctcaagttcatcccagagaagagtgacattgacctcctggaggagcacaagcatgaaattgagcggatggcccgtgctgaccgcttcctctatgaaatgagcaggattgaccactaccagcagcgactgcaagccctcttcttcaagaagaaattccaggagcggctggctgaggcaaagcccaaagtggaagccatcctgttggcctcccgggagctggtccgcagcaagcgtcttagacagatgctagaggtcatcctagccataggcaacttcatgaacaaagggcagcgtgggggcgcctacgggttccgggtggccagcctcaacaagatcgctgacaccaagtccagcatcgacagaaacatctctctgctccattacctgatcatgatcctggagaagcattttcctgatattctaaacatgccttcagagctgcaacatcttccagaagctgccaaagtcaacctagcagaactggagaaggaggtgggcaacctcaggaggggcctgagagcggtggaggtggagctggagtatcagaggcgccaggtacgggagcccagtgacaagtttgtccctgtcatgagcgacttcatcacggtgtccagcttcagcttctccgagctggaggaccagctaaatgaggccagggacaagttcgccaaggccttgatgcacttcggggagcatgacagcaagatgcagccagacgaattctttggcatctttgataccttcttgcaggccttctcagaggcccggcaggatctagaggccatgaggaggaggaaggaggaggaggagcggcgggcgcgcatggaagccatgctgaaggagcagagggaacgtgagcggtggcagcggcagcggaaggtcctggctgcaggcagctcgctggaggagggaggagagttcgatgacctggtgtcggccctgcgctctggggaggtcttcgacaaggacttatgcaagctcaagcgcagccgcaagcgatcagggagccaggccctggaagttacccgggagcgggcaataaaccggctaaattattgacctggggaactagccacacaggaggccgggagacagggactggtgagaatggggctgagtggaggaggtggtgatatttaaaccatttggtgcttggtttagagccttgggctgggtcctgggatggggggctgtgtgtggctggaccaggtgtctccccacgcttaccttaaggggctcctcttatctccccttcacatgattccttctgtgccctggccccaggtattattctgaggctgccttggatggcctcaggccaggtaaccccaggctgaaggggccctgctccccatcccctaccatgggcacccatgtgctggcacagaacagttccagatctagactggagaggtccacagccttgtccagagttcctgtgtagcacggggagcaatgatggagggagcccctgagagggaatctggtgagggaatccagactcccttctctcaaggggaggctcaacagaacattgacctgggggcaaactttcctcttgaatgggaacagaggaggcattatatattctagttagatcagctctggtaggttccagagaacagtcaatgttggaaggatgatgcagggaccaaagccatcaggacagagtagcagtgtctgtttcccatgtcacaagtcctctggcctctccctgcatgtcttaagtatctttcccttccttctctaccctcacctccatcctgtctactaatccacagtcctagaagactcaccttgggtttccacagctatggctcactaccaggtgcttgatgaatctggcgaggggctcaagacagacctcatgcatcaccacacctcatgccttttgggcatctcccatgtccccatctcctggacacctggccattgttgtgaagccagacagtgacctcaaatgttgccttggagtcccctacagcccctcagcagagggcagcacttgaatgcttagctccatcccatagttctctacttcatataaattgctcaggccctcccaccccttctctaacactagcttcaaggcagaagccacagcagcctctgtccagcctgcaggtggccacttggaaccatgtgtccactggcgttggggagttggttcctgagaggtctgagggccagagctgccctctacattaacatgctgtctctaagggtggcccctcctctcaggcgttcagatggtgcgaacagcagagcaggcaagggaaactggggagatggggatggaggaggaaggctgatatcctctggggagcacatcacctgaaggtgccaaggaggaaggctgagaggggggccaccccatttctggtacccaatttggttcttcagcccaacttgcaaggggttccttctggtcctcccatccactgccaccttccattttgtccatctcatgctggccttggtggatgggatggctgtatctagacaaaatttttctaaaactccatcaaggctcttattcaataccacgttccgagttggcctttcatcttctttgagactggccctgcctaacctctaccatcaatgagctcttggcccttctgcccttccctgtgtttctcactttccaacctaatccctggctcagggttattgccagtggagactggtgagctgggcctactctcagctgcctatcttctgcctttcacttgcatccaactcctggggctgggaccgtagtagctgcgggggggaagaaacacagggtcggtgagcccagcatgtgcgttggtttgagggggcgggcggtgtgtgtgtgttctggtgggagggatctgagcaagtgcaagcctggctgacacaggtgtgaagaggccatcctggaacccaggtgagggcaagatgaaggcttccaggcagaacagctgcagagagtttggctatatgcatctgcagccccaagagctcccactgcaagacaagtgttggggaagatgggaggttgtgggtgaggcctctaaaggtcctctcccaaactgaccaggctgatgtcaacctaaccccctcaggggcagggaacaggggagggctccacaagcgtgtctggcattcccacccaccatggaagactggatacgcacctggaaacaaaaggactatggaagctgttcaagatacatttgatcttcagaaaagcagaatttggttcaactgttgacagaggacacaaatacgttgttccagagctcagccttctcactctaaaagaaagatatttttctatttattttctacatctggccagtggctctggtgctagatgccactgtagccagatctccaacagtgccttggaccatggactcatactcaactgagtaagaaggggctggtgcccagtcggggtggctgagctggtccttaataggttgtttcttggtcttgctttcttcatgccctccccactgctcctgccacctttagataagtttctctagctaattttgtggccaatgtaaaattcgtcatcaacctaacaaacacaaccttctcagcagcatttctcccctgtgatggaaataaagtgtttagggcagtgggaggagaaaattctccaggtgaatggggaagggtctgttccagcctctccctactcccatcccatttccaccaactggggaactgtgactatctatctcccccgacttctaccagggatgccttcacgccaaggctgttctcaccagctgcctcagatgacaaatgaggctaatggacataatctacagtgtcctttttcacttgcaccttttttataagaatatattgtaatactaaaaaatattaaattcataccatccctaccc

SEQ ID NO: 288647 - DNA, 829 bp, Artificial Sequence
  derived and/or modified sequence
ctcgggtctcagcgatgccccctgtgtctcccacccctaggcctgcacagaggggactcagaggccgagataatttacttttgctttctttgccttttccagagcatagggggaaaccgtaatttaggcggctgctaagaatagctcccccaatcctggaaagagcgtgtgcttatttttgaaagtgctccttgtctctcccccagccctgcctgaggctcacagtacaagtcagtcaaattgttcagggcagcagtggtgtctggagacctggtttgagttcctaggttcatacctagcgtccttctgagcctcaagtttcttcgtctgtaaaaagagaagatgaaagtttgagataaacctcgaacatgatcacaatgaggacctagggcatctgtctgctgacgccccctggcctgcagtgaccatggccccccgcaagaggagccaccatggcctgggcttcctgtgctgcttcgggggcagtgacatccccgaaatcaacctccgggacaaccaccctctgcagttcatggagttctccagccccatcccgaacgcagaggagctcaacatccgctttgcagagctggtggatgaattggatctcactgacaaaaaccgagaggctatgtttgcactgccccctgagaagaaatggcagatctactgcagcaagaagaaggtgccctctctgacccctctggccacatctcagggttcatggcatggggtggctcttgctgccttggcatgctcatgcattcacctgatgtttattacatgccagccctgttctaggtgttggaggaacaacagtgaataaaat

SEQ ID NO: 288648 - DNA, 6221 bp, Artificial Sequence
  derived and/or modified sequence
aggaaaggggtccccggactctggggctctcagcacctgcggtcgcaaaccaacctcatgccctgactttaccaggcgtcgggactctgacttaaccggggaatgagggacttggtctggcggcagatcacaatgaggacctagggcatctgtctgctgacgccccctggcctgcagtgaccatggccccccgcaagaggagccaccatggcctgggcttcctgtgctgcttcgggggcagtgacatccccgaaatcaacctccgggacaaccaccctctgcagttcatggagttctccagccccatcccgaacgcagaggagctcaacatccgctttgcagagctggtggatgaattggatctcactgacaaaaaccgagaggctatgtttgcactgccccctgagaagaaatggcagatctactgcagcaagaagaaggagcaggaggaccccaacaagctggcaaccagctggcctgactattacatcgaccgcatcaattccatggctgcgatgcagagtctgtacgcgtttgatgaggaggagacggagatgaggaaccaagtcgtggaagacctgaagacagccctccggacacagcctatgaggtttgtgacccgcttcattgagctggagggcttgacctgtctgctaaatttcctccggagcatggaccacgccacctgtgagagccgcatccacacctcactcattggctgcatcaaagcattgatgaacaactcccaggggcgggcacatgtgctggcacagcctgaggccattagtaccatagcccagagcctacgcacagagaacagcaagaccaaggtggctgtgctggagatcctgggtgctgtgtgcctcgtgcctggtggccacaagaaggtgctgcaggccatgctgcactaccaggtgtatgcagcagagcgaacccgcttccagaccctgctgaacgagctagaccgaagtctgggccggtaccgggatgaagtgaatctgaaaacagccatcatgtccttcatcaatgctgtcctcaatgctggagctggagaggataatctggagttccgcctacatctacggtatgaattcctgatgctgggtatacagcctgtgattgacaagctccggcaacatgaaaatgccatcctggacaaacatttagacttcttcgagatggtgcggaatgaggatgacctggagctagccaggaggtttgacatggtccacatcgacaccaagagtgcttcccagatgtttgagttgatccacaagaagctgaagtacacggaggcctacccctgcctgctctctgtgctgcaccactgcctgcagatgccctacaaacggaacggtggctacttccagcagtggcagctcctggaccgcatcctccagcagattgtcctccaggatgagcggggtgtggaccctgacctggctcccttggagaacttcaatgtcaagaacatcgtcaacatgctcatcaacgagaatgaagtgaaacagtggcgagaccaggcagagaagttccggaaagaacacatggagcttgtgagccgtctggagaggaaggagcgggaatgcgagacaaagacattggagaaggaagagatgatgcggacgctgaacaaaatgaaggacaagctggcccgggagtcccaggagctgcgccaggctcggggacaagtggcagagctggtagcccagctcagtgaactctcaacaggccctgtatcttccccaccaccccctgggggcccactcaccttgtcttcctcaatgacaaccaatgacctgcctccaccccctcctcctctgccctttgcctgttgtccccctcccccaccaccaccccttcctcccgggggacccccgactcccccaggtgccccaccttgcctcggcatgggcctgcccctccctcaggacccctaccccagcagtgacgtcccactcaggaaaaagcgtgtcccccagccttctcacccactgaagtccttcaactgggtgaagctgaatgaggagcgtgtccctggcaccgtatggaatgagattgatgacatgcaggtatttcggatcctggacctagaggattttgaaaagatgttttcagcctaccagaggcaccagaaagagctgggctccactgaagacatctacctggcttcccgcaaggtcaaagagctgtcggtcattgatggccggagggcccaaaactgcatcatccttctttccaagttgaagctttctaacgaggagatccggcaggccatcttgaagatggatgagcaggaggaccttgctaaggacatgctggagcagctcctcaagttcatcccagagaagagtgacattgacctcctggaggagcacaagcatgaaattgagcggatggcccgtgctgaccgcttcctctatgaaatgagcaggattgaccactaccagcagcgactgcaagccctcttcttcaagaagaaattccaggagcggctggctgaggcaaagcccaaagtggaagccatcctgttggcctcccgggagctggtccgcagcaagcgtcttagacagatgctagaggtcatcctagccataggcaacttcatgaacaaagggcagcgtgggggcgcctacgggttccgggtggccagcctcaacaagatcgctgacaccaagtccagcatcgacagaaacatctctctgctccattacctgatcatgatcctggagaagcattttcctgatattctaaacatgccttcagagctgcaacatcttccagaagctgccaaagtcaacctagcagaactggagaaggaggtgggcaacctcaggaggggcctgagagcggtggaggtgctggagtatcagaggcgccaggtacgggagcccagtgacaagtttgtccctgtcatgagcgacttcatcacggtgtccagcttcagcttctccgagctggaggaccagctaaatgaggccagggacaagttcgccaaggccttgatgcacttcggggagcatgacagcaagatgcagccagacgaattctttggcatctttgataccttcttgcaggccttctcagaggcccggcaggatctagaggccatgaggaggaggaaggaggaggaggagcggcgggcgcgcatggaagccatgctgaaggagcagagggaacgtgagcggtggcagcggcagcggaaggtcctggctgcaggcagctcgctggaggagggaggagagttcgatgacctggtgtcggccctgcgctctggggaggtcttcgacaaggacttatgcaagctcaagcgcagccgcaagcgatcagggagccaggccctggaagttacccgggagcgggcaataaaccggctaaattattgacctggggaactagccacacaggaggccgggagacagggactggtgagaatggggctgagtggaggaggtggtgatatttaaaccatttggtgcttggtttagagccttgggctgggtcctgggatggggggctgtgtgtggctggaccaggtgtctccccacgcttaccttaaggggctcctcttatctccccttcacatgattccttctgtgccctggccccaggtattattctgaggctgccttggatggcctcaggccaggtaaccccaggctgaaggggccctgctccccatcccctaccatgggcacccatgtgctggcacagaacagttccagatctagactggagaggtccacagccttgtccagagttcctgtgtagcacggggagcaatgatggagggagcccctgagagggaatctggtgagggaatccagactcccttctctcaaggggaggctcaacagaacattgacctgggggcaaactttcctcttgaatgggaacagaggaggcattatatattctagttagatcagctctggtaggttccagagaacagtcaatgttggaaggatgatgcagggaccaaagccatcaggacagagtagcagtgtctgtttcccatgtcacaagtcctctggcctctccctgcatgtcttaagtatctttcccttccttctctaccctcacctccatcctgtctactaatccacagtcctagaagactcaccttgggtttccacagctatggctcactaccaggtgcttgatgaatctggcgaggggctcaagacagacctcatgcatcaccacacctcatgccttttgggcatctcccatgtccccatctcctggacacctggccattgttgtgaagccagacagtgacctcaaatgttgccttggagtcccctacagcccctcagcagagggcagcacttgaatgcttagctccatcccatagttctctacttcatataaattgctcaggccctcccaccccttctctaacactagcttcaaggcagaagccacagcagcctctgtccagcctgcaggtggccacttggaaccatgtgtccactggcgttggggagttggttcctgagaggtctgagggccagagctgccctctacattaacatgctgtctctaagggtggcccctcctctcaggcgttcagatggtgcgaacagcagagcaggcaagggaaactggggagatggggatggaggaggaaggctgatatcctctggggagcacatcacctgaaggtgccaaggaggaaggctgagaggggggccaccccatttctggtacccaatttggttcttcagcccaacttgcaaggggttccttctggtcctcccatccactgccaccttccattttgtccatctcatgctggccttggtggatgggatggctgtatctagacaaaatttttctaaaactccatcaaggctcttattcaataccacgttccgagttggcctttcatcttctttgagactggccctgcctaacctctaccatcaatgagctcttggcccttctgcccttccctgtgtttctcactttccaacctaatccctggctcagggttattgccagtggagactggtgagctgggcctactctcagctgcctatcttctgcctttcacttgcatccaactcctggggctgggaccgtagtagctgcgggggggaagaaacacagggtcggtgagcccagcatgtgcgttggtttgagggggcgggcggtgtgtgtgtgttctggtgggagggatctgagcaagtgcaagcctggctgacacaggtgtgaagaggccatcctggaacccaggtgagggcaagatgaaggcttccaggcagaacagctgcagagagtttggctatatgcatctgcagccccaagagctcccactgcaagacaagtgttggggaagatgggaggttgtgggtgaggcctctaaaggtcctctcccaaactgaccaggctgatgtcaacctaaccccctcaggggcagggaacaggggagggctccacaagcgtgtctggcattcccacccaccatggaagactggatacgcacctggaaacaaaaggactatggaagctgttcaagatacatttgatcttcagaaaagcagaatttggttcaactgttgacagaggacacaaatacgttgttccagagctcagccttctcactctaaaagaaagatatttttctatttattttctacatctggccagtggctctggtgctagatgccactgtagccagatctccaacagtgccttggaccatggactcatactcaactgagtaagaaggggctggtgcccagtcggggtggctgagctggtccttaataggttgtttcttggtcttgctttcttcatgccctccccactgctcctgccacctttagataagtttctctagctaattttgtggccaatgtaaaattcgtcatcaacctaacaaacacaaccttctcagcagcatttctcccctgtgatggaaataaagtgtttagggcagtgggaggagaaaattctccaggtgaatggggaagggtctgttccagcctctccctactcccatcccatttccaccaactggggaactgtgactatctatctcccccgacttctaccagggatgccttcacgccaaggctgttctcaccagctgcctcagatgacaaatgaggctaatggacataatctacagtgtcctttttcacttgcaccttttttataagaatatattgtaatactaaaaaatattaaattcataccatccctacccagtc

SEQ ID NO: 288649 - protein, 132 aa, Artificial Sequence
  derived and/or modified sequence
MAPRKRSHHGLGFLCCFGGSDIPEINLRDNHPLQFMEFSSPIPNAEELNIRFAELVDELDLTDKNREAMFALPPEKKWQIYCSKKKVPSLTPLATSQGSWHGVALAALACSCIHLMFITCQPCSRCWRNNSE

SEQ ID NO: 288650 - DNA, 2700 bp, Artificial Sequence
  derived and/or modified sequence
atgctgctgctgctgctgctggcccccctgttcctgcggccccccggtgcggggggagcccagactccgaatgctacgtcagagggttgccaaattatccatccgccttgggaaggaggtatacggtaccgaggattgacacgagatcaggtcaaggccatcaattttctccccgtagactacgaaatagaatacgtgtgtcgcggggaacgggaggtggtgggccccaaggttagaaagtgcttagccaatggctcgtggaccgatatggataccccctctagatgtgtcaatcgcaccccacattcagagagacgggctgtctatataggcgctttgttcccaatgtccggcggctggcccggaggccaagcctgccagcctgcagtagagatggctttagaagatgtaaactccagaagagacatattgcctgactacgaactaaagctcatccatcacgactctaagtgtgatccagggcaggccaccaagtacttgtatgaactgttgtataacgatccaatcaagatcattctgatgcctggctgttcctctgtatcaaccctggtcgcagaagcagcacgtatgtggaaccttatcgtcctctcttacggatcgagttccccagctcttagtaaccgacagcgcttcccaaccttttttcggacacacccgtcagccactcttcataaccctacacgggtgaaactatttgagaaatggggttggaaaaagatcgcaacaatccagcagactaccgaggtcttcactagcacgctcgatgacctcgaagaacgcgtgaaggaggccggcatagaaattacctttagacagtctttcttcagcgacccagcagtgccagtgaaaaatctgaagagacaggatgcaaggatcattgttggcctgttctatgagaccgaggcacgcaaagttttttgcgaggtttataaggagcgactcttcgggaagaaatacgtgtggttcttgataggctggtacgcggacaattggttcaagatttacgatccttctatcaactgtacagtggacgagatgactgaagcagtggaaggtcacatcacaactgagattgtgatgctgaaccctgccaatacccggagcatctccaatatgacgtcacaagaatttgtggagaaattgaccaaacgccttaaacgccaccccgaggagaccggcggctttcaggaagctcctctggcgtatgacgcgatctgggcccttgcacttgccctgaataaaacctccggaggcggaggtcgctctggtgtccggctggaagacttcaactacaacaaccagacgatcaccgatcagatctatcgcgctatgaactcgtcctcctttgaaggcgtgagcgggcacgtggtattcgacgcatccggaagtcgcatggcatggaccctgatagagcagctgcagggcggctcatacaagaaaatcggatattatgactccacaaaagatgatctgtcctggtccaaaaccgacaagtggatcggcggctccccacccgccgaccaaacactggtgatcaagacgtttaggtttctctcccaaaagctttttatttctgtcagcgttctctccagcctgggaatagttctcgccgtggtatgcctgtcttttaacatttacaacagtcacgttcgttatatccaaaactcacaacctaacctcaacaacctgacagccgtagggtgcagccttgcgcttgctgctgtgtttccgctcggactggacggctaccatatcgggcgcaaccagttcccattcgtctgccaggccagactgtggctcttaggactgggcttttctcttggttacggttccatgttcacaaaaatatggtgggtgcatacagtcttcaccaagaaagaggaaaagaaagagtggaggaagaccctggaaccctggaagctgtatgctacagtgggcctgctggttggcatggacgtgttgacattagctatctggcagatcgtagacccattacacagaaccatcgaaacattcgccaaggaagagccgaaagaagatattgatgtgtcaatcctgccacagctcgagcactgtagcagccggaagatgaacacgtggttagggatcttctatgggtataaaggactgcttttactgttgggaattttcctggcttacgagacaaagagcgtgtcgactgaaaaaattaacgaccacagggccgtgggcatggcaatctataatgtagcggtgttgtgcttaataacggctcccgtgacgatgattctttcgtctcagcaggatgccgcgttcgccttcgcaagcctcgctatcgtgttctcttcttatattacactggtggtcctctttgttccgaaaatgaggaggctcatcactcggggagaatggcaatctgaggctcaggataccatgaaaacgggctcaagtaccaataacaatgaagaggaaaaatcaagactgctggaaaaagagaacagagagctggaaaaaattatcgctgagaaggaggaaagagtgtcagaacttagacaccagttgcaatcacgccaacagctgcggtcacgcaggcatcctccaactccaccagagccatcggggggcctgccaaggggtccccctgagcccccagaccggctcagctgtgacggctctagagtgcacctactatataagtag

SEQ ID NO: 288651 - DNA, 2700 bp, Artificial Sequence
  derived and/or modified sequence
atgctgctgctgctcctgttggcccctctgttcctgagacctcctggcgctggcggagcccagacccccaacgccacttcagagggttgccagatcatccaccccccttgggaggggggaattagatacaggggcctgaccagggatcaggtaaaggccataaatttcttaccagtcgactatgaaattgaatacgtgtgccgtggagagagggaagttgtagggcctaaagtgaggaagtgcctggccaacggatcttggactgatatggacaccccaagccgctgcgttaatcggacaccacatagcgagaggcgcgcagtgtacatcggcgcactgtttcctatgtctggaggatggcccggaggtcaggcttgccagccagcagttgagatggcactggaggacgtgaattctaggcgcgatatcctgcccgactacgagctgaaattaattcaccacgactcaaaatgtgaccctggccaggccacaaaatatttgtatgagcttctgtataatgacccaatcaaaatcatactcatgcctgggtgtagcagtgtcagtacgctcgttgccgaagcagccagaatgtggaacttaatcgttttatcatatggcagcagttcccctgctctgtctaaccggcagcggtttcctaccttttttcggactcacccctctgccacactccataaccctactagagttaaattgtttgagaagtgggggtggaagaagatcgcaacaattcagcagaccaccgaggtgttcacaagcacacttgacgatctggaggagagggtcaaggaagcaggaatcgagatcaccttccgacagagcttcttttcggaccctgccgttcctgtcaaaaacctcaagcgccaagacgccaggatcatcgtgggacttttttatgaaacagaggcgagaaaagtgttttgcgaagtctacaaggagaggttgttcggcaagaaatatgtgtggttcttaatcgggtggtacgccgataactggttcaagatctatgatccatcgatcaactgcactgttgacgagatgacggaggccgttgaaggccacataactaccgagattgtgatgctcaacccggctaataccaggtcgatctcaaatatgacgagtcaggaattcgtagagaagctgacgaagagactcaagaggcaccctgaagagactggaggctttcaggaggccccactcgcttatgacgcaatctgggccctggcactggccctgaataaaactagcggaggcggtggcaggagcggggtcagattagaagatttcaactataacaatcagaccataaccgatcaaatttacagggcaatgaattcgagcagcttcgaaggcgtctcaggtcatgttgtgtttgacgcatctgggtcaagaatggcatggacacttattgaacagctgcagggcggttcatataagaaaatcggttattatgacagcaccaaagatgatttgtcttggtctaaaacagacaaatggattggaggctccccacctgccgatcaaaccctggtaatcaagacttttcgttttctgagtcaaaagttgtttattagtgtcagcgtcctcagctcactaggcattgtgttggcagtggtgtgtttgagttttaatatctataactcacacgtccgctacatccagaatagccagccaaatctgaataacttgactgccgtggggtgctcactcgcccttgcggctgtattccctctcgggctcgatggctaccacattggtcgaaaccagttcccttttgtgtgccaagctcgtctctggttgttaggcctgggtttcagtttaggttatgggagtatgttcacaaagatctggtgggttcataccgtgttcacaaagaaagaagaaaagaaggaatggaggaagaccctcgagccctggaaactttacgccaccgttggcctactcgtcggcatggacgtgttgacccttgctatctggcagatcgttgaccctctccaccgcaccattgaaactttcgcaaaggaggagcctaaggaagacatcgacgtttccatcctgccccagctggagcattgttctagccggaaaatgaacacctggctgggaattttttatggatacaagggcctgctgctcctgctaggtattttcttagcatacgagaccaaatcagtcagtaccgaaaaaatcaacgaccatagggccgtgggaatggcgatttacaatgtggctgtcctgtgtctcatcactgctcctgtgaccatgattcttagttcacagcaggacgcggcatttgccttcgcaagcctcgctatcgtcttcagcagctatataactttggtcgtactcttcgtcccaaagatgcgacgccttataaccagaggggaatggcagtccgaagcacaggacacgatgaagaccggctcatcaacaaataacaacgaggaagaaaagtctagattactagaaaaagagaacagggagttggagaagatcatcgcagagaaggaagaaagggtgagtgaactgaggcaccaactgcagagccggcagcagttacggtccaggcggcacccaccaacgcctcctgaaccgagtggcggacttccccgaggccctccagaacctccagatcggttgtcctgtgatgggagccgggtgcatctcctgtataaatag

SEQ ID NO: 288652 - DNA, 2700 bp, Artificial Sequence
  derived and/or modified sequence
atgctgttgctgctgctactggccccactgttcttgcgcccacccggagccggaggggcacaaacaccaaacgccacttcagaaggctgccagatcatccatcccccatgggaaggtggaattcgctatcgaggtctcacgagagaccaggtcaaggcaattaactttctcccagtggattacgaaatagaatacgtttgcagaggggaaagagaggtcgtaggaccaaaagtcagaaagtgcttagctaacgggagctggactgacatggacactcctagccggtgtgtgaacagaaccccacatagcgaaagaagggctgtgtacatcggcgcactgtttcctatgagtggcggttggccgggtggccaggcttgtcagcctgctgtggagatggctttagaagatgtcaatagtcgtcgcgacatactgcctgattatgagctgaaattaattcatcatgacagcaaatgcgaccctgggcaggccaccaagtatctatacgagttactctataacgatccgatcaagatcattctgatgcccggatgctcctccgtcagcaccctcgtggcggaagccgctcgaatgtggaacctgatcgtgctgtcgtacggaagctctagtcctgcgttgtccaaccgacagcgattccctaccttctttcgcacgcacccttccgccaccctgcacaatcctacccgagtgaagctttttgagaaatggggatggaagaagatcgcaaccatccagcagacaacggaggtgtttaccagcaccctggacgacctggaagagagggtgaaagaggcaggcatcgaaattacattcaggcagagcttttttagtgatcccgcagtgccagtgaagaacctcaagagacaggatgcacgcataatcgtgggcctgttttacgaaacagaggcccgtaaggtcttctgtgaagtgtataaagagagactgttcggaaaaaagtatgtgtggtttcttataggctggtacgcggacaactggttcaagatttatgatccctcgatcaattgtaccgtcgacgagatgacggaggcggtcgagggccacattacaacggaaatcgttatgctcaacccagccaacacacggtcaatatctaacatgaccagccaggaatttgtggagaagttgaccaaaagactgaaaagacacccggaagaaaccggtggattccaagaagctcctttggcatatgacgctatttgggctctggctctagccctgaacaaaacttccgggggtggcggacggtctggggtgcggctcgaggattttaattacaataaccagactatcaccgaccaaatctatcgtgccatgaacagctccagcttcgagggcgttagcggccatgttgtatttgatgcgtccggaagcagaatggcatggaccctgatagaacaacttcagggcggttcctataagaagatcggctattacgactctaccaaggatgatctgtcttggagtaagactgacaaatggatcggcggatctcctccggcagaccagacgctcgtgataaaaaccttccggtttctcagtcaaaagctctttatttctgtgtctgtgttgtcaagccttggcatagtgttggccgtggtttgcctgagctttaacatatacaactcacatgtgaggtatatccagaatagtcagcccaacctgaacaatctcacagccgtgggatgcagcttggccctggccgcagtgttccctctgggcctggatggttaccacattgggcgtaatcagttcccttttgtgtgccaggccagactgtggctgctcggactcgggttcagcctgggatacggaagcatgtttacaaagatttggtgggtgcatacagtctttacaaaaaaagaggagaaaaaagagtggcggaagacattagaaccatggaaactgtacgccactgtgggtctgctcgttggaatggatgttctgacactggctatctggcaaatcgtggaccccttacataggaccatcgagacatttgcaaaggaggaacccaaggaggacattgatgtatcaatcctgcctcagttagaacactgtagcagcaggaaaatgaatacctggcttgggatcttttacggctataagggcctgctgctattactaggcattttcctcgcctatgagacgaaaagcgtttccacagagaaaatcaacgaccaccgggctgtgggcatggccatctacaacgtggcggtgttgtgtctgatcaccgctcccgtcacaatgattctaagcagccagcaggacgctgcattcgccttcgcctcgctcgctattgtcttctcctcctacataacacttgtcgtgctgttcgtgccaaagatgagacgactcattacacggggagaatggcagagtgaggcccaagatactatgaaaaccggatctagcaccaacaataatgaagaggaaaaaagcaggctgctggaaaaagagaatcgcgagctggaaaagattatcgctgaaaaggaagaacgcgtgtccgaactgcgtcaccaattgcagtcccggcagcagttgcgatctagacggcatccccctactccacctgaaccttcggggggactgccgcgtggaccgccagaaccacctgatagactgagttgcgatggcagcagagtccacttattgtataagtag

SEQ ID NO: 288653 - DNA, 2700 bp, Artificial Sequence
  derived and/or modified sequence
atgttactgttactccttctggcaccattgtttctaaggccacccggagccggaggagctcagacgcctaacgccacctctgagggatgccaaatcattcacccaccctgggaaggcggtatcaggtaccggggacttacccgggaccaagtcaaggccatcaattttttgcctgtcgactatgaaatcgagtatgtatgtcgaggagagagagaggtcgtcggcccaaaagtgagaaagtgtctcgctaatgggtcttggacagatatggacactcccagccgctgtgtgaaccgcacccctcattctgaacgacgtgctgtatatattggggctctcttccccatgtctggtggctggcctggcggacaagcctgtcaacctgctgtcgagatggccctggaagatgttaacagtaggagggatatcctgcccgattacgaacttaagctgatccaccacgattccaagtgcgaccctgggcaggcgactaagtatttatacgaattgctctataacgatccaatcaagataatcctgatgccgggatgcagttctgttagcaccttagtggccgaagcagcacgcatgtggaacctgatcgtgttatcctatggatcctcatctcctgcactctccaatcggcagagatttcccacctttttcagaacccatcctagtgcaaccttgcacaatcccacccgtgtgaaactgtttgagaagtgggggtggaagaaaatcgccaccatccagcagaccacggaagtcttcacctctacactggatgatctggaagagagggtgaaggaggctgggattgaaatcacattccgacagtcttttttctctgatccagccgtgcccgtgaagaatctgaagcggcaggatgccaggatcatcgttgggctgttctacgaaacagaggccaggaaggtgttttgcgaggtgtacaaagaacgcttattcggcaaaaagtacgtttggttcctgattgggtggtacgccgataattggttcaaaatctacgatcccagtattaactgtacagtagacgaaatgaccgaggcggttgagggacacattaccactgaaattgtcatgctcaatcccgcaaacactagaagtatctccaacatgacttctcaggagttcgtggagaagcttacgaagcggctgaagcgccacccagaggagaccggtggttttcaagaggcacctttagcctacgatgcaatttgggcgttagctttggccttgaataagaccagcgggggtggaggtagaagcggggtacgcctggaggactttaactataataatcagaccattaccgaccagatatacagagctatgaattcgtctagcttcgagggagtatccggtcatgtggtttttgatgcaagcgggtccagaatggcctggactctcatagagcagctgcagggaggatcttacaagaagatcggctattacgattcaaccaaggatgacttgagctggagtaagacggacaaatggataggcggatctcctccagcggaccaaaccctggtgatcaagacctttcggttcctgagccagaaactgtttattagtgtttccgtgttgtcctccctcgggatcgtgctggctgtcgtgtgtctgtcctttaacatttataacagtcacgtgaggtacattcaaaactctcaacccaatctcaacaatctaaccgcagtggggtgttcgctcgcacttgccgctgtgttcccattaggtctggacggctaccatataggtagaaaccagttcccattcgtctgccaagcccgactgtggctgctgggcctgggtttttctttgggctacggctccatgttcacaaagatatggtgggtccataccgtgtttaccaagaaagaagaaaaaaaagaatggagaaaaactctggagccttggaagctgtacgccactgtggggctgctggtgggaatggatgtcctgactttggcaatctggcagatagttgacccccttcaccgaaccatagagacatttgcaaaagaagagcccaaagaggatattgatgtgtctatcttaccccagctcgagcattgtagctctagaaaaatgaatacctggctcggcatattctatggatataaagggctgcttcttttactcggcattttcctggcgtacgaaacgaagtcggtgagcacggaaaagattaatgatcaccgcgctgtcgggatggccatctataatgttgctgttttgtgcctaatcaccgctcccgtgaccatgatcctgtcatcccagcaagacgccgctttcgcctttgcctctcttgccattgtgttcagcagttacattaccctcgtcgtgctatttgtgccaaaaatgaggaggttaatcactcggggagagtggcagagcgaggcccaggatacaatgaagactgggtctagcacaaacaataatgaggaggagaagagcagactgctagagaaagagaaccgagagctggagaaaatcatagctgaaaaggaagagcgggtgtcggagctccggcatcagctacagtcacgtcagcagctgcggagccggaggcaccctccaactccaccagaaccctctggcggattgcccagaggaccacccgagccgcctgacaggctatcttgcgacggaagccgagttcatctgctgtacaaatag

SEQ ID NO: 288654 - DNA, 2700 bp, Artificial Sequence
  derived and/or modified sequence
atgctgttgctgcttctcctcgctcccctgttccttagaccaccaggggctggtggggctcagacacctaatgccacctctgaaggctgccaaattatccatccaccctgggagggtggcatccggtaccggggactcacacgggatcaggtgaaagccatcaactttctgccagtagactacgagattgagtatgtgtgcagaggagaaagagaagtggtgggccctaaagtccgaaagtgccttgcaaatggctcctggacagatatggataccccctcccgctgcgtgaataggacccctcatagcgaacgcagagctgtctatatcggggctctctttcctatgagcggtggctggcccggaggacaggcgtgccagcctgcagtagaaatggccctagaggacgtcaattcacgcagagacattctgcccgattacgagctgaagctcatccaccacgactctaaatgtgacccagggcaggcaacgaagtatttatacgagctgctctataatgaccccattaagattattcttatgcccggatgctcctcggtatctacactggtcgccgaggccgctagaatgtggaacctgattgtgctttcttacgggagctcctctccggcactctctaatcggcagcgttttccaactttctttaggacgcaccccagcgccaccctccataatccaacacgcgtcaagctctttgagaaatgggggtggaagaagatagctacaattcagcaaaccacagaggtgttcacaagcactctggatgacctggaggaacgcgtgaaggaggcaggcattgagatcacctttagacagagttttttttctgacccagcagtgccggtgaagaacctcaagcgccaggatgcacggatcatcgtgggactcttctacgaaactgaggcacgcaaagtattctgcgaagtttacaaagagcggctgttcggcaaaaaatacgtttggtttctgatcggctggtatgctgacaattggtttaaaatctacgatccgtccatcaactgtacagtggatgaaatgaccgaagccgtggaagggcacattacgaccgagatagtgatgctgaacccagcaaacaccagatctatctcaaacatgaccagccaagagttcgtggaaaaactgaccaagcggctgaagaggcatcccgaggaaaccggtgggttccaggaggcacctctggcttacgacgccatctgggcactggcactggctttgaacaagaccagcggtggcggtggaaggagcggtgtcaggcttgaagactttaattataataaccagactattaccgatcagatttatcgcgcaatgaactccagctcttttgaaggcgtcagcggccatgtggtatttgatgcttccggatcgcgcatggcatggactctaattgagcagcttcaggggggaagctataaaaagattggatactacgactccaccaaagacgacctgagttggagcaagacggataagtggatcgggggaagtccccctgcggatcaaacattagtgataaagacgtttagattcctgtcgcaaaagctgtttattagcgtatcagtcctgtcctcattgggaatcgttctggcggtagtctgcctatcctttaatatctacaacagccacgtccggtacattcagaacagccagcccaatctgaataaccttacggccgtgggatgtagtctagcactagcggcagtctttcccctcggcttggatggataccacattggtagaaaccaatttccttttgtgtgccaggcccgtctttggctcttgggattagggttttccctcgggtatggcagtatgtttaccaaaatttggtgggtccatactgtgtttactaagaaggaagaaaagaaagagtggcggaagaccttagagccctggaagctctacgccacggtcggtctgctagtgggtatggatgtgctaactctggccatatggcagatcgtggatcctcttcataggacaatcgaaacattcgctaaggaagagcctaaggaagatattgacgtttctattcttcctcagcttgagcattgctccagtaggaaaatgaacacgtggcttggcatcttctatggctacaagggcctgctcctcctcttggggatcttccttgcatacgagacgaaatccgtatccaccgagaagattaatgaccatcgggctgtgggtatggctatctataacgtggccgtcttatgtctgataacagcacctgtgacaatgatcctcagctcacagcaggacgcagcttttgccttcgcaagccttgctatcgtgtttagtagttacattaccctcgtggtcctgtttgtgccaaagatgcggcgactgatcacacggggagagtggcagtcagaggcccaggacacaatgaagacaggaagttccacgaacaacaacgaggaagaaaaatcacgattattggagaaggaaaatcgcgaactcgagaagattatagctgaaaaggaggagcgtgtgtccgaactacgtcaccagctccagtcgcgtcaacagctgcggtctcgcagacatcccccaaccccgcctgagcctagtggcggactgccccgagggcctccggagccaccggaccgccttagttgcgatgggtctcgcgtgcatctgctgtacaagtag

SEQ ID NO: 288655 - DNA, 2700 bp, Artificial Sequence
  derived and/or modified sequence
atgcttttgcttttactgcttgcccctctatttttaaggcctcccggagcagggggtgcacagacgcctaacgccacttcggagggttgtcaaatcattcaccccccatgggagggcggaattcgctacaggggacttacaagagatcaggtcaaagccattaacttcctgccagtggactatgaaattgagtacgtgtgtaggggtgagagagaagttgtgggacctaaagtacgcaaatgtctcgccaacggatcctggaccgacatggacaccccatctagatgcgtgaacaggacccctcactccgagcgcagggctgtgtacatcggagccctattcccgatgtctggcggttggcctggaggccaagcttgtcagccggctgtcgaaatggccctggaagatgtgaacagcaggcgcgatatcctcccagattacgagctgaaactgattcaccatgattcaaaatgtgatccaggtcaggctacaaaatatctgtatgagctgctctacaatgaccccatcaagatcattttaatgcctggctgttcttccgtctctaccttggtggcagaagccgctagaatgtggaatctgatcgtactgtcatacggctcatcatctcccgctctgtctaaccgccaaaggttccctactttttttcgcacacacccgtctgccaccctgcataatcccacacgagttaaactgttcgagaaatggggctggaagaagattgccacaatccagcagactaccgaagtctttactagcacactggatgacttagaagagagagtgaaggaggcaggaatcgaaatcaccttccgtcagagctttttttccgaccctgccgtacctgtaaaaaatctgaaacggcaagacgcccgaattattgttggattattctacgaaacagaagcacggaaagtcttctgcgaggtctataaggaacgcctattcggcaagaagtacgtgtggttcctgattggttggtacgctgataattggttcaaaatttatgacccttcgatcaactgcacagtcgatgagatgaccgaagccgtcgagggtcatatcactacagaaatagtaatgctgaaccccgcaaatactcggtcgatctcgaacatgaccagccaggagtttgtggagaagctgactaagcggctgaaacggcaccctgaggaaaccggaggattccaggaggctcctctcgcctacgacgctatttgggcactcgcgctcgcgctgaataaaacttctggagggggtggtcggtcaggcgtccggctagaagactttaattataacaaccaaacgattactgaccagatatacagggctatgaactcaagtagcttcgagggggtcagcggacatgtcgtgtttgacgccagtgggtcccgaatggcctggacactgatagagcagctgcagggtgggagctacaaaaaaataggatattacgatagcaccaaagatgacctctcctggagtaagaccgacaagtggatcgggggttctcctcccgcagaccaaacactggtcatcaaaaccttcaggttcctttcacagaagttatttataagcgtgtctgtgctttcctccctcggaattgtactcgccgtcgtatgtctttctttcaacatatataacagtcacgtgcgatatattcaaaactcccaacccaatctgaataacctgacagccgtgggatgtagtttggccctcgcagccgtgtttccgttgggactggatgggtatcacatcggtcgcaatcaatttccattcgtctgccaggccaggctctggctccttgggcttggcttttcacttggatatggcagcatgtttaccaaaatttggtgggtacacactgtgtttaccaagaaggaagaaaaaaaggaatggcgaaagacgctggaaccttggaaactctacgctacagtaggcttgctggtcggtatggatgtgttgactctggcgatttggcaaatcgtggacccactgcaccgcactattgagacatttgccaaagaggagcctaaagaggatatcgacgtttccattctacctcagctcgaacactgctcttctagaaaaatgaatacttggctggggatcttttatgggtataaaggcctgttgctgctcctggggattttcctggcttacgagacgaagtctgtaagcacagaaaagattaatgaccatcgggctgttgggatggccatttataacgtggccgtgctctgtctgatcaccgctccagttaccatgatcttatccagtcaacaggacgcggctttcgcctttgcctcacttgccatcgtcttctcatcatacataacactggtggtgttatttgtgcctaagatgaggaggctaatcacacgcggtgaatggcaaagcgaggctcaggacaccatgaaaacaggatcaagcactaacaataacgaggaggaaaaaagcaggctgcttgagaaggagaacagggagttagagaagatcattgcggagaaagaggagagagtcagcgaacttcgacatcaactgcagtctcgacagcagctgaggagccgacggcatccccctaccccacccgaaccgtcagggggattaccaaggggtccccctgaaccccctgaccggctttcttgtgatggctcacgtgtgcacttgctgtacaagtag

SEQ ID NO: 288656 - DNA, 2700 bp, Artificial Sequence
  derived and/or modified sequence
atgctcctgcttctcctactggccccattgttcctgcgcccacccggtgcaggcggagctcagaccccaaacgcgacatccgagggctgccagattatacaccccccatgggaaggcggaattcggtacaggggcctcactcgggatcaggtgaaagcaatcaatttcttgccagtggactatgaaattgagtacgtgtgccgcggagagcgagaggtggtgggcccaaaagtgcggaaatgcctggccaacgggtcatggaccgatatggacaccccaagcaggtgcgtaaataggaccccccattcagagagacgcgctgtgtacatcggcgcactcttccccatgagcgggggatggcccggaggacaggcctgccaacccgctgtagaaatggctttagaagatgttaactcccgcagagatattctgcctgattatgagctcaagctgattcatcacgacagtaaatgtgatccaggccaggccactaagtatttatacgagcttctgtacaatgatccaatcaagattatcctcatgcccggttgcagtagtgtcagtactctggtggcggaggccgcaagaatgtggaacctgattgtcctttcttacggctcaagtagtcccgctctctctaaccggcagagattccccacattctttagaacccatccttccgccactctgcacaatccaaccagagtgaaactatttgagaagtgggggtggaagaaaattgcaacaattcagcagactacagaggtctttaccagtactctcgacgacttggaggaacgagtcaaagaggccggtatcgaaataacattccggcaatccttcttcagtgatcctgctgtccccgttaagaatctcaagaggcaggatgctcggattatcgtcggacttttctacgaaactgaagcgcgtaaggtgttctgcgaggtgtataaagaacggctgttcggcaagaagtacgtttggtttctgatcggttggtatgcggataactggttcaaaatctatgaccctagcattaattgcaccgtggatgagatgacagaagcagtggagggacacatcacaacggaaatcgtcatgctgaaccccgctaataccaggagtattagcaacatgactagccaggaattcgtcgagaagctcacaaagcgtctcaagcggcatcccgaagaaacggggggattccaggaggcacccctggcttacgacgccatttgggcgctggcgctggccctgaacaaaaccagtggaggcggaggcaggagtggtgtacgcctggaggattttaactataacaatcagaccattactgatcagatttacagggccatgaactcatcttcttttgaaggtgtgagtggacacgtcgtgttcgatgccagcggttcgcggatggcctggaccctcatcgagcaactgcagggtgggtcctacaaaaagattggctattacgactccaccaaggatgacctcagttggagcaagacagataaatggataggcggaagtcctcccgcagaccagacactggtgattaaaaccttcagattccttagccagaagctttttatctccgtgagtgtgctgagcagcctcggcattgttctggctgttgtttgtctctcctttaacatatacaacagccacgttagatatattcaaaactcacaacccaatctgaacaacttgacggcggtaggctgctccctcgcactggccgctgtctttcccctgggcctagatggctaccatattggacgcaatcagtttcctttcgtgtgccaggcacgtctgtggctgctaggccttgggttcagtctgggttatggttccatgttcactaagatttggtgggttcacacggtgtttactaaaaaagaagagaagaaagagtggcgaaagaccctggaaccctggaagctatacgccacagtgggtcttctggtagggatggatgtgctgactctggctatttggcagatcgtggacccgcttcacaggaccatcgagacgtttgcaaaagaagagccaaaagaggacattgatgtgagtattctgcctcaactggaacattgttcatcacgcaaaatgaacacatggctgggcatattttacggatataaggggctgctgctgctgttgggaatcttcctggcttatgagacaaagtccgtctctaccgaaaaaatcaatgatcaccgcgctgtggggatggccatttacaacgtggctgtgctgtgtctaattactgcacccgtaacaatgattctctcttctcagcaagatgctgcattcgcttttgcctcgctggcgatcgtgttctcatcttacattaccctggtggtgctgtttgtgccaaagatgaggcgcctcataacccgaggggagtggcagagcgaggcacaggacacaatgaagacgggctcaagcaccaacaataatgaagaggagaagtcgagactcctggagaaggaaaacagggagctagaaaagatcatcgcagaaaaagaagaacgtgtctctgagctacggcaccaactgcagtctcgacagcagttacgctctaggagacacccgcctactccacctgagccctccgggggtctaccgaggggaccgccagagcctcccgaccgactgtcctgtgacggatctcgcgtccacctgctctacaagtag

SEQ ID NO: 288657 - DNA, 2700 bp, Artificial Sequence
  derived and/or modified sequence
atgctgcttctgctgctgctcgcccctttgtttctgagacctcccggtgccggaggagcacagactcccaacgccactagcgaggggtgccagattatccacccgccatgggaagggggtatccgatatcgcggactgacccgcgatcaggtgaaagccatcaattttctcccggtggactatgagatcgaatatgtgtgccgcggtgagagagaggtggtcggccctaaagttcgaaagtgccttgccaatggttcttggaccgacatggacaccccaagcaggtgcgtaaaccgcacccctcacagtgaacgaagagcggtgtacatcggggcacttttcccaatgagtgggggatggccaggaggtcaggcctgccaacctgccgttgagatggccctcgaagatgtgaacagccgacgtgacattctaccggattatgaacttaagttgatccaccatgactcaaaatgcgacccagggcaggctacaaagtacctgtacgagctgctgtacaacgatccaatcaagattatcctgatgccgggatgttcgagtgtgtcaaccctggtggcagaagcggcaagaatgtggaacttgattgtgttgtcatacggatcaagtagtcccgctttatcaaatagacagcgcttcccaacttttttccggacccacccttcagctacactgcataatcctactagggtgaagctgttcgagaagtggggttggaaaaagatcgccactatccaacaaactacagaggttttcactagcaccctggacgatctggaggagagggtcaaggaggctggtatcgagattacatttaggcagagtttcttttccgatccagctgtacccgttaagaatctgaaaagacaggacgcccgaattattgtcggccttttttatgagactgaagctaggaaggtattctgtgaggtgtacaaagaaaggctctttggcaaaaaatacgtctggtttctgatcgggtggtacgcggacaattggtttaagatttacgacccatccatcaattgcaccgttgacgaaatgacagaggcagtggagggccacatcacaacagaaatagttatgctcaatcctgccaacacaaggtccatttccaacatgacctcccaggagttcgtcgaaaaattgaccaaaagactcaaaagacatcctgaggaaactggagggtttcaggaagctccgctggcctatgacgccatttgggcattggcgctggctctgaacaaaacctcaggtggtgggggacggtccggggtaagactagaggatttcaattacaataatcagaccatcaccgatcagatttatagagcgatgaattcctcctcctttgagggggtttcaggccacgtcgtctttgacgccagtggttctcgtatggcatggacactgatcgaacagctgcaaggcggaagctataagaaaatcggttactacgactccacgaaggatgatttgagttggtcaaaaactgacaagtggattgggggatctccccctgccgatcagactctcgtcattaagactttcaggttcctttcgcagaaattgttcatcagtgtttcagtgttgagctcacttggaatcgtactggctgtggtgtgtttgtcattcaatatttacaattcacacgtgcggtatattcagaactcccagcctaatcttaacaacttgacagccgtaggttgcagcctggcactggcagccgtgttcccactgggactcgatgggtatcatattgggcgaaaccagttcccattcgtgtgccaggcaaggctctggctgctcggcctgggatttagcctggggtacggatcaatgtttacgaaaatttggtgggtacatacagtcttcacgaagaaggaagaaaagaaggaatggaggaagactctcgaaccctggaaactgtatgcgactgttggacttctggttggtatggacgtgctgactctggctatctggcagattgtggatccactccaccgcacaatagagactttcgccaaagaggaacctaaggaggacatcgacgtctcgatccttcctcagctcgaacactgcagttcccgaaagatgaatacgtggctcggcatcttctacgggtataagggtttgctgctgctactggggatctttcttgcctacgagaccaaaagcgtatctaccgagaagataaatgatcaccgggctgtgggcatggccatttataatgtagcagtgttgtgcttaattacagctccggtgaccatgatcctgtccagccagcaagatgctgcctttgccttcgcatccctcgcgatcgtgttctcatcttatataaccctcgtggtgctgtttgttcctaaaatgcgcagactgattactaggggcgagtggcagagcgaggctcaggacacgatgaaaacgggcagcagtacgaacaacaatgaagaggagaagtccaggctgctggaaaaggaaaacagagagctagagaaaattatagcagagaaagaggagcgcgtctctgaactgaggcatcagctacagagcaggcaacagctcagaagtcgacggcatccacctactccccctgagcctagtggaggactccccaggggcccacccgaacccccagacaggctgagctgtgatgggtcacgggtgcacctcctgtacaagtag

SEQ ID NO: 288658 - DNA, 4298 bp, Artificial Sequence
  derived and/or modified sequence
gcccgggagctctccctggtccccggcgccgcctccttccctcccggctccccgctccccgctcccgtggctgccgccgccccggggaagaagagacaggggtggggtttgggggaagcgagagaggaggggagagaccctggccaggctggagcctggattcgaggggaggagggacgggaggaggagaaaggtggaggagaagggaggggggagcggggaggagcggccggcctggggccttgaggcccggggagagccggggagccgggcccgcgcgccgagatgttgctgctgctgctactggcgccactcttcctccgccccccgggcgcgggcggggcgcagacccccaacgccacctcagaaggttgccagatcatacacccgccctgggaagggggcatcaggtaccggggcctgactcgggaccaggtgaaggctatcaacttcctgccagtggactatgagattgagtatgtgtgccggggggagcgcgaggtggtggggcccaaggtccgcaagtgcctggccaacggctcctggacagatatggacacacccagccgctgtgtgaatcgaacgccacactcagaacggcgcgcagtgtacatcggggcactgtttcccatgagcgggggctggccagggggccaggcctgccagcccgcggtggagatggcgctggaggacgtgaatagccgcagggacatcctgccggactatgagctcaagctcatccaccacgacagcaagtgtgatccaggccaagccaccaagtacctatatgagctgctctacaacgaccctatcaagatcatccttatgcctggctgcagctctgtctccacgctggtggctgaggctgctaggatgtggaacctcattgtgctttcctatggctccagctcaccagccctgtcaaaccggcagcgtttccccactttcttccgaacgcacccatcagccacactccacaaccctacccgcgtgaaactctttgaaaagtggggctggaagaagattgctaccatccagcagaccactgaggtcttcacttcgactctggacgacctggaggaacgagtgaaggaggctggaattgagattactttccgccagagtttcttctcagatccagctgtgcccgtcaaaaacctgaagcgccaggatgcccgaatcatcgtgggacttttctatgagactgaagcccggaaagttttttgtgaggtgtacaaggagcgtctctttgggaagaagtacgtctggttcctcattgggtggtatgctgacaattggttcaagatctacgacccttctatcaactgcacagtggatgagatgactgaggcggtggagggccacatcacaactgagattgtcatgctgaatcctgccaatacccgcagcatttccaacatgacatcccaggaatttgtggagaaactaaccaagcgactgaaaagacaccctgaggagacaggaggcttccaggaggcaccgctggcctatgatgccatctgggccttggcactggccctgaacaagacatctggaggaggcggccgttctggtgtgcgcctggaggacttcaactacaacaaccagaccattaccgaccaaatctaccgggcaatgaactcttcgtcctttgagggtgtctctggccatgtggtgtttgatgccagcggctctcggatggcatggacgcttatcgagcagcttcagggtggcagctacaagaagattggctactatgacagcaccaaggatgatctttcctggtccaaaacagataaatggattggagggtcccccccagctgaccagaccctggtcatcaagacattccgcttcctgtcacagaaactctttatctccgtctcagttctctccagcctgggcattgtcctagctgttgtctgtctgtcctttaacatctacaactcacatgtccgttatatccagaactcacagcccaacctgaacaacctgactgctgtgggctgctcactggctttagctgctgtcttccccctggggctcgatggttaccacattgggaggaaccagttccctttcgtctgccaggcccgcctctggctcctgggcctgggctttagtctgggctacggttccatgttcaccaagatttggtgggtccacacggtcttcacaaagaaggaagaaaagaaggagtggaggaagactctggaaccctggaagctgtatgccacagtgggcctgctggtgggcatggatgtcctcactctcgccatctggcagatcgtggaccctctgcaccggaccattgagacatttgccaaggaggaacctaaggaagatattgacgtctctattctgccccagctggagcattgcagctccaggaagatgaatacatggcttggcattttctatggttacaaggggctgctgctgctgctgggaatcttccttgcttatgagaccaagagtgtgtccactgagaagatcaatgatcaccgggctgtgggcatggctatctacaatgtggcagtcctgtgcctcatcactgctcctgtcaccatgattctgtccagccagcaggatgcagcctttgcctttgcctctcttgccatagttttctcctcctatatcactcttgttgtgctctttgtgcccaagatgcgcaggctgatcacccgaggggaatggcagtcggaggcgcaggacaccatgaagacagggtcatcgaccaacaacaacgaggaggagaagtcccggctgttggagaaggagaaccgtgaactggaaaagatcattgctgagaaagaggagcgtgtctctgaactgcgccatcaactccagtctcggcagcagctccgctcccggcgccacccaccgacacccccagaaccctctgggggcctgcccaggggaccccctgagccccccgaccggcttagctgtgatgggagtcgagtgcatttgctttataagtgagggtagggtgagggaggacaggccagtagggggagggaaagggagaggggaagggcaggggactcaggaagcagggggtccccatccccagctgggaagaacatgctatccaatctcatctcttgtaaatacatgtccccctgtgagttctgggctgatttgggtctctcatacctctgggaaacagacctttttctctcttactgcttcatgtaattttgtatcacctcttcacaatttagttcgtacctggcttgaagctgctcactgctcacacgctgcctcctcagcagcctcactgcatctttctcttcccatgcaacaccctcttctagttaccacggcaacccctgcagctcctctgcctttgtgctctgttcctgtccagcaggggtctcccaacaagtgctctttccaccccaaaggggcctctccttttctccactgtcataatctctttccatcttacttgcccttccatactttctcacatgtggctccccctgaattttgcttcctttgggagctcattcttttcgccaaggctcacatgctccttgcctctgctctgtgcactcacgctcagcacacatgcatcctcccctctcctgcgtgtgcccactgaacatgctcatgtgtacacacgcttttcccgtatgctttcttcatgttcagtcacatgtgctctcgggtgccctgcattcacagctacgtgtgcccctctcatggtcatgggtctgcccttgagcgtgtttgggtaggcatgtgcaatttgtctagcatgctgagtcatgtctttcctatttgcacacgtccatgtttatccatgtactttccctgtgtaccctccatgtaccttgtgtactttcttcccttaaatcatggtattcttctgacagagccatatgtaccctaccctgcacattgttatgcacttttccccaattcatgtttggtggggccatccacaccctctccttgtcacagaatctccatttctgctcagattccccccatctccattgcattcatgtactaccctcagtctacactcacaatcatcttctcccaagactgctcccttttgttttgtgtttttttgaggggaattaaggaaaaataagtgggggcaggtttggagagctgcttccagtggatagttgatgagaatcctgaccaaaggaaggcacccttgactgttgggatagacagatggacctatggggtgggaggtggtgtccctttcacactgtggtgtctcttggggaaggatctccccgaatctcaataaaccagtgaacagtgtgactcgg

SEQ ID NO: 288659 - DNA, 2700 bp, Artificial Sequence
  derived and/or modified sequence
atgctcctcctgttgctcctggcaccactgttcctgcgtccccccggcgcagggggagctcaaacgcccaacgcaacttcggaggggtgccaaataatccatccgccttgggagggcggaattagataccggggcttgacccgcgatcaggtaaaagccattaacttcctgcccgtggactatgagattgagtatgtttgtcgtggggaacgtgaggtcgtgggtcccaaagtcagaaagtgtctggctaatggctcttggaccgacatggacacaccatctagatgcgtcaaccgtaccccacattctgagcgaagggcagtctatatcggcgccctgtttccaatgtcaggaggatggccaggggggcaggcttgccagcctgctgttgagatggctctcgaggatgtcaactccagacgagatatcctgccggattacgagctgaaactgatccatcacgattctaagtgcgaccccggtcaggctactaaatatctgtatgaactgttgtacaacgaccccataaaaataatcctcatgccaggttgttcatctgtgtcaacgctcgtcgcggaggccgccaggatgtggaacctcatagtgctatcctatggctcaagctccccggctttaagcaatcgacagaggttcccaacatttttcagaacacacccctcggcgaccctgcacaaccctacccgcgtgaaactgtttgagaaatggggttggaaaaaaattgcaaccatccagcaaaccaccgaggtgtttacatcaacactcgatgatctcgaagaacgagtgaaggaggctggcattgagatcacattcaggcaaagttttttttcagacccggcggtgcccgtgaagaacctgaagcggcaggacgcaagaattattgtgggactcttctacgagaccgaggctagaaaagtgttttgtgaagtgtacaaggagcgcttgtttggaaagaagtacgtgtggtttttgatcgggtggtatgctgacaattggtttaagatctatgatccatcaattaattgtactgtggatgagatgacagaagcggtggagggtcatattacaactgaaattgttatgctcaaccccgccaacaccaggagcatctcaaacatgacctctcaggaatttgtagagaaactcactaagcgactgaaacgccatccagaagaaaccggaggcttccaggaggccccactcgcctacgatgcgatatgggcacttgctctggccttaaataagacaagtggtggcggcggcagaagcggtgtccggttagaggatttcaattacaataatcaaaccatcactgaccagatctacagagcgatgaattcgtcttcgttcgaaggagtgagcggacatgtcgtctttgatgcctctggctccagaatggcatggactttgatagagcagttgcaaggcgggtcctacaaaaagattggttactacgatagcaccaaagacgatctatcctggtccaaaacagataaatggatcggaggaagtccccctgctgaccaaacattagtgattaagacattccggtttctttcccagaaactcttcatttcggtgtcagttctgtcttctctcggtattgtgttggccgtggtatgcttatcctttaacatctacaatagtcacgttcggtatatacaaaattctcagccaaatctgaacaatctgaccgccgtcggctgctcactcgccctggccgccgtcttccccttggggctcgatggctatcacatcggcagaaaccaattccctttcgtgtgtcaagctagattgtggctgttgggactggggttttccttggggtacggctccatgttcacaaaaatctggtgggtccataccgtgttcacgaaaaaggaggagaagaaggaatggagaaagacactcgaaccttggaagctgtacgcaaccgttggtctgctggtaggaatggacgtgttgaccctggccatttggcagatcgtggatccgctacatagaaccatcgagaccttcgccaaagaagaaccaaaggaggatattgatgtttcaattctgccgcagttggaacactgtagctcccgtaaaatgaacacgtggctcggaattttttacggctacaaagggctgttgttactgctgggtatctttctggcttatgagaccaaaagcgtgagtacggagaagataaacgaccaccgagccgtcggaatggccatttataatgtagctgtgctttgcctaatcaccgctcccgtaaccatgattctgtcctctcagcaagatgcagccttcgctttcgcctcactggctatagtctttagttcatacattacactagtagtgctgttcgtgcccaaaatgagaagacttataacacggggcgaatggcagtctgaagcccaggataccatgaagactggatctagcaccaacaacaatgaggaggagaaatccagattgcttgaaaaggaaaatagggagctggagaaaataattgctgagaaggaagagcgggttagcgagttacgccaccagctgcagagtaggcagcagctacggtccaggaggcacccccccacccctccggaaccctccggcggattgccacgcggccccccagagccccccgatagactgtcatgcgacggatctagagtgcatctcctgtacaagtag

SEQ ID NO: 288660 - DNA, 2700 bp, Artificial Sequence
  derived and/or modified sequence
atgctattactcctccttctcgctcccttatttttgaggccacccggtgccggcggagcccagacaccgaacgccacttccgagggatgtcagatcattcaccccccctgggaagggggaatccgttataggggcctcactcgagaccaggttaaagcgattaattttctgcctgtggactatgaaatcgagtatgtctgtagaggggaacgcgaggtggtgggccctaaagtacggaagtgccttgcaaacggcagctggacagatatggatacccctagccgatgcgtgaatagaacgccacacagtgaacggcgggccgtatacatcggtgctttgttcccgatgtccggcggttggccaggaggccaagcctgtcagccggccgtggaaatggccttggaggatgtcaatagtcggcgcgatattctcccagactacgaattaaaactgatccatcacgatagcaaatgcgatcccggccaggccacaaaatacctgtatgaactcctgtacaacgacccaataaaaataattctcatgccaggatgctcctccgtctcaacgctcgtggcggaggcagcacggatgtggaatctgattgtcctcagctacggctcctcctcccctgccttaagtaaccgccagcggttccctacctttttcaggactcaccctagtgctacactgcataatccaactagagtcaagttgtttgagaagtggggatggaagaagatagctacgattcaacagacgacagaagtgtttactagcactcttgacgatctggaggagcgagtgaaagaagctgggatcgagatcacatttcgccagtctttcttcagcgatcctgccgtgcctgtgaagaatctcaaacgccaggacgcccgcattatcgtggggctgttttacgagaccgaagctagaaaggtattttgcgaagtctacaaagagcggctctttggaaagaaatatgtgtggtttctgatcggctggtacgccgacaactggttcaaaatttacgacccatcaattaactgtactgttgacgaaatgactgaggcagtcgaagggcatattacaaccgagattgtgatgctgaatcccgctaatactcgtagcatttcaaatatgaccagtcaagaatttgtagagaagttaacgaagcgacttaagcggcacccagaagaaacgggtggcttccaggaggcacctcttgcttatgatgccatatgggcactcgcactcgctttaaacaagacctccggaggaggcggcagatccggcgtgaggctcgaagatttcaattataacaaccaaaccatcacagaccagatctatagagccatgaattcaagctccttcgaaggcgtctctggacacgtcgtgtttgacgcctcggggtcacggatggcctggacactgatagagcagttacaggggggctcttacaagaaaattggatactacgactctaccaaggacgatctcagttggagtaaaaccgataagtggataggggggagccctccggcggaccagactcttgtgatcaaaacctttagatttctgagccagaaactgttcatctcagtgtcagtgctaagcagcttgggcatagtgctcgcagtggtgtgcctctcttttaatatctataattctcacgtcagatatatccagaacagccagccaaatctgaacaaccttactgccgtaggctgtagtctggcccttgccgccgtgtttccacttggactggatggttaccacattggaaggaatcagtttccatttgtatgccaagcgaggctgtggttgctcggactgggtttctccctggggtacggatccatgttcaccaaaatctggtgggtccataccgtgttcactaaaaaggaggaaaaaaaggaatggcgaaagaccctcgaaccatggaaactgtacgcaacagtgggacttttagtgggcatggacgttttgactttggctatctggcaaattgttgacccccttcaccgaacgattgaaacctttgccaaagaggagcccaaagaggatattgatgtgagcatcttaccccaactggaacactgcagttcacggaaaatgaacacttggctgggaatcttttacggttataaagggctgctccttttattaggcatctttttagcttacgagaccaaatctgtttcaacggagaagatcaacgaccaccgggcagtgggcatggctatttacaatgtcgccgtattgtgccttatcactgcacccgtcactatgattttgtctagccagcaagatgctgccttcgcctttgcatccttagcgatagtgttttcatcctatatcacccttgtggtcctctttgtgcccaaaatgagaaggttaatcactcgcggggagtggcaatcagaggcgcaggacactatgaagaccggctcaagcactaacaataatgaagaagaaaaatctcgactgctggaaaaggaaaatcgcgagcttgagaaaattattgctgaaaaagaggagcgagtcagtgagttacgccaccagctccagtccagacaacaactgcgatctcggagacaccctcccaccccacctgagcccagcggcggcctgccaaggggtccaccggagcctcccgataggcttagttgcgacggatccagggttcatctgctgtacaaatag

SEQ ID NO: 288661 - DNA, 2700 bp, Artificial Sequence
  derived and/or modified sequence
atgcttttgctccttcttctcgctccactatttctcaggccgcccggagcaggaggtgcgcagacacccaacgccacttccgaagggtgccagattatccatccaccgtgggaaggaggaatacgctatagaggcctgaccagagaccaggtgaaagccataaatttcctcccagtagattatgaaatagagtatgtctgccgcggtgaacgtgaggtcgtgggaccaaaggtccgcaagtgtctcgctaatggatcctggacggacatggatacaccatctagatgcgtgaacagaaccccccatagcgaacgcagagcagtttatattggcgcgcttttccccatgtcgggcgggtggcctgggggccaggcctgtcaacctgccgtggagatggctttggaggacgtcaacagccgcagagatatcctaccagactatgaacttaagctcatccaccacgacagcaagtgcgatccaggacaagcaacaaagtatttatatgagctcttgtacaatgatccgattaaaattatacttatgcccggttgcagcagcgtcagcacccttgttgcagaggccgcccggatgtggaacttgatagttctgtcttatgggtcaagctctcccgcattaagcaaccgccagcgattccccactttttttcgcactcatccaagtgccacattgcataaccccacccgcgttaaattgtttgaaaagtggggctggaagaagattgccacgatccagcagactacagaagtgttcacaagcacactggacgacttggaagagcgagttaaagaggccggcatcgagattacatttagacaatcgttcttctccgacccagccgtccctgtgaagaatctgaaacgtcaagacgctcggattattgtcggcctgttctacgaaactgaggcacgaaaggtgttttgcgaggtttacaaggagagattattcggtaagaagtatgtgtggttccttattgggtggtacgccgataactggttcaaaatttacgatccaagcattaattgtacagtggacgagatgacagaggctgtggagggccacattactacggagattgtgatgctgaaccctgccaacacccgcagcatctccaatatgactagtcaggagttcgtcgagaagctgacgaagagactgaaaaggcatcctgaggagaccgggggatttcaggaagcgcccctcgcatacgacgctatctgggcccttgccctcgccctgaataaaactagcggggggggcggtcgctctggcgtccgcttagaagacttcaactacaacaatcaaactattaccgaccagatttatcgagccatgaactccagtagttttgagggcgttagtggccacgttgtctttgatgcatccggatcacgcatggcttggactctgatcgaacagttacaggggggttcatataagaaaatcgggtattatgactccaccaaagacgacctgtcatggtcaaagacagacaagtggatagggggctctccccccgcagaccaaacactggtcatcaaaacctttcgatttctcagccaaaagctgtttatttcggtctccgtgctgtcttcgctcggcatcgtgctcgcagtcgtatgcctttcgttcaacatatataattcccacgtgcggtacattcaaaatagtcagcctaatttgaataatttgactgccgtcggatgttctctggcgttagccgccgtgttccccctggggctcgacggctatcacattgggagaaaccaattcccattcgtgtgtcaggcacggctgtggctactcggccttggattcagcctcggctatggtagcatgttcacgaaaatatggtgggtgcatacagttttcacaaagaaagaggaaaagaaagagtggagaaagacgcttgaaccctggaagctgtacgctaccgtggggctgcttgttgggatggacgtgctgacccttgccatctggcagatcgtggacccccttcacagaactatcgaaaccttcgccaaggaggagccaaaagaagatatagatgtctctattctgccccagcttgagcactgtagtagcaggaaaatgaacacttggctagggatcttttatggctacaaaggactgcttttgctgctcggaatctttctggcatacgagaccaagtccgtatcaacagaaaagatcaatgaccatagggccgtaggaatggccatttacaacgtcgccgttctgtgccttataacagcccccgtgactatgattctgtcatctcagcaggacgcagcttttgcctttgcctcacttgctatagttttttccagctatattacccttgtggtcctgttcgttccgaagatgcggcgtctaattactcgcggtgagtggcagtcagaggcccaggataccatgaaaacaggctcgtccactaataataacgaagaggagaagtcgcggctcctcgagaaagagaatcgggagctggaaaaaatcatcgctgagaaggaggaacgggtttctgaactgcgccaccagttgcaatcaagacaacaattacgttcaaggagacatcctcccacaccccctgaaccctcaggtggactcccacggggccctcctgaaccaccagataggctgagttgtgatggcagtagggttcatctgctctataaatag

SEQ ID NO: 288662 - DNA, 2700 bp, Artificial Sequence
  derived and/or modified sequence
atgctgttactactgctccttgcacctctctttctgagacctccgggcgccggcggtgcccagacccctaacgctacttcagaaggatgccaaattattcacccaccttgggagggcgggattagatataggggcctgaccagagaccaggttaaggcaatcaacttcttgcccgtggattacgagatcgagtatgtttgtcgaggggaacgtgaagttgtgggaccgaaagtgagaaagtgccttgctaatggaagttggactgacatggacacaccatcccggtgtgtgaataggacgcctcattcagaaagacgcgccgtttacattggagcactgttccctatgagtggaggatggccaggcggacaggcatgccaacctgctgttgaaatggcgctcgaggacgtcaatagtaggcgggatatcctcccagactacgagctgaagcttatccatcacgattccaagtgcgacccgggacaggcaactaaatatttgtacgagctgctttataacgacccgataaaaattatcttgatgcctggctgttcatccgtgagcaccctcgtcgctgaagctgcgcggatgtggaacctgattgtgctatcctatgggtcatccagtccggcgttgagcaatcggcagcgcttccccacctttttccgaacgcacccatcagccactcttcacaacccaacccgagttaagctgtttgaaaagtggggctggaagaaaatagccaccatacagcagaccaccgaagtctttacatccaccctggacgacttagaggagcgggtcaaggaagctggcattgaaattacattccgccaaagcttcttcagcgatcccgctgtgcccgttaaaaacttgaaaaggcaggacgcgaggattatcgtgggactgttttatgagactgaagctcgcaaagtgttttgcgaggtgtataaagaacgcctgtttggtaaaaagtatgtgtggtttcttatcggctggtatgcagacaattggttcaaaatttacgatccatccattaattgtacagtagatgagatgaccgaggccgtggaggggcatattacaacagaaattgtcatgctcaatcccgcgaacacacgatcaatttccaatatgacctcccaggaattcgtggagaaattaacaaaacgccttaagagacatccagaagagacaggaggcttccaggaggcacccctcgcctacgatgcaatctgggccttggcccttgccttgaataaaacttctggaggaggtggccgctctggcgtgcggctggaggattttaattacaataatcagaccatcaccgaccagatttaccgggctatgaactcgagcagcttcgagggagtgtccggccacgtcgtgtttgatgcatctgggtcccgtatggcctggactctcatcgaacagctacaggggggtagttataaaaaaatcggctattacgactctacaaaagatgatctttcctggtccaaaacggacaaatggataggcggcagtccgcccgccgatcagacccttgtcattaagacttttcggttcctgagccagaagctgttcatctctgtgagcgtgttgagcagcctagggatagtgctggctgtggtctgtctgtcctttaacatctataactcacacgtccgatatatccaaaactcccaaccaaacttgaacaatctgaccgccgtgggctgtagcctggctttggccgctgtgttcccactcggccttgacgggtatcatattggaagaaatcagtttcctttcgtgtgtcaggcgaggctgtggctcttaggactgggctttagccttggttacgggtcgatgttcactaagatctggtgggtgcataccgtctttaccaaaaaagaagagaagaaagaatggagaaaaactttggaaccttggaaactttacgcgaccgtgggcttgctggtaggcatggatgtcctgaccctggcaatttggcagattgtggatccgctgcatcgaaccatcgagacctttgcaaaagaagagcctaaggaggatattgacgtgtcaatcttaccacaactggaacattgctcctcccgcaaaatgaatacatggctgggcatattctacggatacaaagggctgctgctgctactagggatatttctcgcttatgaaactaagtccgtcagcactgaaaagattaacgatcatagagccgtggggatggccatttacaatgtggcagtgctttgtttgataacagcacccgtgaccatgatattatcatcacagcaagatgctgcctttgcatttgcatctcttgccatcgtgttcagctcttacataaccctggtggtgttgtttgtgcctaagatgagacgcctaatcacacgcggtgagtggcagtctgaagcacaggatacgatgaagacgggtagcagtaccaacaacaatgaggaggaaaagtctcggttgttggagaaagaaaatcgagagctggagaagatcattgccgaaaaggaagagagagtctcagaactgcgacatcagcttcagtctaggcaacagctacggagccgcagacatcctccaacccccccggagcccagtggaggcttgccacgaggacccccagaaccacctgatcgattgtcatgcgacgggtcccgagttcacctgctgtacaagtag

SEQ ID NO: 288663 - DNA, 2700 bp, Artificial Sequence
  derived and/or modified sequence
atgttattacttctgctgctcgctccactgttcttgaggccacctggtgccggcggcgctcagacaccaaacgctacatcagaagggtgccaaattatccaccccccatgggagggcggcatccggtatagaggcttgacccgggatcaggtaaaagctataaatttcctcccagtggactacgagattgaatacgtgtgcagaggagaaagagaagtcgtcggccctaaagttcgtaagtgtctggcaaacggcagttggaccgacatggatacaccgagccgatgtgtaaaccggacacctcattccgagaggcgggccgtgtacattggggcactctttccaatgagcggagggtggccgggtggtcaggcctgccagcctgcggtcgaaatggcactggaagatgtgaacagcaggcgcgatatactgcctgattacgagttgaagctgatccaccacgatagcaaatgcgaccccggacaggccaccaaatatctgtacgagctattgtataatgaccctatcaaaattattttaatgcccggttgttccagtgtttccaccttggtcgcagaggctgcaagaatgtggaacctcattgttttgtcttatggctccagcagccctgcactgagtaaccgtcagcgcttccctactttcttccgcactcatccatctgccacgttgcacaatcctactagggttaagttgttcgaaaagtggggttggaaaaagattgcgacaattcagcagacaaccgaggtatttactagcacactggacgatttggaggaacgcgtcaaggaggccggaattgagatcacatttagacagagcttcttttccgatcctgccgtgccagtgaagaacctgaagcgtcaggatgcccgcatcatcgtcggtctgttctatgaaacggaggcacgaaaagtattctgcgaagtctataaagaaagactattcggaaagaaatacgtttggtttctgataggctggtacgctgacaactggtttaaaatatacgatccatctattaattgcacagtcgatgaaatgacggaggctgtcgaagggcatattactacagaaatcgttatgctgaacccggcaaacaccagatcaatctccaatatgacctctcaagagtttgtcgaaaagttgactaaacgactaaagcgccatccagaagaaactgggggcttccaggaagcccccttggcttatgacgctatttgggccctggcgcttgcattgaataagacgagtggcgggggcggaagatccggtgtgaggctggaagatttcaattacaataatcaaactattacagatcagatttatagagccatgaactcttcctcattcgagggggtatctggccatgtggtttttgacgcatctggcagccggatggcctggacacttattgagcagttgcagggtgggagctacaagaagatcgggtattacgactccactaaggacgacctgtcatggtccaagacagacaagtggattggaggcagcccaccagcagaccagacgctagtcataaagactttcaggttcctctcacaaaaactgttcatttcggtgtcagtgctgtcttcactgggcatagtgctcgccgtagtatgcttaagtttcaatatttataattcccacgtgcggtatatccaaaacagtcagcccaatctgaacaacctcaccgctgttgggtgctcactggcgttggcagccgtattcccactgggacttgacggttaccacatcggtcgcaaccaattcccttttgtttgccaggctcgcttgtggctcctgggccttgggttctcgctaggctatggatctatgttcaccaaaatatggtgggttcacaccgtgttcaccaaaaaggaagagaagaaagagtggcgaaagacattagaaccttggaaattatacgcgacagtagggttactggtgggcatggatgtgctgacattagcaatatggcagattgtcgatccacttcatcgcaccattgagacttttgcaaaagaagagcccaaggaggatatcgacgtgtccatcctgccccagctcgagcattgcagtagccgaaaaatgaacacctggcttggtatcttctacggatacaagggcctacttctgctcttgggaatcttcttggcgtatgaaaccaaaagcgtatccacggagaagatcaatgaccaccgcgcagtggggatggccatctataacgtcgctgttctttgccttatcacagccccggttactatgatactgtcctcacagcaggatgccgccttcgcgttcgccagtctcgcaatcgtgttctctagctacatcactctggtcgtgctgtttgttcctaagatgcgacgcctaattactcgcggagaatggcaaagtgaagcccaggacaccatgaaaacaggtagctctacaaacaataacgaggaagagaagagccgtcttttggaaaaagaaaatcgtgaactggaaaagatcatcgctgaaaaagaggagagagtctcagaactgaggcaccagctccagagccgccagcagcttcggagcaggaggcacccccccaccccccccgaaccttcgggaggtctgcccaggggccccccagaaccacctgatagactgtcttgcgacggatcaagggttcacctgttatacaagtag

SEQ ID NO: 288664 - DNA, 2700 bp, Artificial Sequence
  derived and/or modified sequence
atgctgctccttcttctgctcgcaccgttgtttctgagaccaccgggcgccggaggcgcacagactccaaacgcgactagtgaaggttgccagatcattcacccaccgtgggaggggggtattaggtaccggggtctaacccgtgaccaagtaaaagccatcaatttcctgcccgttgattatgagatcgagtacgtgtgccgaggggagagagaagtggtgggacctaaggtgagaaaatgtttggccaatggcagctggacagatatggacactcccagtcgttgcgtgaacagaaccccccacagcgagagacgcgctgtttatattggtgctctgttcccaatgtcaggaggatggcccggcggccaggcctgccagcccgctgtcgaaatggctctggaagacgttaactctcgtcgcgatatccttcctgactacgagttgaaactgatccatcacgactctaaatgcgatcctggtcaggccacaaagtacctgtatgaattactttataacgaccccattaaaattatccttatgccgggatgttccagtgtaagcacccttgtggccgaggccgctagaatgtggaatctcatagtgctgtcctatggctcttcttcaccggccctcagcaaccgccagcggtttccaacatttttcagaactcacccttccgcaacattacataaccccactcgcgtgaaactctttgagaaatgggggtggaagaagatcgccaccatccagcaaaccaccgaggtgttcacctccacccttgacgatttggaagagcgagtaaaggaggccgggatagagattacctttcgacaatcgtttttcagtgaccccgctgttcccgtgaaaaatctaaagcgccaggacgcccggatcattgtaggtctgttttatgagacagaggctcgaaaagtattctgtgaagtgtataaggaacggttgttcgggaagaaatatgtgtggtttcttattggctggtacgctgacaattggttcaaaatttatgatccttccattaattgcaccgtcgacgaaatgactgaagctgtggaaggccacataacaacagagattgtgatgctgaatccagccaacacaagatctattagtaacatgacctctcaggaatttgtggaaaaactgactaaacgattgaagagacaccctgaggagaccggaggcttccaggaggctccgttggcttacgacgctatatgggcattagctctcgcactcaacaaaacttctggtggaggcgggagatctggcgtccggctcgaagatttcaactacaataaccaaacaatcacggaccagatttatcgcgcaatgaactccagctccttcgagggggttagcggtcatgttgtctttgacgcctccggatctcgcatggcctggacgctgatcgagcaactgcagggcgggagttataaaaagataggctactacgattccacaaaggatgatctgagctggagtaaaaccgataagtggatcggcggctcacctcccgcagatcaaaccttggtcattaagacatttcgcttcctgagtcagaagctgtttattagcgtttccgtcttaagctcactaggcatagtgctcgccgtagtttgcctctccttcaatatttataactcacacgttcgttacattcagaactctcagcccaacctcaataacctcacagctgtaggttgcagcttggcccttgccgcagtgttcccactgggtttggacgggtaccacattggaagaaaccaatttccgtttgtgtgtcaagcccgcttatggctccttggtcttggattctctctgggttatggttccatgtttaccaagatctggtgggtacacaccgttttcacgaagaaagaagaaaaaaaggaatggcggaagactctggagccatggaagctgtatgccaccgtggggctgctcgtgggcatggacgttttaacactagctatctggcagatcgtggatccattgcatcggactattgaaaccttcgcaaaggaagaacccaaggaggacatagatgtgagcatcctgccacagctggaacactgttccagcagaaagatgaacacatggcttggcatcttttacggctataaaggtctccttttgcttcttggcatttttctggcctatgaaaccaagtcagtctcaacagagaagatcaacgatcatagggccgtggggatggccatatacaatgtcgctgtgctctgcctgatcactgcccctgtgacgatgatcctgtcttcacaacaggatgcagcttttgcttttgcctcactagctatcgtcttcagcagttacatcacgttagttgtactgtttgtccctaagatgcgcaggctgataacccggggagagtggcagtctgaggcccaggatacgatgaaaacaggaagctcaaccaataataatgaagaagagaagtcgcggcttttagagaaagaaaacagagagttagagaagatcatagctgagaaagaagagcgggttagcgaactgaggcaccaactccagtcgcggcagcagctgagaagcaggcggcatccgcctactcctcctgagcctagcggcggactgccccgtggacccccggaacctccagacaggctgtcatgcgatggaagtagggtccacctactgtataagtag

SEQ ID NO: 288665 - DNA, 2700 bp, Artificial Sequence
  derived and/or modified sequence
atgctgctcctgttgttactggcccccttattcttacgcccccctggggcaggaggcgctcagacccctaatgctaccagcgagggctgtcagattatacacccaccctgggagggaggcattcgataccgagggctgaccagggaccaggtgaaggctatcaatttcctgccagttgattacgagattgagtacgtatgccggggagaaagagaggtcgttgggccgaaagtgagaaagtgcctcgccaatgggagctggactgatatggataccccttcgcggtgtgtgaaccgtaccccccactctgagcggcgggccgtatacattggagccctgttccctatgagcgggggatggcccgggggccaggcttgtcagcctgccgtcgagatggctctcgaggatgtgaattcccggcgggatatcctgcccgactatgagctgaaactgatccaccacgactcgaaatgcgatcccgggcaggccactaaatacctgtacgaactgctgtacaacgacccaattaagatcattctgatgcccggctgctcaagcgtctcgactctcgttgccgaggccgctcgaatgtggaatctgattgtgctctcatatggatcaagtagtcctgccttgtcaaaccgtcagcgctttcccaccttcttccgaacgcatccttcagccactctgcataaccctacaagggtgaaactgttcgagaaatgggggtggaaaaaaatcgctactatacagcagactaccgaagtattcacaagtaccctcgacgatctggaagaaagggttaaggaagcaggcattgaaattactttcagacagtcatttttttcagaccctgccgtcccagtgaaaaatctgaaacgtcaagacgcaaggatcattgtcggcctgttctacgagacagaagccagaaaggttttctgcgaggtgtataaagaacgtttgttcggaaaaaaatatgtgtggttcctgatcggctggtatgctgacaactggtttaaaatttacgatccaagtatcaactgcaccgtcgacgagatgaccgaggcagtggaaggacatattaccacggagattgtaatgctgaaccctgcaaacacccgatcaataagcaatatgacatcacaagagtttgtggagaagcttaccaagaggctcaagcgtcatcccgaggagactggcggcttccaagaggcgcccttggcctatgatgctatctgggctttagcactagctcttaacaaaaccagtggagggggagggagatcaggtgtcagactcgaggacttcaactacaataatcaaaccattaccgaccaaatttatagagccatgaactcctctagcttcgagggcgtctccggccacgtggtttttgacgcttcaggcagtcggatggcttggacgctcattgaacagcttcaggggggctcctacaaaaagataggatattacgattcaactaaagatgatctctcgtggagcaagactgacaaatggatcggtggttctcctcctgctgaccaaacactggtcatcaagaccttccggttcctttcccagaaactctttattagtgtgtctgtgctgagctccctgggcatagtgctggctgtcgtttgcctgtcattcaatatttataatagccacgttaggtatatccagaatagccaaccaaacctaaacaatctaacagctgttggctgttcgctggcactagcagcggtgttccccctcgggctggacgggtaccacataggaagaaaccagtttccctttgtgtgtcaggctcggctgtggcttttaggtcttgggttcagcctagggtacggctctatgttcaccaaaatttggtgggtccacacagtcttcacgaaaaaggaggagaaaaaggagtggagaaagacactggaaccctggaaattgtacgccaccgtgggtctcctggtgggtatggacgtcctgacactggcaatatggcagatcgtggatcctcttcacagaaccattgaaacctttgccaaggaagaacctaaagaagacatcgatgtatctatcctcccccagctagagcattgctcttcacggaagatgaacacatggttaggcattttctatgggtacaagggtctcctactgctgctgggtatctttcttgcgtacgagactaagagcgtatccacagagaaaattaacgaccatagggcagtgggcatggcaatttacaacgtcgccgttttatgcctgataacagctcctgtgacaatgatcctttcctctcagcaggacgccgcttttgcgttcgccagtctggcaatagttttcagttcctatatcacgctagttgttctttttgttcccaagatgaggagattgataacccggggcgaatggcaatcagaggcccaagacacgatgaaaactggcagctccacaaacaacaacgaggaagaaaagtcaaggcttctcgaaaaggagaaccgtgagctagaaaagattatcgccgaaaaggaggaaagagtctccgagctcaggcaccagctacagagccgtcagcagcttcgctcgagacggcacccaccgacaccaccggagccctccggaggtctgcccagggggcccccagaaccccccgaccggctgtcctgcgacggttcgagagtgcacctgctgtataaatag

SEQ ID NO: 288666 - DNA, 2700 bp, Artificial Sequence
  derived and/or modified sequence
atgctgctgctgctactgctagcccccctgtttctcaggccccccggtgcaggaggcgcgcaaactcctaatgcaacaagtgaaggatgtcaaatcatccacccaccatgggaaggcggtatccgttatcgcgggttaacacgggatcaggtcaaggctattaacttcttaccagtggattatgagatcgaatacgtgtgccgaggggagagggaggtggtgggccccaaagtgcggaagtgtttggcgaacggctcttggactgacatggacacccctagtaggtgcgtaaaccggaccccccacagcgaaagacgtgccgtgtacattggtgccctctttccaatgtcgggtggctggcctggaggtcaagcctgccagcctgccgttgagatggcactggaagacgtcaattctagaagggatattctgccggactacgagttaaagcttattcatcacgattctaagtgcgaccccggacaagcgacaaagtacctgtatgaactgttgtataatgaccctattaaaatcatccttatgcctggctgttcctccgtgagcaccttagtggcagaagctgcacgcatgtggaatcttattgtcctcagctatggatctagttccccagccctgtctaaccgtcaacgattccccacctttttcagaacgcacccatctgccacgttgcacaaccccacacgcgtcaaactgtttgaaaagtgggggtggaaaaagattgccacaatccaacagaccacggaggtgttcacctcaaccctcgacgacttagaggaacgggttaaggaggcaggcatagaaattacatttcgccagtcattcttttctgaccccgccgtacccgtgaagaaccttaaacgccaagacgcccgcatcatcgtgggcttattttatgagaccgaagctagaaaagtattctgtgaagtgtacaaggaacgactgttcggtaagaaatacgtctggtttttgattggctggtacgctgataactggtttaagatatatgatcctagcattaattgcacagttgacgaaatgaccgaggccgtggagggacacatcactacagaaatcgtcatgcttaaccccgcgaacacgagatctatctctaacatgacatcccaggaattcgtcgagaagctgacgaagagactcaaacggcatcctgaggagaccggtgggttccaggaagcaccactagcttacgacgcaatctgggctctagctctggcactcaacaaaacatctggaggcggaggccgaagcggcgtgaggctggaagattttaactacaataatcagacaatcacagaccaaatatacagggccatgaacagcagtagttttgagggcgtctccggacatgtggtgttcgacgcttctgggagtaggatggcctggacattaattgagcagctgcagggagggagctataaaaaaatcggctactacgatagtactaaggatgacctttcatggtccaaaacagataaatggatcggaggaagtccccctgctgaccaaacattagtgattaagacattccggtttctttcccagaaactcttcatttcggtgtcagttctgtcttctctcggtattgtgttggccgtggtatgcttatcctttaacatctacaatagtcacgttcggtatatacaaaattctcagccaaatctgaacaatctgaccgccgtcggctgctcactcgccctggccgccgtcttccccttggggctcgatggctatcacatcggcagaaaccaattccctttcgtgtgccaagcaaggttgtggctgctagggcttggattttctctgggatatggcagcatgttcacaaagatttggtgggtccacacggtgtttacaaaaaaagaggaaaaaaaggaatggagaaagacgcttgagccttggaaactttacgctaccgtcggcctgttggttggcatggacgtcctgaccctcgctatctggcagatcgtcgaccccttgcacagaactatcgaaaccttcgctaaggaagaacctaaagaagatatcgatgtcagtatactccctcaactcgaacactgtagtagtaggaaaatgaatacttggttgggtatattttacggctataagggcctcctgctacttttggggatttttctcgcatacgaaaccaagtccgtttcaaccgaaaagataaatgaccacagagctgtgggcatggctatctataatgtggcggtcctttgtctgattactgcccccgtgaccatgatcctctcaagccaacaggatgctgccttcgcgttcgccagtctagctattgtcttctcatcctatataaccctagttgttctatttgtgccaaagatgcgacgcctgattacccgaggtgaatggcagtccgaagcacaggatacaatgaaaactggatcttccacaaacaacaatgaagaggagaagtcccgcctgcttgaaaaggaaaacagagagttggagaaaataatagctgaaaaggaggagagagtcagtgaattaaggcatcaattacagagtcgccagcagctgaggtccaggcgacacccccctacccctcctgaaccatccggcggtttgccgagagggccacctgagccccccgaccgtctgtcttgcgatggaagcagagtccacctgctgtacaagtag

SEQ ID NO: 288667 - DNA, 2700 bp, Artificial Sequence
  derived and/or modified sequence
atgttgctcctattgttgctggccccattgttcctgaggccgcccggtgccggcggagcccagactcccaacgccacaagcgagggatgtcaaatcattcaccccccttgggagggtggcattaggtaccgcggactgacaagagaccaagtaaaagctatcaactttctgcccgtggactatgagatagaatatgtgtgtagaggagagagagaggtggttgggccaaaagtcagaaaatgcctggccaatggttcttggaccgatatggacactccatccagatgcgtgaaccgcacaccacacagcgaaagacgtgcagtctatattggcgccctcttccctatgtcaggcggatggccaggaggccaagcatgccagcccgctgtcgaaatggcgctcgaggacgtgaactccagacgggatattcttcccgattatgagctgaagctgattcatcacgattccaaatgcgaccccggtcaggccacaaaatatctctacgagcttctttacaacgaccctatcaagattatcctgatgcccggatgcagctctgtgtctactcttgtggctgaggccgctaggatgtggaacttgattgtgctgtcctatggttcttcatctcctgcgctttctaacagacagagattcccaacttttttccgcacacatccttctgctaccttgcataacccaacccgtgtgaagttgtttgagaagtggggctggaaaaaaatcgcaactattcaacagaccaccgaggttttcaccagcactctcgacgatctggaggaacgggtgaaagaggccggcatcgaaatcaccttccgacagtcattcttctcagatcccgcagtgcctgtaaaaaatcttaaaagacaggatgcgagaattatagtgggcctgttctacgaaaccgaggcaagaaaggtcttctgcgaagtgtacaaagaacggctgttcggcaagaagtacgtatggtttttaataggttggtacgcagacaattggttcaagatctatgatccatccattaattgtacagtcgacgaaatgacagaagcagtcgagggccatataactaccgaaattgtaatgctcaatcctgccaacacaagaagtatcagcaacatgacaagtcaagaatttgttgaaaagcttacgaaaagactcaagagacatcctgaggaaactggtggcttccaggaggcaccgctggcatacgacgctatctgggctttagcactggctttaaataagacgtctggtggcgggggaaggagcggggtgcgcctcgaagactttaattataacaatcaaaccattacagatcagatttatagagccatgaattcgtctagctttgagggggtaagcgggcatgtagtatttgatgccagcggcagtagaatggcttggacactgatagagcagctccaaggagggtcctataagaagatcgggtattatgactccacaaaggatgatctaagctggagtaagaccgataagtggattggcggatctccaccagccgaccaaacgctcgtgatcaaaaccttccgcttcctctctcagaaactttttatttccgttagtgtgctgagtagcctcggaatagtccttgccgtcgtatgcctcagcttcaacatttataattcccacgttagatacattcagaactctcagcccaacctcaacaatttgaccgcggtcggctgtagcctcgccttggccgccgtgttccccctcggactcgacggctatcatatcggaaggaaccagttcccgttcgtgtgccaagcccgattgtggctcctgggtctcggattttctctcggatatggttccatgttcacaaaaatatggtgggtgcatacagtctttacaaaaaaggaggaaaaaaaagagtggagaaagactcttgagccgtggaaactttacgcaacagtgggattgctcgtgggaatggacgtgctaactctggccatttggcagattgtggatcccctccatcgcaccatagaaacatttgcaaaagaggagccaaaagaagacatcgatgtttccatattaccacaacttgaacattgcagctcccgcaagatgaatacatggctagggatattctacggttataagggattactgctcctgctaggcatttttctggcttacgaaacaaagagtgtatctactgaaaagatcaatgatcaccgcgctgtgggcatggccatctacaacgttgcagttctatgcctcataactgcccctgttactatgatcttatcctcgcagcaggatgccgccttcgccttcgcttcactggccattgttttttcttcatacatcactctggtggtactgtttgtccctaagatgagaagactgattactagaggtgaatggcagtccgaagcccaagataccatgaagacagggtcctccactaacaacaacgaagaagagaaaagtcgccttcttgaaaaggaaaatcgagagcttgaaaaaatcatcgctgaaaaggaggaaagagtgtctgagttacgccaccagttgcagtccagacaacagctacgcagtaggcgccatccacccaccccccccgagccatctggaggattaccaaggggcccccccgagccaccagatcgcctaagctgtgacggaagccgggtgcatctcctgtacaagtag

SEQ ID NO: 288668 - DNA, 2700 bp, Artificial Sequence
  derived and/or modified sequence
atgcttctgcttttactgctggccccgttattcttaagacctcctggcgctggtggagcacaaactcctaatgctacctctgagggatgccagatcattcaccccccatgggaaggcggaatcagataccgcggcctgactcgggaccaggtaaaggcgattaattttctgcctgtcgattacgaaatcgaatatgtatgtagaggagagcgggaagttgtaggtcctaaagttcgtaaatgtctggctaatggatcctggactgacatggatacccctagtcggtgcgtgaatcgcacgccacattccgaacgccgagccgtgtacattggagccctattccccatgtctggaggctggcctggaggtcaagcttgccagccggcagtggaaatggcactagaagacgttaacagcagaagggatattctgcctgattacgagctgaaactcattcatcacgacagtaagtgtgatcccgggcaggctactaaatacctatacgaattactctataatgacccaataaagatcatcttgatgcccggttgctcatccgtatctaccttagtcgccgaagccgcccgcatgtggaaccttatcgttttaagttacggtagcagttcccccgccttgagtaataggcagagatttccaacctttttcagaacacatccctccgcaactctccacaatccaacacgggtgaagctgttcgagaagtgggggtggaaaaagatcgccacaatacaacagaccacggaagtctttacgagtaccttagatgacctcgaggaacgtgttaaagaagctggcatagagataacttttcggcagtcattcttttcagacccggcagttcccgtgaagaatttaaagaggcaagacgcccggatcatcgtgggactgttctatgaaaccgaggcacgcaaagtattttgcgaagtgtataaagagcggctcttcggcaaaaagtacgtttggtttttaatcggatggtacgctgataactggttcaagatttacgatccttccatcaactgtacagtcgatgaaatgaccgaagcagtcgaagggcatattacaactgaaatcgtcatgctgaacccagcgaacacaagaagcatttctaatatgacgagtcaagagttcgtggagaagctaacaaaaagacttaaaaggcacccggaagaaacaggcggattccaagaagctccactggcctacgacgccatctgggctctggctctggctctgaacaagacctcaggtggtgggggaagaagcggtgttagattagaagactttaactacaacaatcagactatcaccgatcagatttatcgtgccatgaattccagctccttcgaaggtgtgagcgggcacgtggtcttcgacgcttccggatcccgaatggcatggaccctcatcgagcagctccaaggcggcagctacaaaaagattggctattacgattcaactaaagacgacctgtcctggtcaaagactgacaagtggattggcggttctcctcctgcagaccagacgcttgtgattaagacttttcggttcctgagtcagaagttgtttatcagtgtgagcgtactctcaagtctgggcatagtcttagcagtggtttgtctttctttcaacatctataattcccacgtccggtacatccaaaattctcaacccaacctgaataatcttactgcagttggttgcagtctggccctcgctgcagtctttcctctgggactagacggctatcacatcggcagaaatcagttcccttttgtttgtcaagcacgtctttggctgctaggccttggcttctcgttagggtacggatctatgtttactaaaatttggtgggtgcataccgtgtttaccaaaaaggaggaaaagaaagaatggaggaaaacgctggagccatggaagctttacgccactgtgggattacttgtagggatggacgttctgactctggcaatctggcaaatcgtggaccctcttcatagaacaattgaaaccttcgctaaggaagaacccaaggaagatattgacgtgtccatcctgccacaacttgagcattgtagcagtcgaaaaatgaacacttggctgggcattttctatggttataagggcttactcctcctgctcggtattttcttggcatacgaaaccaaatccgtgtcaacagagaaaatcaatgaccaccgtgcagtcggcatggctatatacaatgtagctgtactgtgtttaataaccgcaccggtgactatgatcctatcctctcagcaagatgccgccttcgctttcgcctcccttgccattgtcttctcaagttatataacactcgtcgtcctgtttgtccctaaaatgcgacggctcataacgagaggcgaatggcagtcagaggcacaagatactatgaagacaggcagttcaactaataataatgaagaagagaaaagtagactcttggagaaagagaaccgcgaacttgagaaaatcatcgctgaaaaggaagaacgtgtttccgaactgagacatcaattacagtcgagacagcagctacggtcacgtcgccatccccccacgccacccgaaccttccggcggtctgccacgggggcccccagaaccccctgataggctctcttgtgacggttcaagggtacatttgctgtataaatag

SEQ ID NO: 288669 - DNA, 2700 bp, Artificial Sequence
  derived and/or modified sequence
atgctgttactactgctccttgcacctctctttctgagacctccgggcgccggcggtgcccagacccctaacgctacttcagaaggatgccaaattattcacccaccttgggagggcgggattagatataggggcctgaccagagaccaggttaaggcaatcaacttcttgcccgtggattacgagatcgagtatgtttgtcgaggggaacgtgaagttgtgggaccgaaagtgagaaagtgccttgctaatggaagttggactgacatggacacaccatcccggtgtgtgaataggacgcctcactcagagagacgcgcggtgtatataggcgctctgttcccaatgagcggtggttggcccggaggtcaggcctgtcagcccgctgttgaaatggctctagaagacgttaatagtaggagagatatattaccggactatgaacttaaactgattcatcacgatagtaagtgcgacccgggccaagccactaaatacctctacgaattattgtacaacgatcctatcaagattatacttatgcctggctgctcaagtgtatcaactctcgtggcagaggctgcacgcatgtggaacttaatagtgctgagttacggcagttcatccccagctttaagcaacaggcagagattcccgacgttcttccgtactcaccccagtgctaccctccacaaccctactagagtaaagctatttgagaaatggggctggaagaagatcgctaccatacaacagaccaccgaagttttcacatccactctagacgacctcgaggagagagtgaaggaagctggaatagaaattaccttcagacagtccttcttcagcgacccagctgtgccagtcaagaatttgaagcggcaggacgcccgcatcatcgtgggactgttctacgagacggaggctagaaaagtgttctgtgaagtgtacaaggaaagactgtttggaaaaaaatatgtgtggttcctgattggctggtatgccgataattggtttaagatatacgatccttctatcaattgtaccgtagatgagatgactgaggctgtggaaggccatatcaccaccgagatcgttatgctgaatcctgcgaacaccagaagcatttcaaacatgacgtcacaagaattcgtagagaagctgaccaaaagactcaaacggcacccagaagagacaggggggtttcaggaagcccctctcgcgtatgatgcaatatgggcacttgcattggctctcaacaagacaagcggcggcggaggcaggagcggtgtgcgactcgaagacttcaattacaataaccagacaattaccgaccaaatctaccgggccatgaacagctcatcctttgagggcgtttcaggccacgtcgtattcgatgctagcggctctagaatggcgtggaccctcattgaacagctccagggagggagctacaaaaaaatcggatattatgactctacaaaagatgatcttagctggtccaaaacagataagtggattgggggctcacctcccgcagaccagactctcgttattaaaaccttccggttcctctcccaaaagttatttatcagtgtctccgtgttatcttcgctgggcatcgtgctagcggtagtctgcttatcatttaatatctacaacagtcacgttcgttacattcagaactcgcaacctaacttgaataacttaacagcggtgggctgtagcctagccttggcggcggtgtttcccttaggactcgacggttaccatatcgggagaaaccaatttccgttcgtctgccaggcccggttgtggctgcttggcctaggtttctccctcggctatggctcaatgttcacgaaaatctggtgggtgcatactgtatttactaagaaagaagagaagaaggaatggcggaagacactggaaccatggaagctgtacgctacagtgggactcttagttgggatggacgtattgacacttgctatatggcagatcgttgatccgctgcacaggactatcgagacattcgctaaagaggaacccaaagaggatatcgacgtaagtattctgccacagttagagcactgttcctcccgcaagatgaatacctggctgggtattttttatggttacaagggtcttctgcttttattgggtatctttctggcttacgaaactaaaagtgtaagcaccgagaaaatcaatgaccatcgcgccgtaggaatggcgatttacaacgtcgcggtcctctgtcttataacagctccagttacaatgatcctctccagccagcaagatgctgcatttgccttcgcttctctcgctattgtgttctccagctatataactctggttgtgctattcgttcccaaaatgagaaggctcattacgagaggcgaatggcagagcgaggcccaggatacaatgaaaaccggaagtagtaccaacaataatgaggaggagaaatcccggctactggaaaaggaaaaccgggaactggagaagataattgccgaaaaagaagaacgggtgtccgagctgaggcaccaactccagtcccgtcaacagttaaggtccagaaggcatcccccgacacccccagaaccatcaggaggattaccgcgaggcccacccgaacccccagatcgactgagttgtgacggatcccgcgtccacctactttacaagtag

SEQ ID NO: 288670 - DNA, 2700 bp, Artificial Sequence
  derived and/or modified sequence
atgttattacttctgctgctcgctccactgttcttgaggccacctggtgccggcggcgctcagacaccaaacgctacatcagaagggtgccaaattatccaccccccatgggagggcggcatccggtatagaggcttgacccgggatcaggtaaaagctataaatttcctcccagtggactacgagattgaatacgtgtgcagaggagaaagagaagtcgtcggccctaaagttcgtaagtgtctggcaaacggcagttggaccgacatggatacaccgagccgatgtgtaaaccggacaccccattccgaacgccgggcggtctacattggtgccctttttccaatgagcggaggatggccaggcgggcaagcttgtcagccagcagtggaaatggcactcgaagatgttaacagcaggagggacatactgccggactatgagctaaagctgattcaccacgactctaagtgtgacccaggccaggctactaagtacctatacgagctgctttataacgacccaattaaaattattctcatgccaggatgttcttcagtgtctacactcgtcgccgaggccgctagaatgtggaacttaattgttctgtcatacggttcctcctcacctgctctgtctaatcgccaacgcttcccaacattctttagaacacatccttcagccacactgcacaacccaacaagagtcaagttatttgaaaaatgggggtggaagaaaatcgccactatacaacagactacagaagtcttcactagcactctggacgatttggaagagcgcgttaaggaagctggcatcgagattacatttcggcagtcattctttagtgatccagccgtaccagtaaagaatctgaagcgccaggatgcgagaattatcgtggggctgttttacgagaccgaggccaggaaagtgttttgcgaagtttacaaggaaaggttgtttggaaaaaaatacgtgtggttcctcataggctggtacgctgataactggttcaaaatctacgatccgtcgattaactgcactgtagacgaaatgactgaagctgtcgagggtcacattacgactgagattgtgatgttgaatccggccaatactagaagtatatcaaacatgacatcacaggagtttgttgagaaactcacaaagcgcctgaaaagacatcctgaagagactgggggattccaagaagccccgctggcatacgacgctatctgggcactggcactggccttgaataaaacttcaggagggggtggaaggtctggcgtaagattagaggactttaattacaataatcaaaccattactgatcaaatctatcgtgcaatgaactctagcagcttcgagggggtgtcaggccacgtggtgttcgacgcaagtgggtctcgaatggcctggactctgatcgagcaattacagggcggcagttacaagaaaatcggctactatgactctaccaaggatgatctgtcatggtccaagactgataagtggataggtggctcacctccagcggaccaaacactggtgatcaagacgtttcggtttctctcccaaaagttgttcatctcggtctctgtgttgtcgagtctgggcatcgttctggccgtggtatgtttgtctttcaatatctacaactcgcacgtccgttacatccaaaattcccaacctaacctcaacaatcttacagctgtggggtgctctctcgcccttgccgcggtatttccactgggcctggatggctatcatatcggcagaaaccaatttccctttgtctgtcaagcccgattgtggttattgggcctcggcttttcactgggttacggcagtatgtttaccaagatctggtgggttcacacagtgtttaccaagaaagaggaaaaaaaggagtggagaaaaacacttgaaccatggaagttatacgcaactgtaggtctgctggtggggatggacgtgctgacgctggccatatggcaaatagtggaccctttgcatcgcacaatcgagacgtttgctaaagaggagcccaaagaagatatagacgtttccattctgccccagctcgagcactgctcttctcggaaaatgaatacttggcttggcatattttacggctacaagggattgcttcttcttttgggcatcttcctggcctacgagacaaaatccgtgagcacagaaaagattaatgaccaccgggccgtcgggatggctatatataacgtcgcagttctttgtctcatcactgcgcctgtgactatgatcctttcctcccaacaagacgctgcctttgccttcgcctcacttgccatcgtgttctcatcatacataactctcgtggttttattcgtccctaaaatgaggcgcttgataactcggggcgagtggcaaagcgaggcccaggacactatgaaaaccggcagcagtaccaacaataacgaagaggagaagtctcgtctcctggagaaagagaaccgtgaattagagaagatcatcgcagaaaaggaagaaagagtgagcgaactgagacaccagctgcagtctaggcaacaactgaggtccagaagacatcccccaacacccccagagccgagcggagggcttccacgaggtccaccagaaccacctgataggctttcttgtgatggatctagagtgcatctcctatataagtag

SEQ ID NO: 288671 - DNA, 2700 bp, Artificial Sequence
  derived and/or modified sequence
atgttactactgttgttgcttgcacctctttttctgcgacctccaggtgcaggaggagcccagacgccaaatgctacctcagaagggtgccagattattcatccgccatgggagggcggcatccggtatagaggattaacgcgggatcaggtgaaggccataaattttctgccagtagattatgaaatagagtatgtctgcagaggcgagcgagaagtggtggggccaaaagtgcggaagtgccttgcaaatggaagttggacagatatggatactccaagtcgctgtgtgaaccgtaccccacactctgaaaggcgtgccgtctacataggcgctctctttcccatgtcaggcggatggccaggtgggcaagcttgtcagcccgcggtagagatggcactggaggatgtcaactctcgacgcgatatactccccgactacgaactgaagttgatacaccacgactctaaatgtgatcccggtcaggcaaccaagtatctatatgagcttctgtataacgatcctattaaaataattcttatgccggggtgctccagcgtatcaacattagtagctgaagccgcacgcatgtggaacttaatcgttctttcttatggaagctcctcaccagccctctctaacagacagcgctttcctacattttttaggacccatccttccgccacactccacaatcccaccagagtcaagttgttcgagaaatggggttggaaaaaaattgccactatccagcagaccactgaagtattcacctctacactggacgatttggaagaaagggtgaaagaagccggcatagaaatcacctttcgtcagagcttcttctccgatcccgccgtcccggttaaaaatctgaaaagacaagatgctaggataattgtcggactgttctacgagactgaggctcggaaagtgttctgtgaggtctacaaagaaagactgttcggcaaaaaatacgtgtggttcttaattggatggtatgcagataactggtttaagatttatgacccctccatcaattgtacagttgacgaaatgacagaagccgtggagggccacattactactgagattgtgatgttaaacccagcaaacactagatcaatttctaacatgacatcacaagaattcgtagaaaaactcactaaaaggctaaaaagacaccccgaagagaccggtggattccaagaagctcctctcgcctacgacgcaatctgggcattggcactggcactaaacaaaacaagtggtggaggcgggagatcaggggtgagattggaggactttaactacaataaccaaacaattaccgatcaaatttacagggccatgaatagttcctcctttgaaggcgtctcagggcatgtcgtcttcgatgctagcggatcacgaatggcctggacactcattgagcagctgcaaggaggatcctataaaaagatcggatactacgactccacaaaagatgatttaagctggtccaaaaccgacaagtggatcggcggctcccctccagccgaccagaccctcgtcatcaagacttttcggttcctgtcgcaaaagttatttatcagtgtatctgtcctatcttcgcttggcatcgtcctcgcagttgtgtgtctctcctttaatatatacaatagtcatgtgcggtatatccagaactcacaaccaaacctgaacaacctaactgccgtcggatgttccctcgctctggccgccgtctttcctcttggacttgatgggtaccatatcggcagaaaccagtttccctttgtctgccaggctagactctggctgttagggctgggtttctcattaggatatgggtctatgttcacaaaaatctggtgggtgcatactgtctttacgaaaaaggaagaaaagaaggaatggaggaaaacactcgaaccctggaagctatatgccaccgtgggactgcttgtcggaatggatgtgctgactcttgcaatttggcagatagttgatcctctccaccgtaccatcgaaacattcgcgaaggaagagcccaaagaggatatagatgtaagcatcttgccccaactggaacactgttcttccagaaagatgaacacctggctgggtattttttacggatacaaaggactgctgctgctgcttggtatcttccttgcgtacgaaactaagtccgtttcaaccgaaaaaatcaatgaccacagggccgtgggaatggccatttataatgtggcagtcttgtgcctcatcacagcccctgttactatgattctgtcctcccaacaggatgcagctttcgctttcgccagcttagctatcgtgttttcctcttacataactctagttgttttgtttgttcctaagatgcgccgcctcattacgcgcggtgagtggcaaagtgaggctcaagacaccatgaaaacaggctcctctacaaacaacaatgaggaagaaaagtcaagactgctggagaaggaaaaccgggaactggaaaaaattatagctgaaaaggaagaaagagtctctgaactcagacaccagctacaatccaggcaacagcttagatctagacgccatccacccactccccctgagccctctggtgggctgccacgtggacctccagagccccccgatagactctcatgtgatggatcgagagtgcatcttctttacaagtag

SEQ ID NO: 288672 - DNA, 2700 bp, Artificial Sequence
  derived and/or modified sequence
atgctgctccttctgctgctagcacctctgtttctacgccccccaggagctggaggtgctcagacacccaacgctacttcagagggctgtcagatcattcatcccccttgggaggggggaattagatatcgggggctgacacgcgatcaggtgaaggccattaatttcctgcccgtggactatgagattgaatatgtgtgtagaggagaaagagaagttgtaggaccaaaagtgcgaaagtgtctggccaatggctcatggaccgatatggataccccaagtaggtgtgttaaccgaacacctcatagtgagagaagagccgtgtacattggtgccctcttccctatgtctggtggttggcctggtggacaagcttgtcagccagctgtcgagatggcactcgaggatgtgaactctagaagggacatcctgccagactacgagctgaaacttattcaccatgactcaaagtgtgaccccggtcaggccactaagtatttgtatgagcttttgtacaatgatccaatcaaaattattctcatgccaggatgtagctccgtatcgaccttagttgcagaggccgctaggatgtggaacctcatcgtacttagctacggctccagtagccccgccctctcaaaccggcaacgcttcccaacttttttcagaactcatcccagcgccactctgcataatcctacccgtgttaaattgtttgaaaaatggggttggaagaaaatcgctactatccagcaaaccactgaggttttcactagcactctggacgatcttgaagaaagggtgaaagaagcaggtatcgagattacatttcggcagtccttcttttccgaccctgcggttcccgttaaaaaccttaaacgacaagacgcaagaattatagtgggtctgttctacgagactgaggccagaaaggtgttctgcgaggtgtacaaagaaagactgtttggaaaaaaatacgtgtggttcctcatcgggtggtacgccgataactggttcaagatatatgatccttccatcaattgcacagttgacgagatgaccgaggctgtggaagggcacattacgacggaaattgtcatgctaaatccagcgaatacaaggtcaatctctaacatgacaagtcaggagtttgtggaaaaattgacaaagaggctgaaacgacacccagaggaaacgggcgggttccaagaagcgccattggcctacgatgcaatttgggcactggctctcgcgcttaataagacgtctggcggcggaggcagaagcggcgtacggctcgaggatttcaactacaataaccagacaattaccgaccaaatttaccgagcaatgaatagtagctccttcgagggggtgtcaggacacgtggtatttgacgcatcaggaagtagaatggcctggactttgatcgaacaactgcaggggggatcctacaaaaagatcgggtattacgattccacaaaggacgatctgtcatggtctaagactgataagtggattggtggaagccctcccgcagaccaaacactcgtaatcaagacctttcgctttctctctcaaaaactctttatttccgtgtccgtcctgtcatctctcggtattgtcctcgctgttgtctgtctgtcattcaacatatacaactcacatgtgcgctatatccagaacagccagcccaacctcaataatctgaccgccgttgggtgctcactggctctggctgctgtttttcccctggggttagacggctaccacataggccgaaaccagtttccctttgtctgccaggcaagattgtggttactcggcctgggcttcagcctcggatacggttccatgttcacaaaaatttggtgggtccatactgtctttaccaaaaaagaagagaagaaggagtggaggaaaacgctcgagccctggaaactttacgccaccgtgggtctactggtaggaatggatgtcttaaccctcgccatctggcagatcgttgaccctttgcaccgcaccatagagactttcgccaaagaagaacccaaagaagatatcgacgtgtcgatccttccacagttggagcactgctcatctcggaagatgaatacctggctcggaatattctacggatataagggactactcctcctgttggggatcttcttagcttacgagactaaatccgtttccacagagaagataaatgatcatcgggccgtaggcatggcaatttataatgtcgctgttctctgtctcatcaccgcccctgtgaccatgatcctttccagtcagcaagatgcggctttcgcattcgcttcattagcaatcgtgttcagttcctatatcactctagttgtgttatttgtgcccaagatgagaaggttaattaccagaggagagtggcagtcagaagcacaagatactatgaagacaggatccagtaccaataacaatgaagaagagaaatcacggctgctggagaaggaaaatcgcgaactggaaaagattatcgcagaaaaggaggaacgggtctctgaattgcgtcaccaactgcagagcaggcagcagctgaggagcagaaggcatccccctactcccccggaaccttccggaggtctaccccgcggaccccccgaaccgcccgatcgcctttcatgtgacggttccagagtccacctgctgtacaagtag

SEQ ID NO: 288673 - DNA, 4013 bp, Artificial Sequence
  derived and/or modified sequence
atgttgctgctgctgctactggcgccactcttcctccgccccccgggcgcgggcggggcgcagacccccaacgccacctcagaaggttgccagatcatacacccgccctgggaagggggcatcaggtaccggggcctgactcgggaccaggtgaaggctatcaacttcctgccagtggactatgagattgagtatgtgtgccggggggagcgcgaggtggtggggcccaaggtccgcaagtgcctggccaacggctcctggacagatatggacacacccagccgctgtgtgaatcgaacgccacactcagaacggcgcgcagtgtacatcggggcactgtttcccatgagcgggggctggccagggggccaggcctgccagcccgcggtggagatggcgctggaggacgtgaatagccgcagggacatcctgccggactatgagctcaagctcatccaccacgacagcaagtgtgatccaggccaagccaccaagtacctatatgagctgctctacaacgaccctatcaagatcatccttatgcctggctgcagctctgtctccacgctggtggctgaggctgctaggatgtggaacctcattgtgctttcctatggctccagctcaccagccctgtcaaaccggcagcgtttccccactttcttccgaacgcacccatcagccacactccacaaccctacccgcgtgaaactctttgaaaagtggggctggaagaagattgctaccatccagcagaccactgaggtcttcacttcgactctggacgacctggaggaacgagtgaaggaggctggaattgagattactttccgccagagtttcttctcagatccagctgtgcccgtcaaaaacctgaagcgccaggatgcccgaatcatcgtgggacttttctatgagactgaagcccggaaagttttttgtgaggtgtacaaggagcgtctctttgggaagaagtacgtctggttcctcattgggtggtatgctgacaattggttcaagatctacgacccttctatcaactgcacagtggatgagatgactgaggcggtggagggccacatcacaactgagattgtcatgctgaatcctgccaatacccgcagcatttccaacatgacatcccaggaatttgtggagaaactaaccaagcgactgaaaagacaccctgaggagacaggaggcttccaggaggcaccgctggcctatgatgccatctgggccttggcactggccctgaacaagacatctggaggaggcggccgttctggtgtgcgcctggaggacttcaactacaacaaccagaccattaccgaccaaatctaccgggcaatgaactcttcgtcctttgagggtgtctctggccatgtggtgtttgatgccagcggctctcggatggcatggacgcttatcgagcagcttcagggtggcagctacaagaagattggctactatgacagcaccaaggatgatctttcctggtccaaaacagataaatggattggagggtcccccccagctgaccagaccctggtcatcaagacattccgcttcctgtcacagaaactctttatctccgtctcagttctctccagcctgggcattgtcctagctgttgtctgtctgtcctttaacatctacaactcacatgtccgttatatccagaactcacagcccaacctgaacaacctgactgctgtgggctgctcactggctttagctgctgtcttccccctggggctcgatggttaccacattgggaggaaccagttccctttcgtctgccaggcccgcctctggctcctgggcctgggctttagtctgggctacggttccatgttcaccaagatttggtgggtccacacggtcttcacaaagaaggaagaaaagaaggagtggaggaagactctggaaccctggaagctgtatgccacagtgggcctgctggtgggcatggatgtcctcactctcgccatctggcagatcgtggaccctctgcaccggaccattgagacatttgccaaggaggaacctaaggaagatattgacgtctctattctgccccagctggagcattgcagctccaggaagatgaatacatggcttggcattttctatggttacaaggggctgctgctgctgctgggaatcttccttgcttatgagaccaagagtgtgtccactgagaagatcaatgatcaccgggctgtgggcatggctatctacaatgtggcagtcctgtgcctcatcactgctcctgtcaccatgattctgtccagccagcaggatgcagcctttgcctttgcctctcttgccatagttttctcctcctatatcactcttgttgtgctctttgtgcccaagatgcgcaggctgatcacccgaggggaatggcagtcggaggcgcaggacaccatgaagacagggtcatcgaccaacaacaacgaggaggagaagtcccggctgttggagaaggagaaccgtgaactggaaaagatcattgctgagaaagaggagcgtgtctctgaactgcgccatcaactccagtctcggcagcagctccgctcccggcgccacccaccgacacccccagaaccctctgggggcctgcccaggggaccccctgagccccccgaccggcttagctgtgatgggagtcgagtgcatttgctttataagtgagggtagggtgagggaggacaggccagtagggggagggaaagggagaggggaagggcaggggactcaggaagcagggggtccccatccccagctgggaagaacatgctatccaatctcatctcttgtaaatacatgtccccctgtgagttctgggctgatttgggtctctcatacctctgggaaacagacctttttctctcttactgcttcatgtaattttgtatcacctcttcacaatttagttcgtacctggcttgaagctgctcactgctcacacgctgcctcctcagcagcctcactgcatctttctcttcccatgcaacaccctcttctagttaccacggcaacccctgcagctcctctgcctttgtgctctgttcctgtccagcaggggtctcccaacaagtgctctttccaccccaaaggggcctctccttttctccactgtcataatctctttccatcttacttgcccttccatactttctcacatgtggctccccctgaattttgcttcctttgggagctcattcttttcgccaaggctcacatgctccttgcctctgctctgtgcactcacgctcagcacacatgcatcctcccctctcctgcgtgtgcccactgaacatgctcatgtgtacacacgcttttcccgtatgctttcttcatgttcagtcacatgtgctctcgggtgccctgcattcacagctacgtgtgcccctctcatggtcatgggtctgcccttgagcgtgtttgggtaggcatgtgcaatttgtctagcatgctgagtcatgtctttcctatttgcacacgtccatgtttatccatgtactttccctgtgtaccctccatgtaccttgtgtactttcttcccttaaatcatggtattcttctgacagagccatatgtaccctaccctgcacattgttatgcacttttccccaattcatgtttggtggggccatccacaccctctccttgtcacagaatctccatttctgctcagattccccccatctccattgcattcatgtactaccctcagtctacactcacaatcatcttctcccaagactgctcccttttgttttgtgtttttttgaggggaattaaggaaaaataagtgggggcaggtttggagagctgcttccagtggatagttgatgagaatcctgaccaaaggaaggcacccttgactgttgggatagacagatggacctatggggtgggaggtggtgtccctttcacactgtggtgtctcttggggaaggatctccccgaatctcaataaaccagtgaacagtgtgactcgg

SEQ ID NO: 288674 - DNA, 2700 bp, Artificial Sequence
  derived and/or modified sequence
atgctgctgctgctgctgctggcccccctgttcctgagaccccccggcgccggcggcgcccagacccccaacgccaccagcgagggctgccagatcatccaccccccctgggagggcggcatcagatacagaggcctgaccagagaccaggtgaaggccatcaacttcctgcccgtggactacgagatcgagtacgtgtgcagaggcgagagagaggtggtgggccccaaggtgagaaagtgcctggccaacggcagctggaccgacatggacacccccagcagatgcgtgaacagaaccccccacagcgagagaagagccgtgtacatcggcgccctgttccccatgagcggcggctggcccggcggccaggcctgccagcccgccgtggagatggccctggaggacgtgaacagcagaagagacatcctgcccgactacgagctgaagctgatccaccacgacagcaagtgcgaccccggccaggccaccaagtacctgtacgagctgctgtacaacgaccccatcaagatcatcctgatgcccggctgcagcagcgtgagcaccctggtggccgaggccgccagaatgtggaacctgatcgtgctgagctacggcagcagcagccccgccctgagcaacagacagagattccccaccttcttcagaacccaccccagcgccaccctgcacaaccccaccagagtgaagctgttcgagaagtggggctggaagaagatcgccaccatccagcagaccaccgaggtgttcaccagcaccctggacgacctggaggagagagtgaaggaggccggcatcgagatcaccttcagacagagcttcttcagcgaccccgccgtgcccgtgaagaacctgaagagacaggacgccagaatcatcgtgggcctgttctacgagaccgaggccagaaaggtgttctgcgaggtgtacaaggagagactgttcggcaagaagtacgtgtggttcctgatcggctggtacgccgacaactggttcaagatctacgaccccagcatcaactgcaccgtggacgagatgaccgaggccgtggagggccacatcaccaccgagatcgtgatgctgaaccccgccaacaccagaagcatcagcaacatgaccagccaggagttcgtggagaagctgaccaagagactgaagagacaccccgaggagaccggcggcttccaggaggcccccctggcctacgacgccatctgggccctggccctggccctgaacaagaccagcggcggcggcggcagaagcggcgtgagactggaggacttcaactacaacaaccagaccatcaccgaccagatctacagagccatgaacagcagcagcttcgagggcgtgagcggccacgtggtgttcgacgccagcggcagcagaatggcctggaccctgatcgagcagctgcagggcggcagctacaagaagatcggctactacgacagcaccaaggacgacctgagctggagcaagaccgacaagtggatcggcggcagcccccccgccgaccagaccctggtgatcaagaccttcagattcctgagccagaagctgttcatcagcgtgagcgtgctgagcagcctgggcatcgtgctggccgtggtgtgcctgagcttcaacatctacaacagccacgtgagatacatccagaacagccagcccaacctgaacaacctgaccgccgtgggctgcagcctggccctggccgccgtgttccccctgggcctggacggctaccacatcggcagaaaccagttccccttcgtgtgccaggccagactgtggctgctgggcctgggcttcagcctgggctacggcagcatgttcaccaagatctggtgggtgcacaccgtgttcaccaagaaggaggagaagaaggagtggagaaagaccctggagccctggaagctgtacgccaccgtgggcctgctggtgggcatggacgtgctgaccctggccatctggcagatcgtggaccccctgcacagaaccatcgagaccttcgccaaggaggagcccaaggaggacatcgacgtgagcatcctgccccagctggagcactgcagcagcagaaagatgaacacctggctgggcatcttctacggctacaagggcctgctgctgctgctgggcatcttcctggcctacgagaccaagagcgtgagcaccgagaagatcaacgaccacagagccgtgggcatggccatctacaacgtggccgtgctgtgcctgatcaccgcccccgtgaccatgatcctgagcagccagcaggacgccgccttcgccttcgccagcctggccatcgtgttcagcagctacatcaccctggtggtgctgttcgtgcccaagatgagaagactgatcaccagaggcgagtggcagagcgaggcccaggacaccatgaagaccggcagcagcaccaacaacaacgaggaggagaagagcagactgctggagaaggagaacagagagctggagaagatcatcgccgagaaggaggagagagtgagcgagctgagacaccagctgcagagcagacagcagctgagaagcagaagacacccccccaccccccccgagcccagcggcggcctgcccagaggcccccccgagccccccgacagactgagctgcgacggcagcagagtgcacctgctgtacaagtag

SEQ ID NO: 288675 - DNA, 2700 bp, Artificial Sequence
  derived and/or modified sequence
atgctgcttctacttttactcgcgccactgtttcttcgtcccccaggcgctggaggagcccaaactcccaacgcaacaagtgagggttgccagattatacatccaccttgggaggggggcatccgttaccggggtcttacccgcgaccaggtgaaggccataaatttccttccagtcgattacgagatagaatacgtgtgccgtggggagcgagaagtggtgggtcccaaagtccgcaagtgcctggccaacggcagttggaccgatatggataccccctcacggtgtgtcaaccgtacccctcattccgaacggagggccgtttatatcggtgcccttttccccatgtcgggaggttggccgggtggtcaagcgtgtcagcctgctgtagagatggctctcgaggacgttaactccaggagggacatactgccggattatgagctgaaactgattcaccacgattctaaatgcgatccgggccaagccactaaatatctgtacgaactgctgtataatgaccctatcaagatcatcttgatgcccgggtgcagctccgtgtccacactagtcgcggaggccgcgaggatgtggaatcttatcgtgttatcctacggatcaagctcccctgcgctctccaacaggcagcggttccctactttcttcaggacccacccttctgctacccttcataatcctacacgtgttaagctctttgaaaaatgggggtggaagaaaattgcaacgatacaacagaccacagaggtgtttaccagtaccctcgatgatttagaggaacgcgtgaaagaagcaggcatagaaattacctttagacagagctttttctcagatcctgccgttcccgtaaaaaatctgaaacgtcaggacgcacgcattatcgttgggcttttctatgaaaccgaagctcgcaaggtcttttgcgaggtgtataaggagcgcctttttggtaagaaatacgtctggtttctgattggttggtacgcggacaactggttcaagatctacgatccgtcaatcaactgcactgtggatgaaatgactgaggccgtagaaggccacataactacagagatagtaatgctgaacccagccaatactcggtcaatctccaacatgacctcccaagagttcgtggagaaactgactaagcgtcttaaacggcatcctgaagaaaccggaggcttccaggaggcccccttggcctatgacgcgatttgggctctggccctggcccttaataaaacatccggtggaggtggaagatctggcgttagactagaggacttcaattacaataatcaaaccatcactgaccagatttacagggccatgaacagctcttcttttgagggagtcagcggacacgtggtgttcgacgcctcagggtcgcgaatggcttggaccctcatcgagcagttgcagggcggtagttacaagaaaataggctattacgattccaccaaagacgatctgagttggtctaaaactgataagtggattggcggtagcccaccagcggatcagacgttggtgatcaagacttttcgtttcctctctcaaaaactgtttataagcgtttctgtgctatctagcctaggtatagtgctggccgtggtgtgtctgtccttcaacatctacaacagtcacgtgcgttacattcagaattctcagcccaacctgaataatctgacagctgtgggatgttctctggcactagcagccgtgttccccctgggcttagacggctaccatattggccgaaaccaatttcccttcgtgtgtcaggctcgattgtggcttcttgggctagggttttcgcttggctacggatcgatgtttaccaagatctggtgggtgcacactgtcttcactaaaaaggaagagaaaaaggagtggaggaagaccttagaaccctggaaactgtatgccaccgtgggattgctcgttgggatggatgttctgacactcgcaatttggcaaatcgtggaccctctccaccgcaccattgaaaccttcgcaaaagaggagccgaaggaagacatcgacgtgtcgattctgccccaacttgagcactgctctagcaggaaaatgaatacttggctggggattttctacggctacaagggattgctgctgttattgggcatcttcctcgcctacgaaacaaaaagcgtgtcaacagaaaagatcaatgatcatagggctgtgggaatggcaatctataatgtggcggtcctgtgtctgataactgcgccagtgacgatgattctgagtagtcagcaggatgccgcgtttgctttcgcgtctcttgcaatcgttttcagctcatacataacactggtggtcctctttgtgccaaagatgaggcggctgatcactaggggagaatggcagtcagaagcccaggacactatgaaaaccggctccagtacaaacaataacgaggaggaaaaatcccggcttctggagaaagagaaccgggagctggagaaaatcattgctgagaaggaggagcgcgtgtctgagcttaggcaccagctgcagtcacgacagcagcttaggagtaggagacatcccccaactcctcctgaaccttccgggggcctgccgagaggccccccggagcccccagaccgcctttcttgcgatggaagccgagtgcacctgctgtacaagtag

SEQ ID NO: 288676 - DNA, 2700 bp, Artificial Sequence
  derived and/or modified sequence
atgcttcttctgctcctgttagctcctcttttcctgcggccacctggggctgggggcgctcagacgcctaatgcgacaagcgagggctgtcagatcattcacccgccctgggaaggcggaattcggtaccgaggattaactagggatcaggtcaaggccatcaatttcctgccagtggactacgaaatcgagtacgtgtgtaggggtgaaagggaggtggtaggccctaaggttcgcaaatgcttggctaatggatcttggacagatatggataccccaagtaggtgtgtgaaccggaccccccactcagagcgcagggcggtgtatataggagccctctttcccatgtcaggtggatggccaggcggacaggcctgccaaccagcagtggaaatggcgttggaagatgtgaactcacgacgagacattctgcccgattacgagctgaagctcattcaccacgactcgaagtgcgaccccggacaagccaccaagtacttgtatgagttgttgtataacgatcccattaaaattatcctgatgccaggttgttccagcgtaagcacactcgtcgccgaggcagccagaatgtggaatcttatcgttctgagttacggatccagctcccccgcactgtccaatagacaacgttttcctaccttcttcaggacacaccctagcgctacccttcataatcctactcgggtgaagttgtttgagaaatggggctggaagaaaatcgcaacaatccagcagaccaccgaggtcttcacttccacccttgatgatcttgaagagcgagtgaaggaggcaggtattgaaatcactttccgacaatcatttttctctgatcccgccgttccggttaaaaacctgaagaggcaggacgcacgaattatcgtcgggctgttctacgagacagaagcccgtaaggtgttctgcgaggtctataaagagcgccttttcgggaagaagtacgtgtggttcctcatcggatggtacgctgacaattggttcaagatttacgacccgagcatcaattgtactgtagacgaaatgaccgaggcagtagagggacacattacgaccgagattgtcatgctgaatccggctaatacacgaagcatctcaaacatgacgtctcaggaattcgtggagaagctcaccaagcgtttaaaacgtcatcccgaggagacaggaggattccaggaggcacccctcgcttatgacgcaatatgggcccttgcattggccctcaacaagaccagcggagggggcggtcgcagtggagtgaggttagaagactttaactacaacaaccagacaatcacagatcagatctatagggccatgaactcgtcttctttcgaaggtgtatccggacatgtggtgtttgacgcgtctggcagccgaatggcgtggaccctgattgagcagttacagggtgggtcctataagaaaataggctattatgatagcaccaaggatgacctgtcatggtcaaaaacagacaaatggatcggcggttccccacccgcagatcaaaccctggtcattaaaacgttccggttcctctcacagaaactgtttatcagtgtcagcgtgttatcctctcttggtatcgtgcttgcagtggtgtgtctctcattcaatatttacaattctcacgttaggtacatacagaactcccaacctaatctgaataatctcaccgcagtgggatgctcactggcactcgcggcagtctttccacttggattagatggttaccacattggtcggaatcagtttcctttcgtgtgccaggcacggctttggttactggggctggggtttagcttaggctacgggtccatgtttaccaaaatttggtgggtgcataccgtgttcacaaagaaagaagagaagaaagagtggcgcaaaacactggagccttggaagctgtatgctaccgtaggactccttgtggggatggacgttctgaccctagctatttggcagatagttgatcctctgcatagaactattgagaccttcgccaaagaggagccgaaggaggatatcgacgtgtctatattgccccagctggagcactgttctagcagaaaaatgaatacatggctcggcattttctatgggtacaaaggccttctgttgctgcttggcatctttctcgcgtatgagaccaagtctgtgtctaccgagaagatcaacgaccaccgggccgtagggatggcgatctacaacgtcgcagtattgtgccttatcacagcgcctgtgaccatgatcctctccagccaacaggatgccgcctttgctttcgctagcctcgctattgttttctcgtcctatataaccttggtcgttctgttcgtgcccaaaatgaggcggttaataacaaggggtgaatggcagtcagaggctcaggatactatgaaaactggatcttccactaataataacgaggaagagaaaagtcgcctgcttgaaaaggagaacagggaactcgagaaaattattgccgaaaaggaggagcgggtcagcgaactgcgccaccagctacagagcagacagcagctccgaagccgacggcacccaccgacaccaccagagccgtccgggggtctgcctagagggccacccgaacctccagacaggctgagttgcgacggtagccgcgtccacctgctttataaatag

SEQ ID NO: 288677 - DNA, 2700 bp, Artificial Sequence
  derived and/or modified sequence
atgctcctgcttttgctgctagcccctctattcctcagaccgcccggggcagggggggcccaaaccccaaatgcgacctctgaaggctgtcaaatcattcacccaccatgggaaggggggattaggtaccggggactgacccgcgaccaggtgaaggctatcaactttctgccagtagattatgaaatcgaatacgtctgccgtggggagagagaagtggtaggaccaaaggtacgtaagtgcctcgccaacggaagttggactgatatggataccccatcccgctgcgttaacaggaccccccactctgagaggcgggctgtgtacatcggggcactgtttccgatgtctggcgggtggcctggcggccaggcttgccagccagcggtggaaatggctttggaggacgtcaattctaggagagatattctgcccgactatgagttgaaactcatccaccacgattctaagtgtgaccctggccaggctactaagtacctctacgagttgttatataatgatcctatcaagattattttaatgccgggatgctcctccgtgtccaccctggtggcggaagccgcccgcatgtggaacctcatagtgctcagctatggtagtagctccccagcactctccaaccgacagcgatttcccaccttctttagaacccatccctccgcaaccctgcacaatcccaccagagtaaaattattcgagaagtggggatggaaaaaaatagctactatccagcagactactgaggtattcacgagtaccctcgacgatctggaagagcgcgtgaaagaggcaggtattgagattacctttcgtcaaagcttcttttcagatccagcggtaccagtaaagaacctgaagaggcaggatgcacggatcatagtgggactgttttacgagaccgaagctaggaaagtcttttgtgaggtatataaggagcggctgttcgggaagaagtatgtgtggtttctgatcggatggtatgccgataactggttcaaaatttatgatccctcaatcaattgcacagtcgacgagatgacagaggcagtggaggggcatattaccaccgagatcgtcatgctgaaccctgcaaatacccgtagcatcagtaatatgacctctcaagaatttgtggaaaaactcacgaagagactaaagcgacaccccgaagaaaccggagggttccaagaggcccccctagcatatgatgcaatctgggccttggcgctcgcacttaataagacgtccggtgggggtggtaggagcggcgtaaggctcgaggatttcaactacaacaaccagaccattactgaccagatctatagagccatgaattcctcctcatttgagggtgtgtctggacacgtggtttttgacgcctccggatcacggatggcgtggactctgattgagcagctacagggcggctcatataaaaaaattggctattatgattcaaccaaagacgacctctcctggtccaaaaccgataagtggattggagggtctccgccagccgatcagacactggtaattaagaccttccggtttttatcccagaaactcttcatcagcgtgtccgtgcttagcagcttaggaatcgttcttgccgtcgtgtgcctttctttcaatatctataacagccatgtccgctacattcagaactcccagccgaacctaaataatctgactgcagttggatgctcgttagccctggctgcggtgtttcccctggggctggatggataccacataggacgcaatcagtttcccttcgtgtgtcaagcacggttatggctactcggcctgggattttcccttggttacggctcaatgttcaccaaaatctggtgggtgcatactgtcttcacgaagaaagaggagaagaaggagtggagaaagacactcgaaccctggaagctgtacgccacagtgggcctgctggtgggcatggatgtactaaccctggcaatctggcagatcgtggatcctcttcaccgcacaatcgaaacatttgccaaagaggagccaaaagaggacatcgacgtctccatattgccgcagctggagcactgtagctccagaaagatgaacacttggctgggaatcttctacggctataaaggactcctgctgttgctggggatcttcctggcttatgaaacaaagtctgtgagcaccgagaaaatcaatgatcaccgtgcggtcgggatggccatttataatgtggctgtactttgccttatcactgcccctgtaactatgatcctgtcaagccagcaggatgcagcttttgccttcgccagcttagcgatcgtgtttagtagttacatcacccttgtcgtgctgtttgttccaaagatgagacgcctcatcacccgcggcgagtggcagagtgaggcccaagatacaatgaaaactggttcgagcaccaataacaacgaggaggaaaaatcaaggctcctcgaaaaggagaacagagagctagagaagatcatcgccgagaaggaagagagagtatcagagctccggcatcaactgcagtctagacagcagctgcggagtcgtcgccaccccccaactcccccggagccctccggggggctgcctagaggaccaccagagccaccagatcgactctcctgtgacggaagtcgcgttcacctattgtacaagtag

SEQ ID NO: 288678 - DNA, 2700 bp, Artificial Sequence
  derived and/or modified sequence
atgctactcctcctgctcttagcgcccttatttctgcggcctccaggggcgggtggggcccaaactcctaatgcaacatcagagggatgtcagattattcatcctccctgggagggtggcatacgctatcgcggcttgactcgcgatcaggttaaagcaatcaattttttacccgtcgactacgaaatcgagtacgtatgcaggggagagagagaagtggtgggtccaaaggtgcgcaaatgcctcgccaatgggagctggactgacatggataccccttctaggtgcgttaatcggacaccacatagcgaacgccgggccgtttacattggcgccttgttccctatgtcaggagggtggccggggggtcaagcatgtcagccagcggttgaaatggcgttggaggacgtaaactctcgcagagacatcttacccgattacgagctaaaactcattcaccacgattcaaaatgtgacccagggcaggctaccaaatatctctacgagctattgtataacgatcccatcaagatcatattgatgcctggatgctcatctgtttctactctcgtggcagaggctgctcgaatgtggaatctgatcgtactgagttacggttctagttccccagccctgtctaaccgacagcgttttccaactttctttcggacccacccgtctgcaaccctgcacaaccccaccagggtgaaattgttcgaaaagtggggctggaagaaaatagcaaccatacagcagaccacggaggttttcacctccaccctggacgacctggaggagagagttaaggaagccggtattgaaatcaccttccgccagtcttttttctcggaccctgccgttccagtcaagaaccttaagcgccaagacgcccgaattatcgtcggattgttctatgagactgaagcacggaaagttttttgtgaagtttacaaggagcgtctgttcgggaaaaagtacgtgtggttcctcatcggctggtacgccgataactggttcaagatctatgaccctagcatcaactgcactgtggatgagatgactgaagcagtggaaggccatatcacaactgagatcgtgatgttgaacccggccaacacaaggtccatcagtaatatgacatcccaggagttcgtcgagaagttgacgaaacgtttaaaaagacaccctgaggagactgggggctttcaggaggctccactggcctacgacgcaatttgggccctggccctggccctcaataagacgtcagggggtggagggagaagcggggtgcgcctagaagactttaattacaataaccagactatcacggaccagatctatcgggcaatgaactcctcgtccttcgagggtgttagtggtcacgtcgtgttcgacgcctctggatcacgcatggcatggacactgattgaacaactgcagggggggagctataagaaaataggatattatgacagtacaaaggacgacttatcctggagcaagaccgataaatggattgggggatccccccccgccgatcaaaccttggttatcaagacctttaggttcctaagccaaaagcttttcatctcagtctcagtactaagttctcttggcatagttctcgcggtcgtgtgcttgtcctttaatatatacaatagccatgtaagatatattcaaaatagtcagcctaatctgaacaatctaaccgccgtggggtgttctctggctctggctgcggtgtttcctctgggattagatggctatcatatcggaagaaaccagtttccatttgtgtgtcaggcccgactttggttgctgggcctgggattctcgctgggttacgggtctatgttcaccaaaatatggtgggttcacacagtgtttacgaaaaaagaagaaaagaaggagtggcgcaagacgctggaaccctggaaactgtatgcaactgtgggactgctcgtggggatggatgtcctcaccttggctatctggcagatcgtcgatcccttacaccggacgatagaaaccttcgctaaagaggagcccaaggaagacatcgatgtgtccatccttccacagctggagcactgctcctctagaaagatgaatacatggttgggtattttctacggctataagggtctcttattgctattgggcattttcctcgcttacgagactaagtcagtgtccacggaaaaaatcaatgatcatcgggctgtcggaatggctatttacaacgtcgcggtcttgtgtctcatcactgccccggtaaccatgatcctgtccagccaacaggatgccgcctttgctttcgcctcactggctatagtgttcagttcttatatcaccctggtagtgcttttcgtgcctaaaatgcgacggctaatcaccaggggggagtggcagtctgaagctcaagacactatgaaaactggttcctcaaccaataacaacgaagaagagaaatctaggctgcttgagaaagaaaacagagagcttgaaaagatcatcgccgagaaggaggaacgcgtcagcgaactgcggcatcaattgcagtcaagacaacagctgcggtctaggcggcatcctcccacccctccagagcccagcgggggcctgcctcggggcccacccgagccaccggataggctatcctgtgatggttcacgggtgcacctcctgtataagtag

SEQ ID NO: 288679 - DNA, 2700 bp, Artificial Sequence
  derived and/or modified sequence
atgctgctacttctgctgctggctcccctgttcctcaggcctcctggcgcgggcggtgcacagaccccgaacgcgacctctgaaggttgtcagattattcacccaccatgggaggggggaatcagataccgaggcctgaccagggatcaggtgaaagccattaattttctgcctgtcgattacgaaatagagtacgtgtgccggggagaaagagaggtagtcggaccgaaagtgcggaagtgtctggcgaatggttcttggacagacatggatacaccgtccaggtgtgtgaacaggacaccccattccgagagacgggctgtgtacatcggagcgctcttccctatgtctggaggatggccgggtgggcaggcgtgtcagcctgccgtggagatggcactggaagacgtgaacagtcgtagggatatacttccggattatgagctcaaattgatacatcacgacagtaagtgcgaccctggacaagccactaaatacctgtacgagttgctttataatgacccaatcaaaattatcctgatgcctgggtgttcaagcgtgtctacgctcgtcgcagaagctgcccgtatgtggaacttgatcgtgctctcttatggaagcagttccccagcactttctaatagacagaggtttcccaccttcttcagaacacaccctagcgccaccctgcacaatcctactagagtaaaattattcgaaaaatggggatggaagaagatcgctacgattcagcagacaactgaagtgttcacctccacgttagatgacctcgaggagagggtcaaggaggctgggattgaaatcaccttcaggcagtcgttttttagcgatccagcagttccagttaagaacctgaaacgtcaagatgcgcggattatcgtggggctgttttatgaaactgaggcacggaaggtgttctgcgaggtctataaggagcgacttttcgggaagaagtacgtttggtttttgatcggctggtatgccgacaattggtttaagatctacgatccttccatcaattgcactgtggacgagatgaccgaagctgtcgaaggtcacattacaactgaaatcgtgatgttgaacccagctaacacccgcagtatcagcaatatgacatctcaagagttcgtcgagaaactgacaaaaagacttaagcggcacccagaggagacagggggcttccaggaagcccctctcgcgtacgatgctatctgggcactggccctggccttaaacaagactagcggaggcggggggcggagtggcgtccggttggaggacttcaattataacaatcagacgatcactgatcaaatttacagagcgatgaacagctccagttttgagggggtctcgggtcatgtggttttcgatgcatctgggtcaaggatggcctggaccctgatagaacagctgcagggcggttcttacaaaaaaatcggctattatgacagtactaaggatgatctgagttggtcaaaaacagacaaatggatcggtgggtcaccaccagctgatcagacactggtgattaaaacttttaggtttctttctcagaagctgttcatctctgtttcggttctcagctcgctgggaatcgtgctggccgttgtgtgtctatcctttaatatctataactcacatgtacggtacatacagaattcacagccaaatcttaacaacctgacagcagtcggctgttctttagccctggccgctgtgtttcccctggggttggatggataccacattggacgaaaccagttcccctttgtgtgccaggcacggctgtggctgcttggcttagggttttccctgggttacggaagtatgtttaccaagatatggtgggtccacaccgtgttcactaagaaggaggagaaaaaggaatggcgaaagaccctggagccctggaaactgtacgcgactgtaggtctgctcgtagggatggatgtactaactctcgccatatggcagatcgtggatccccttcaccgtacaatagaaactttcgccaaggaggaaccaaaagaagacatcgatgtttctatcttgccgcagttagagcattgtagtagtcgaaagatgaatacatggcttggaattttttacggatataagggcctgctcctgttacttggcatctttctggcctacgaaactaagtccgtgtccaccgagaagattaatgaccaccgggccgtgggcatggcaatctataatgtcgccgtgctgtgccttattactgcaccagtgaccatgatccttagcagccagcaggacgccgcattcgcctttgcgagtctggctattgtcttcagttcatacataacgctggtagtgctcttcgtccccaagatgcgcagactgattactagaggcgagtggcaaagtgaagctcaggacaccatgaagaccggatcaagcaccaacaacaatgaggaggaaaaatcgcgtcttttggagaaggaaaatagggagcttgagaagatcattgccgaaaaggaagagcgtgtttctgaactgcgacatcagctgcagtcccgccagcaacttcggtccagacgacacccccctactcccccagagcccagcggggggctccccagaggccctcccgagccaccagacaggttgagctgtgacggaagcagggtgcatctgttatacaagtag

SEQ ID NO: 288680 - DNA, 2700 bp, Artificial Sequence
  derived and/or modified sequence
atgctgctactgctgcttctggcccccctgtttctgcgacccccaggtgccggcggcgcgcagaccccaaatgccaccagtgaaggatgtcaaatcatccaccctccttgggagggcggcataaggtatcggggcctcactcgggaccaggtgaaggccattaattttctgcctgtggactacgagattgaatacgtctgcagaggcgagcgggaagtcgttggtccaaaagtgcgcaagtgcctcgctaatggaagctggactgatatggacacacctagtcggtgtgtgaataggaccccacattcagaaagacgggccgtatatataggagcccttttccctatgagcggcggttggcccggtggtcaggcctgtcagcctgccgtggagatggccctggaggacgtgaattctcgccgtgacattcttccagattacgagcttaagttgatccatcatgactccaaatgtgatccaggtcaagcgaccaaatacctgtacgagctgttgtacaatgaccccattaaaattatccttatgccaggatgctcatcagtttcgacactggtggccgaggccgcccggatgtggaacctcatagtcctttcatatggttcatcttcacccgccctgtccaataggcagcggtttcccacgtttttcagaacacaccccagtgcaaccttacataaccccacaagggtgaaactgtttgagaaatgggggtggaagaagattgctaccattcaacagacaacagaggtgtttactagcactctggatgacctcgaggagcgagttaaagaagctggcattgaaatcacttttagacagtcgtttttttccgaccctgcagtgcctgtcaagaatcttaaaaggcaggacgcaagaatcatcgtggggctcttctatgagacagaagcccgaaaggtgttttgtgaggtgtacaaggaaaggttgtttggcaagaagtacgtgtggtttctgatcggctggtacgctgataactggttcaaaatctatgaccctagcatcaactgcacagtggacgagatgaccgaggccgttgaggggcatattactactgaaatcgtgatgctaaatcccgctaatacccgctccatctctaacatgacatctcaggaattcgtcgagaagctgactaaaagactgaagcgccaccccgaggagaccggcggctttcaggaggctcctctcgcctatgacgccatttgggctttggctcttgctctgaataagacatcgggagggggtgggcgctcaggtgtccggctggaggacttcaactataataaccagaccataacagaccagatctaccgcgcaatgaactctagcagcttcgaaggtgtgagcggccacgtagtgtttgacgcctcaggatcgcgcatggcttggactctcatcgaacagttacagggggggtcttataagaagattggctattacgacagtaccaaagacgatctgagctggagtaagaccgataagtggatcgggggctcgccaccggctgatcagacattagtcattaaaaccttccgttttctgtcccagaaattgtttatctccgtgagtgtactcagctcccttggtatagtactcgctgtcgtgtgcctgtcttttaatatttacaactcacacgtgcgatacatccagaactcgcagccaaaccttaacaatctcacagctgtgggttgtagcctcgccttggctgcagtctttccacttggcctcgacgggtatcacattggcagaaaccagtttccctttgtctgtcaggctagactgtggttgctgggcctaggcttctcattaggctatggatcgatgtttacaaagatttggtgggtgcatactgtgttcactaaaaaggaagaaaagaaagaatggaggaagaccctggaaccttggaaactctatgccacagtggggctgttggtcggaatggacgtactgacactcgctatctggcagattgtggacccccttcatcggacaatcgaaacttttgccaaagaggaacccaaggaggatattgatgtaagcatcctaccacaactggagcattgcagctccaggaagatgaatacctggctcggtatattttacggctacaaggggctgctgttgcttctcggcatttttctcgcttatgaaacaaaatctgtgagcacggagaagattaatgatcaccgggcagtcgggatggctatctataacgttgcagtattgtgtcttatcacggcccccgtgaccatgattctgagctcacagcaagacgcagctttcgcgttcgctagcctggccatagtcttctcaagctacatcaccctagtcgtactgtttgtgcccaagatgcggcggcttataacacgcggtgaatggcagagcgaggcacaggacaccatgaagaccggttccagtaccaacaacaatgaagaagaaaagtcccgcctcctggaaaaagagaatcgcgagctggaaaagatcatagccgagaaggaagagcgggtctctgaactgaggcaccagctgcagtcccgacaacagctgcgctcccggcggcaccctccaactccccccgagccatctggtgggctcccccgcggtcctcctgaacctcccgaccgcctttcgtgcgacggctctcgggtgcatcttctatataagtag

SEQ ID NO: 288681 - DNA, 2700 bp, Artificial Sequence
  derived and/or modified sequence
atgttactcctgctcctcctggccccattgtttctgcggcctccaggggccggcggggctcagaccccaaatgccacctcagaaggatgtcagatcatccacccgccgtgggaggggggtattcggtacaggggcttgacacgggatcaggtgaaagccatcaattttctgcccgtcgattacgagattgagtatgtgtgccgtggcgagcgggaggttgtcgggccaaaagtaaggaaatgtttagcgaatggatcttggacagatatggatacaccgtcccgttgcgtcaaccgcactccacattccgagagacgcgcagtgtatattggcgctctgtttcctatgtccggagggtggccagggggtcaagcttgtcagcctgcagtggagatggctctggaggatgtcaactcacgacgcgacattctcccagattacgagttaaaactcattcatcatgattccaaatgcgaccccggacaggctactaagtacctctacgaactgctgtacaacgatcctatcaaaatcattctgatgcctggctgctcaagcgtgagcacgttggtcgccgaggccgctaggatgtggaacctgatcgtcctgtcgtatggaagcagtagccccgccctgagcaatagacaacgatttcctactttcttcagaacacatccctctgccaccctccacaacccaacccgggttaagctctttgagaaatggggctggaagaagatcgccacaatacagcaaaccaccgaagtatttacaagtacactggacgacttagaagaaagggtcaaggaggccggcattgaaattactttccgccaaagcttcttcagtgatcctgccgtgcccgtgaagaatttgaagaggcaagatgcaagaattattgtcggcctcttctatgagaccgaggctcgcaaggtcttttgtgaagtgtataaggagaggttgttcggaaagaagtacgtctggttccttatcggttggtacgccgacaattggtttaagatctacgatccgagtattaactgtacggttgacgagatgactgaggccgtcgagggccacatcacaactgagatagtgatgctgaatcctgcgaacacacgaagcataagtaacatgaccagccaggagttcgtggagaaactgacaaagcgtctgaagcggcatccagaagagacaggcggattccaggaggcccccctggcctacgacgcaatctgggcccttgccctggcccttaataaaactagtggtggcggggggagatccggcgtgaggttggaggatttcaactacaacaaccagacaattacagaccaaatatatagggctatgaactctagctcttttgaaggtgtgtccggccatgtggtctttgacgcatcaggttcaaggatggcgtggacccttattgagcaactacagggaggttcgtacaaaaagatcggatactacgacagtacaaaggatgatttgtcttggagcaagaccgataagtggatcggtgggagtcctccagccgaccagacccttgtaattaaaaccttccgctttttgagtcagaaactcttcatttctgtatccgtgctgtcgtccctgggaatcgtccttgcagtggtgtgcctgtcatttaatatatacaatagccacgtgagatacatccagaattcacagccgaacctgaataatctaactgccgtggggtgcagcctggctttagccgccgtgtttcctctgggcctggatggataccacattggccggaatcagtttcctttcgtgtgtcaggcacgcctatggcttctgggcctcggattttccctgggctacggctccatgttcaccaagatatggtgggttcataccgtcttcaccaagaaggaggagaaaaaggagtggcggaagacactggaaccatggaaactatacgccacagtcgggctcctggtcggaatggatgtgctcacactagccatctggcagatagtcgacccgctgcatagaaccatcgaaactttcgctaaggaggagcctaaggaagatatcgatgtttccatcctaccgcaactggaacactgcagttcaagaaagatgaatacgtggctgggaatcttctacgggtataaaggtttattacttctgcttggtatcttcctggcatatgagaccaaaagcgtcagcacagagaaaatcaacgaccaccgggctgttggcatggccatctacaacgtcgctgtgctttgtcttattacagctcccgttaccatgatcctatcttcccaacaagatgcagcttttgcttttgcctccttagcaatcgtgttttcctcctacatcactttggtggttctctttgtgccaaaaatgcgcaggctgatcactcggggagaatggcaaagtgaggctcaggacacaatgaagactggtagttcaacgaacaacaacgaagaagagaaaagtcgattacttgaaaaagagaatagagagttggagaaaatcatcgccgagaaagaggagagagtgtctgagttacgccaccagctgcagtcgcggcagcaacttaggagcagacggcatccccccaccccccccgaacccagtggtggactgccccgtggaccccctgagccaccggaccgtctgtcatgcgatggaagtagagtgcacctgctgtacaagtag

SEQ ID NO: 288682 - DNA, 2700 bp, Artificial Sequence
  derived and/or modified sequence
atgctgctgctgctgctgctggcccccctcttcctgcggcccccaggagctggaggagcccagaccccaaatgccaccagcgagggctgccagatcatccaccccccctgggagggcggcatccgctaccggggcctgacccgggaccaggtgaaggccatcaacttcctgcctgtggactatgaaattgaatatgtgtgccgcggggagcgggaggtggtgggccccaaggtgaggaagtgcctggccaacggctcctggacagacatggacacccccagccgctgtgtgaacagaacaccccacagcgagaggagagctgtgtacatcggggccctcttccccatgtctgggggctggccaggcggccaggcctgccagcctgctgtggagatggccctggaggatgtgaacagccggcgggacatcctgcctgactatgagctgaagctgatccaccacgacagcaaatgtgaccccggccaggccaccaagtacctgtatgagctgctgtacaatgaccccatcaagatcatcctgatgcctggctgcagctctgtgtccaccctggtggccgaggccgccaggatgtggaacctgattgtgctgtcctatggcagcagcagccctgccctgagcaaccggcagcgcttccccaccttcttccgcacccaccccagcgccaccctgcacaaccccaccagggtgaagctgtttgagaagtggggctggaagaagatcgccaccatccagcagaccacagaggtgttcaccagcaccctggatgacctggaggagcgggtgaaggaggccggcatcgagatcaccttccggcagagcttcttcagtgaccctgctgtgcctgtgaagaacctgaagaggcaggatgcccgcatcatcgtgggcctcttctatgaaacagaggccaggaaggtgttctgtgaggtgtacaaggagcggctgtttgggaagaagtatgtgtggttcctgattggctggtatgctgacaactggttcaagatctatgaccccagcatcaactgcaccgtggatgagatgacagaggccgtggagggccacatcaccacagaaattgtgatgctgaacccagccaacaccaggagcatcagcaacatgaccagccaggagtttgtggagaagctgaccaagaggctgaagaggcaccctgaggagactggaggcttccaggaggcccccctggcctatgatgccatctgggccctggccctggccctgaacaagaccagcggcggcggcggccgctctggagtgcggctggaggacttcaactacaacaaccagaccatcacagaccagatctaccgggccatgaacagcagcagctttgagggcgtgtctggccacgtggtgtttgatgccagcggcagcaggatggcctggaccctgattgagcagctgcagggcggcagctacaagaagattggctactatgacagcaccaaggatgacctgtcctggagcaagacagacaagtggattggaggcagccccccagctgaccagaccctggtgatcaagaccttccgcttcctgagccagaagctgttcatctctgtgtctgtgctgagcagcctgggcatcgtgctggccgtggtgtgcctgtccttcaacatctacaacagccacgtgcgctacatccagaacagccagcccaacctgaacaacctgacagctgtgggctgcagcctggccctggccgctgtgttccccctgggcctggatggctaccacatcggcaggaaccagttcccctttgtgtgccaggcccggctgtggctgctgggcctgggcttcagcctgggctacggctccatgttcaccaagatctggtgggtgcacacagtgttcaccaagaaggaggagaagaaggagtggaggaagaccctggagccctggaagctgtatgccaccgtgggcctgctggtgggcatggatgtgctgaccctggccatctggcagatcgtggaccccctgcacaggaccatcgagacctttgccaaggaggagcccaaggaggacattgatgtgtccatcctgccccagctggagcactgcagcagcaggaagatgaacacctggctgggcatcttctacggctacaagggcctgctgctgctgctgggcatcttcctggcctatgagaccaagtctgtgtccacagagaagatcaatgaccacagagctgtgggcatggccatctacaacgtggccgtgctgtgcctgatcacagcccctgtgaccatgatcctgagcagccagcaggatgctgcctttgcctttgccagcctggccatcgtgttcagcagctacatcaccctggtggtgctgtttgtgcccaagatgaggaggctcatcaccagaggagagtggcagagcgaggcccaggacaccatgaagacaggcagcagcaccaacaacaatgaggaggagaagagccggctgctggagaaggagaaccgggagctggagaagatcatcgccgagaaggaggagcgggtgtctgagctgcggcaccagctgcagagccggcagcagctgcggagcagaagacacccccccaccccacctgagcccagcggcggcctgccccggggccccccagagcccccagaccggctgagctgtgatggcagccgggtgcacctgctgtacaagtag

SEQ ID NO: 288683 - DNA, 4299 bp, Artificial Sequence
  derived and/or modified sequence
gcccgggagctctccctggtccccggcgccgcctccttccctcccggctccccgctccccgctcccgtggctgccgccgccccggggaagaagagacaggggtggggtttgggggaagcgagagaggaggggagagaccctggccaggctggagcctggattcgaggggaggagggacgggaggaggagaaaggtggaggagaagggaggggggagcggggaggagcggccgggcctggggccttgaggcccggggagagccggggagccgggcccgcgcgccgagatgttgctgctgctgctactggcgccactcttcctccgccccccgggcgcgggcggggcgcagacccccaacgccacctcagaaggttgccagatcatacacccgccctgggaagggggcatcaggtaccggggcctgactcgggaccaggtgaaggctatcaacttcctgccagtggactatgagattgagtatgtgtgccggggggagcgcgaggtggtggggcccaaggtccgcaagtgcctggccaacggctcctggacagatatggacacacccagccgctgtgtgaatcgaacgccacactcagaacggcgcgcagtgtacatcggggcactgtttcccatgagcgggggctggccagggggccaggcctgccagcccgcggtggagatggcgctggaggacgtgaatagccgcagggacatcctgccggactatgagctcaagctcatccaccacgacagcaagtgtgatccaggccaagccaccaagtacctatatgagctgctctacaacgaccctatcaagatcatccttatgcctggctgcagctctgtctccacgctggtggctgaggctgctaggatgtggaacctcattgtgctttcctatggctccagctcaccagccctgtcaaaccggcagcgtttccccactttcttccgaacgcacccatcagccacactccacaaccctacccgcgtgaaactctttgaaaagtggggctggaagaagattgctaccatccagcagaccactgaggtcttcacttcgactctggacgacctggaggaacgagtgaaggaggctggaattgagattactttccgccagagtttcttctcagatccagctgtgcccgtcaaaaacctgaagcgccaggatgcccgaatcatcgtgggacttttctatgagactgaagcccggaaagttttttgtgaggtgtacaaggagcgtctctttgggaagaagtacgtctggttcctcattgggtggtatgctgacaattggttcaagatctacgacccttctatcaactgcacagtggatgagatgactgaggcggtggagggccacatcacaactgagattgtcatgctgaatcctgccaatacccgcagcatttccaacatgacatcccaggaatttgtggagaaactaaccaagcgactgaaaagacaccctgaggagacaggaggcttccaggaggcaccgctggcctatgatgccatctgggccttggcactggccctgaacaagacatctggaggaggcggccgttctggtgtgcgcctggaggacttcaactacaacaaccagaccattaccgaccaaatctaccgggcaatgaactcttcgtcctttgagggtgtctctggccatgtggtgtttgatgccagcggctctcggatggcatggacgcttatcgagcagcttcagggtggcagctacaagaagattggctactatgacagcaccaaggatgatctttcctggtccaaaacagataaatggattggagggtcccccccagctgaccagaccctggtcatcaagacattccgcttcctgtcacagaaactctttatctccgtctcagttctctccagcctgggcattgtcctagctgttgtctgtctgtcctttaacatctacaactcacatgtccgttatatccagaactcacagcccaacctgaacaacctgactgctgtgggctgctcactggctttagctgctgtcttccccctggggctcgatggttaccacattgggaggaaccagtttcctttcgtctgccaggcccgcctctggctcctgggcctgggctttagtctgggctacggttccatgttcaccaagatttggtgggtccacacggtcttcacaaagaaggaagaaaagaaggagtggaggaagactctggaaccctggaagctgtatgccacagtgggcctgctggtgggcatggatgtcctcactctcgccatctggcagatcgtggaccctctgcaccggaccattgagacatttgccaaggaggaacctaaggaagatattgacgtctctattctgccccagctggagcattgcagctccaggaagatgaatacatggcttggcattttctatggttacaaggggctgctgctgctgctgggaatcttccttgcttatgagaccaagagtgtgtccactgagaagatcaatgatcaccgggctgtgggcatggctatctacaatgtggcagtcctgtgcctcatcactgctcctgtcaccatgattctgtccagccagcaggatgcagcctttgcctttgcctctcttgccatagttttctcctcctatatcactcttgttgtgctctttgtgcccaagatgcgcaggctgatcacccgaggggaatggcagtcggaggcgcaggacaccatgaagacagggtcatcgaccaacaacaacgaggaggagaagtcccggctgttggagaaggagaaccgtgaactggaaaagatcattgctgagaaagaggagcgtgtctctgaactgcgccatcaactccagtctcggcagcagctccgctcccggcgccacccaccgacacccccagaaccctctgggggcctgcccaggggaccccctgagccccccgaccggcttagctgtgatgggagtcgagtgcatttgctttataagtgagggtagggtgagggaggacaggccagtagggggagggaaagggagaggggaagggcaggggactcaggaagcagggggtccccatccccagctgggaagaacatgctatccaatctcatctcttgtaaatacatgtccccctgtgagttctgggctgatttgggtctctcatacctctgggaaacagacctttttctctcttactgcttcatgtaattttgtatcacctcttcacaatttagttcgtacctggcttgaagctgctcactgctcacacgctgcctcctcagcagcctcactgcatctttctcttcccatgcaacaccctcttctagttaccacggcaacccctgcagctcctctgcctttgtgctctgttcctgtccagcaggggtctcccaacaagtgctctttccaccccaaaggggcctctccttttctccactgtcataatctctttccatcttacttgcccttctatactttctcacatgtggctccccctgaattttgcttcctttgggagctcattcttttcgccaaggctcacatgctccttgcctctgctctgtgcactcacgctcagcacacatgcatcctcccctctcctgcgtgtgcccactgaacatgctcatgtgtacacacgcttttcccgtatgctttcttcatgttcagtcacatgtgctctcgggtgccctgcattcacagctacgtgtgcccctctcatggtcatgggtctgcccttgagcgtgtttgggtaggcatgtgcaatttgtctagcatgctgagtcatgtctttcctatttgcacacgtccatgtttatccatgtactttccctgtgtaccctccatgtaccttgtgtactttcttcccttaaatcatggtattcttctgacagagccatatgtaccctaccctgcacattgttatgcacttttccccaattcatgtttggtggggccatccacaccctctccttgtcacagaatctccatttctgctcagattccccccatctccattgcattcatgtactaccctcagtctacactcacaatcatcttctcccaagactgctcccttttgttttgtgtttttttgaggggaattaaggaaaaataagtgggggcaggtttggagagctgcttccagtggatagttgatgagaatcctgaccaaaggaaggcacccttgactgttgggatagacagatggacctatggggtgggaggtggtgtccctttcacactgtggtgtctcttggggaaggatctccccgaatctcaataaaccagtgaacagtgtgactcgg

SEQ ID NO: 288684 - DNA, 2700 bp, Artificial Sequence
  derived and/or modified sequence
atgctgctgctgctgctgctggcccccctgttcctgcggccccccggagctgggggtgcccagacaccgaacgcaacttctgagggttgccagatcattcacccaccatgggaaggcggcataaggtataggggccttaccagggatcaggtgaaggctataaatttcctgcctgtggattatgaaatagagtatgtctgccgaggtgagagggaagtggtgggcccaaaggtgaggaagtgtctcgcaaacggatcttggactgatatggataccccatcccgctgtgtcaatagaacgccacacagcgagaggagggccgtctatatcggggcgctgttccctatgtctggcggctggccaggaggtcaggcttgccagcccgcggtggaaatggccctagaagatgtgaacagccgtagggatattctcccagattacgaattaaagctcattcaccacgacagcaagtgcgatcccggccaagccaccaagtatctgtatgaactactgtataatgatcccattaaaattatattaatgcccgggtgtagctcagtgtcgacactagtcgccgaggccgctcggatgtggaaccttatcgtgttgtcctatgggagttcctcccctgccctgagcaatagacagcgcttccccactttctttagaacccatccctctgccactcttcacaaccctacacgagttaaactatttgagaagtgggggtggaaaaaaatagccaccatacagcaaaccaccgaagtgttcactagtactttggacgatttggaggagcgcgtcaaagaagccgggatcgagatcaccttcagacaatcctttttcagcgatccagccgtccctgtgaagaatttaaagagacaggacgccagaataattgtgggcctcttctacgagaccgaggcccgcaaggtgttctgcgaggtgtacaaagagcgtctgtttggcaagaaatatgtatggttcctcatcgggtggtatgccgacaattggtttaagatttacgacccctcaattaattgcaccgttgatgaaatgacagaggctgtggaaggccacatcacaaccgagatagtaatgttgaatcctgcaaatacacgatctatctccaatatgacttcacaagagttcgttgagaaattgaccaagcgcttaaagaggcatccggaggagactggcgggttccaggaggctccactggcttacgacgccatctgggccctcgcactggcgctgaacaagacatctgggggcgggggccgcagcggcgtgcggttggaagacttcaactataataatcagactattactgaccagatctaccgggcaatgaacagttcctcttttgagggagtgtccgggcatgttgttttcgatgcctcaggttctcggatggcttggacactgatagagcagctccaaggcggcagttataagaaaatcggatactatgatagcacgaaggatgatttatcatggtccaaaacagacaagtggatcggcggttcccccccagccgatcagaccttggttataaaaaccttcagatttctgtcacaaaaactgtttattagcgtttcagtcctctcttccctggggatcgtcctggctgttgtctgtctgagcttcaacatttacaatagtcacgtgcgttacattcagaattcccaaccaaatttgaataatctcactgccgttggatgctcactggcactggccgctgtctttccgttgggattggatggttaccatatcgggcgaaatcaatttccattcgtttgtcaggcccggctgtggctgcttggcttaggcttctccctaggctacggatccatgtttaccaagatttggtgggttcatactgtgttcacgaaaaaggaggaaaagaaggagtggaggaaaactttggagccctggaaactgtatgcaacagtcggccttctcgttggcatggacgtgcttacactggcaatttggcagatagtggatccactgcatagaacaatcgagacattcgccaaagaagaacccaaagaagacattgacgtcagtatcctgccacagctggaacactgtagctcccgcaaaatgaatacgtggttaggaattttctacggatataaaggcctgctgttgctgctgggtattttccttgcatacgagaccaagtccgtctcaactgagaagatcaacgaccaccgcgcagttggaatggcaatttacaatgtggcagtcttatgcctcattacggcacctgtgaccatgattttatcatcccagcaggacgcggcctttgccttcgccagcctggctattgtgttcagctcatatattacactggttgttctttttgtgcccaaaatgcgtagattgattacacggggcgaatggcaatccgaagcccaggacaccatgaaaacgggtagcagcaccaacaataacgaagaggagaaatccagactactggagaaagagaatagagaactggaaaaaatcattgctgagaaagaagaaagagtaagcgagttaaggcaccagctgcaatcccgacaacagctccgctcacgtaggcacccacccacccctccagaacccagcgggggacttcctcgcggacctccagagcctcccgataggctgtcgtgtgatggaagtcgggtgcacttactctacaagtag

SEQ ID NO: 288685 - DNA, 2700 bp, Artificial Sequence
  derived and/or modified sequence
atgctgctgctgctgctgctggcccccctgttcctgcggccccccggggctggcggagctcagactcccaacgccacctccgagggctgtcagatcatccaccccccttgggaaggggggatccgttatcgcgggctgacacgggatcaggtgaaggcaataaattttttacctgttgactacgagatcgaatatgtatgccgcggagaaagggaagtagtggggccaaaggtgcgtaaatgcctggcgaacggatcatggaccgatatggacaccccctcaagatgtgtcaacaggacaccccacagcgaacgaagagccgtctacatcggagcactattcccaatgagtggcgggtggcccggggggcaggcgtgtcagccagctgtcgagatggccttggaggacgtgaattctcggcgggacattctgccagattacgaactgaagctcatacaccatgactccaaatgcgatcccggccaggctacgaagtatctgtatgaactgctgtacaatgaccccatcaagataatcctgatgcctggatgcagctctgtttcaacactggtggcggaggccgccaggatgtggaacctgatcgtccttagctatggatcctcatcaccggccctgagtaacaggcagagattccccactttctttcgtactcacccttctgccaccctgcataatcctacaagggtaaaactgttcgagaagtggggttggaaaaagatcgccactatccaacagaccacagaggtttttacttcaaccctggacgacctcgaagagagagtgaaagaagccggtatcgagattacgtttaggcagagcttcttctccgacccagccgttcccgtgaagaacctgaagaggcaggatgctcgaataatcgtcgggctcttctacgaaaccgaggcccggaaggtgttctgcgaggtgtacaaagaacggctgtttgggaaaaagtatgtgtggttcttaattggatggtatgcggacaactggtttaagatatatgaccctagcattaattgtaccgtcgacgaaatgaccgaagcagtggagggtcatataacaactgagatcgttatgctcaacccagccaatacacggtctattagtaacatgacctcccaagagttcgtggaaaagctgacgaagcggttaaaacgccacccagaagagactggaggatttcaggaggcaccccttgcatacgacgcgatctgggctttagccctagctttgaacaagactagcggcggcggcggccgatctggtgttagactagaggacttcaactataataatcagactattactgatcaaatctatcgggcaatgaactcctctagcttcgagggagtgagtggccatgttgtattcgatgcctctgggtcgaggatggcttggacccttatagagcagctccagggcggaagctacaagaaaatcggatactacgatagtacaaaagacgacctttcctggtccaagacggacaaatggattggcggctctcctcccgctgatcaaacccttgtcatcaagacattccgatttctgtcccagaaactcttcatcagtgtctcagtgctttcatcgcttggcatcgttctggccgtggtttgtctgagctttaatatttacaactctcacgtgcggtatattcagaattcccaaccaaatctgaacaatctgacagctgtgggctgtagcctagcactcgccgccgtcttccccctgggcctcgatggatatcacatagggcgtaatcagtttcctttcgtctgccaggcccgactgtggctcctgggtctgggttttagtttagggtacgggtcaatgttcacaaaaatctggtgggttcatactgtttttactaaaaaggaagagaaaaaggaatggaggaaaaccctggaaccatggaagctttatgctaccgtcggattgctggtgggaatggacgtgctgactttagcaatctggcagatcgtcgatcccttgcaccgcacgatcgaaacgttcgccaaggaggagcctaaggaagacatagatgtcagtattttgccccagctggagcactgctcctctcggaaaatgaacacctggttaggaatcttctacggatacaagggtctcctcctcctactcggcatcttcctggcatacgagacgaaaagcgtgtccacagagaaaatcaacgaccaccgagccgtcggaatggcgatctataacgttgctgttctgtgtctgatcactgctcctgtaacaatgatcctgagttctcagcaagacgcggccttcgccttcgcctccctggccatcgtgttttcttcttacatcaccttggtggttctcttcgtaccgaaaatgaggaggctcatcactagaggtgaatggcagagtgaggcccaggacacaatgaagactgggagtagtacaaacaataatgaggaagagaagtctcgattacttgaaaaggaaaatagggagctcgagaaaattattgccgaaaaggaggaacgggttagcgagttgaggcaccagctgcagtctagacagcaactccgaagcagacggcacccacctactccccctgagccttcaggagggttacctcgtgggcctccagagccacccgatagattgtcgtgcgatggaagcagggtgcacttactctataaatag

SEQ ID NO: 288686 - DNA, 2700 bp, Artificial Sequence
  derived and/or modified sequence
atgctgctgctgctgctgctggcccccctgttcctgcggccccccggagctggtggtgcgcaaacccctaatgcgacgagtgaaggctgccaaatcattcaccctccttgggaggggggcattaggtacaggggcctcacacgcgatcaagtcaaggccattaacttccttccagttgattatgagattgagtatgtgtgtcgaggggagagagaggttgtcggaccaaaggttagaaagtgcctcgctaacggaagctggacggatatggatactcccagtaggtgcgtaaatagaacgccacattctgaaaggcgggctgtgtatatcggagcgttatttcccatgtctggcggatggccaggagggcaggcctgtcagccagcagtggagatggccttggaggacgtcaacagccgcagggatattcttcccgactacgagctgaagctgatccaccacgactcaaagtgcgatccaggccaagcaaccaaatacctgtacgagctgctgtacaatgaccccattaagataattctgatgccaggatgctcttcggtgtcgaccctggtggctgaagccgctagaatgtggaatttgatagttttaagttatggaagctcctctcccgccctttctaacagacagcggttccctacgttcttcaggacccacccctcagctacgctccataaccctacacgggtgaagttattcgagaagtggggatggaaaaaaattgcaactatccaacagaccaccgaagtgtttacctctacgttagacgacctggaggaacgcgtgaaggaggccggcatcgaaattacctttcggcagagcttctttagtgatcctgctgtacctgtaaagaatttaaagcgccaggatgcgcgaattattgtgggccttttctacgagactgaggcgaggaaagtgttttgtgaggtgtacaaggaacgactttttggtaagaagtatgtgtggtttctcatcgggtggtacgccgataactggtttaagatttacgatccaagcataaactgtaccgtggacgaaatgaccgaagccgtggagggtcatataaccaccgagatcgtaatgctgaaccctgccaacacacggtccatatccaacatgacttctcaagaatttgtcgagaaactcacaaagcggctgaagcgccaccccgaggagacaggcggattccaggaggccccactggcctacgacgcgatctgggcactcgctctcgccctgaataaaacctctggcggcggcggacgctctggcgtaagactggaggattttaactataataatcaaaccataacggatcagatctacagggcaatgaactcaagcagttttgaaggggtcagcgggcatgtcgttttcgacgcctccgggagtagaatggcctggactctgatcgagcaactccagggggggtcctacaagaaaatcggctactatgactccaccaaggatgacttgtcttggagcaagactgacaagtggatcggcgggagtccaccagctgatcagaccctggtgatcaagacgtttcgattcctctctcagaaacttttcatttctgtaagcgtgctttcctcattggggattgtgctggcagtggtctgcctctcatttaatatctacaatagccacgtcaggtacatacagaacagccaacccaacctgaataatctgacagcagtcggttgttccttggcattggcggcagtatttccactggggctggacggatatcacatcggacgtaaccagttccccttcgtttgtcaggccaggctgtggcttctgggtttaggcttttctctggggtacgggtccatgtttactaagatctggtgggtccacaccgtgttcactaagaaggaggagaaaaaggaatggagaaaaaccttggagccttggaaactgtatgcaacagtaggccttctggtgggcatggatgtgctcaccctggctatctggcagatagtggatcctttgcatagaaccatcgagactttcgcgaaggaggagccgaaggaagacattgacgtgtccatattgccccagcttgagcactgctccagcagaaagatgaacacatggctcggcatattctacggctacaaagggctcttgcttctgctcggaatttttctggcatacgaaaccaagtcggtttcgactgagaaaattaacgaccacagggccgtgggtatggccatctacaatgtcgccgtcctctgcctgatcaccgcgcctgttactatgatcctgagcagtcagcaagacgcagcctttgcatttgcttccctcgctatcgtattttcctcttatatcactctggtggtactgttcgtaccaaagatgcggagactgatcactcgaggggagtggcaaagcgaggctcaagatacgatgaaaacaggttctagcacaaacaacaacgaggaggaaaagagtcggctgctagagaaagagaaccgtgaactggagaagattatcgcagaaaaagaggagagagtttccgagctgaggcaccagctacagagcaggcaacaactgcgtagtcgaagacaccctcctaccccccccgaaccgtcagggggactgcccagagggccgccagaaccacctgatcggttgtcctgtgatggctcgcgcgtccatctcctgtacaaatag

SEQ ID NO: 288687 - DNA, 4299 bp, Artificial Sequence
  derived and/or modified sequence
gcccgggagctctccctggtccccggcgccgcctccttccctcccggctccccgctccccgctcccgtggctgccgccgccccggggaagaagagacaggggtggggtttgggggaagcgagagaggaggggagagaccctggccaggctggagcctggattcgaggggaggagggacgggaggaggagaaaggtggaggagaagggaggggggagcggggaggagcggccgggcctggggccttgaggcccggggagagccggggagccgggcccgcgcgccgagatgttgctgctgctgctactggcgccactcttcctccgccccccgggcgcgggcggggcgcagacccccaacgccacctcagaaggttgccagatcatacacccgccctgggaagggggcatcaggtaccggggcctgactcgggaccaggtgaaggctatcaacttcctgccagtggactatgagattgagtatgtgtgccggggggagcgcgaggtggtggggcccaaggtccgcaagtgcctggccaacggctcctggacagatatggacacacccagccgctgtgtgaatcgaacgccacactcagaacggcgcgcagtgtacatcggggcactgtttcccatgagcgggggctggccagggggccaggcctgccagcccgcggtggagatggcgctggaggacgtgaatagccgcagggacatcctgccggactatgagctcaagctcatccaccacgacagcaagtgtgatccaggccaagccaccaagtacctatatgagctgctctacaacgaccctatcaagatcatccttatgcctggctgcagctctgtctccacgctggtggctgaggctgctaggatgtggaacctcattgtgctttcctatggctccagctcaccagccctgtcaaaccggcagcgtttccccactttcttccgaacgcacccatcagccacactccacaaccctacccgcgtgaaactctttgaaaagtggggctggaagaagattgctaccatccagcagaccactgaggtcttcacttcgactctggacgacctggaggaacgagtgaaggaggctggaattgagattactttccgccagagtttcttctcagatccagctgtgcccgtcaaaaacctgaagcgccaggatgcccgaatcatcgtgggacttttctatgagactgaagcccggaaagttttttgtgaggtgtacaaggagcgtctctttgggaagaagtacgtctggttcctcattgggtggtatgctgacaattggttcaagatctacgacccttctatcaactgcacagtggatgagatgactgaggcggtggagggccacatcacaactgagattgtcatgctgaatcctgccaatacccgcagcatttccaacatgacatcccaggaatttgtggagaaactaaccaagcgactgaaaagacaccctgaggagacaggaggcttccaggaggcaccgctggcctatgatgccatctgggccttggcactggccctgaacaagacatctggaggaggcggccgttctggtgtgcgcctggaggacttcaactacaacaaccagaccattaccgaccaaatctaccgggcaatgaactcttcgtcctttgagggtgtctctggccatgtggtgtttgatgccagcggctctcggatggcatggacgcttatcgagcagcttcagggtggcagctacaagaagattggctactatgacagcaccaaggatgatctttcctggtccaaaacagataaatggattggagggtcccccccagctgaccagaccctggtcatcaagacattccgcttcctgtcacagaaactctttatctccgtctcagttctctccagcctgggcattgtcctagctgttgtctgtctgtcctttaacatctacaactcacatgtccgttatatccagaactcacagcccaacctgaacaacctgactgctgtgggctgctcactggctttagctgctgtcttccccctggggctcgatggttaccacattgggaggaaccagtttcctttcgtctgccaggcccgcctctggctcctgggcctgggctttagtctgggctacggttccatgttcaccaagatttggtgggtccacacggtcttcacaaagaaggaagaaaagaaggagtggaggaagactctggaaccctggaagctgtatgccacagtgggcctgctggtgggcatggatgtcctcactctcgccatctggcagatcgtggaccctctgcaccggaccattgagacatttgccaaggaggaacctaaggaagatattgacgtctctattctgccccagctggagcattgcagctccaggaagatgaatacatggcttggcattttctatggttacaaggggctgctgctgctgctgggaatcttccttgcttatgagaccaagagtgtgtccactgagaagatcaatgatcaccgggctgtgggcatggctatctacaatgtggcagtcctgtgcctcatcactgctcctgtcaccatgattctgtccagccagcaggatgcagcctttgcctttgcctctcttgccatagttttctcctcctatatcactcttgttgtgctctttgtgcccaagatgcgcaggctgatcacccgaggggaatggcagtcggaggcgcaggacaccatgaagacagggtcatcgaccaacaacaacgaggaggagaagtcccggctgttggagaaggagaaccgtgaactggaaaagatcattgctgagaaagaggagcgtgtctctgaactgcgccatcaactccagtctcggcagcagctccgctcccggcgccacccaccgacacccccagaaccctctgggggcctgcccaggggaccccctgagccccccgaccggcttagctgtgatgggagtcgagtgcatttgctttataagtgagggtagggtgagggaggacaggccagtagggggagggaaagggagaggggaagggcaggggactcaggaagcagggggtccccatccccagctgggaagaacatgctatccaatctcatctcttgtaaatacatgtccccctgtgagttctgggctgatttgggtctctcatacctctgggaaacagacctttttctctcttactgcttcatgtaattttgtatcacctcttcacaatttagttcgtacctggcttgaagctgctcactgctcacacactgcctcctcagcagcctcactgcatctttctcttcccatgcaacaccctcttctagttaccacggcaacccctgcagctcctctgcctttgtgctctgttcctgtccagcaggggtctcccaacaagtgctctttccaccccaaaggggcctctccttttctccactgtcataatctctttccatcttacttgcccttctatactttctcacatgtggctccccctgaattttgcttcctttgggagctcattcttttcgccaaggctcacatgctccttgcctctgctctgtgcactcacgctcagcacacatgcatcctcccctctcctgcgtgtgcccactgaacatgctcatgtgtacacacgcttttcccgtatgctttcttcatgttcagtcacatgtgctctcgggtgccctgcattcacagctacgtgtgcccctctcatggtcatgggtctgcccttgagcgtgtttgggtaggcatgtgcaatttgtctagcatgctgagtcatgtctttcctatttgcacacgtccatgtttatccatgtactttccctgtgtaccctccatgtaccttgtgtactttcttcccttaaatcatggtattcttctgacagagccatatgtaccctaccctgcacattgttatgcacttttccccaattcatgtttggtggggccatccacaccctctccttgtcacagaatctccatttctgctcagattccccccatctccattgcattcatgtactaccctcagtctacactcacaatcatcttctcccaagactgctcccttttgttttgtgtttttttgaggggaattaaggaaaaataagtgggggcaggtttggagagctgcttccagtggatagttgatgagaatcctgaccaaaggaaggcacccttgactgttgggatagacagatggacctatggggtgggaggtggtgtccctttcacactgtggtgtctcttggggaaggatctccccgaatctcaataaaccagtgaacagtgtgactcgg

SEQ ID NO: 288688 - DNA, 2700 bp, Artificial Sequence
  derived and/or modified sequence
atgctgctgctgctgctgctggcccccctgttcctgcggccccccggagcgggtggagcccagactcccaatgctacgtcagagggctgccagataattcacccaccctgggagggaggcataagataccggggcctgacacgggatcaggtgaaagcaatcaacttcctgccagtggactacgaaatcgaatacgtttgcagaggagaaagagaagttgtcggcccaaaggtccggaagtgtttggccaatggcagctggacagatatggacactcctagtcgctgtgtgaatcgtacccctcacagtgagcgacgtgctgtctacattggagccctgttccctatgtccggaggctggccggggggtcaggcctgccaaccagccgttgaaatggccctcgaggatgtaaactcccgtagagatatcctcccggactatgaactgaaattaatccaccatgactcaaagtgcgatccgggacaggctaccaaatacctctatgaacttctgtataacgatcccataaagataatcctcatgcctgggtgttcctctgtaagtacactcgttgcagaagcagctagaatgtggaatctcatcgttctgagctatgggtcatcctccccagccctgtcgaaccgtcagagattccccaccttctttaggactcacccctctgctacgctgcacaaccctactagggtgaaactctttgaaaagtgggggtggaagaagatcgcaacaattcaacagaccaccgaagtgtttacttcgaccctcgatgatttggaagaaagggtgaaggaggcaggaatcgagatcacttttcgtcaatctttcttctctgaccccgccgtccccgtgaagaatctgaagaggcaggacgccagaattattgttggcctattctatgaaacagaagctaggaaggtgttttgtgaggtttacaaggagcgtttgtttggcaaaaagtatgtctggtttctgatcggctggtacgcggacaactggttcaaaatctacgacccgagcatcaattgtacagtagacgaaatgaccgaggccgtggaaggacacatcaccaccgagatagtaatgctgaatcccgctaatacccgctcaatcagtaatatgacatctcaggaatttgtcgagaaactgacaaagcggctcaaacggcatccagaggagacaggggggtttcaggaggctccgctggcttatgatgcaatttgggctctcgccttggcacttaacaaaacatccggagggggcggtcgtagcggcgttagattagaggatttcaattataataatcaaacgatcactgaccagatctatagggctatgaactcttcctcattcgaaggggtaagcggacatgtagtttttgacgcctccggaagccgaatggcctggaccctcattgagcagctgcaggggggctcttacaaaaaaatcggctactatgattcaacaaaagatgacttgagctggtctaagaccgataaatggattggtggtagccctcctgccgaccaaaccttggtgataaaaacctttaggtttctcagccagaagctgttcatctccgtgtctgtactgtcaagtcttggcatagtgttggcagttgtgtgtctatcatttaatatttacaatagccatgtcagatacatccagaacagtcagccgaaccttaataatctcacagcggtgggatgttctctggccctcgcagcggtcttccctctgggtctcgacggttatcacattgggaggaatcagttcccattcgtgtgtcaggcccggctgtggctactaggactaggattttcacttggctatgggtcgatgtttacaaaaatttggtgggtccacaccgttttcactaagaaggaagaaaaaaaggagtggcggaaaaccctggagccctggaaactatatgccaccgtaggcctactggtgggaatggacgtgttaaccctggcaatatggcaaatcgtggacccactgcatagaaccattgaaacatttgccaaagaagagcctaaggaagatatcgacgtgtccatacttccacagcttgagcactgctcttcacggaaaatgaacacctggctcggtatcttttacggctataaaggtctgctgttgctcttggggatttttcttgcctatgaaaccaagtcagtcagcacagaaaaaattaacgatcacagggctgtgggcatggccatctacaatgtggctgtcctgtgtttgatcaccgcccctgtcactatgattctgtcaagccagcaggacgccgccttcgctttcgcctctttagccatcgtctttagttcctacattacactcgttgtcctgttcgtacccaagatgcgccgtctcattaccaggggcgaatggcagtccgaagcccaagacacaatgaaaacgggctcaagtaccaataacaacgaggaagagaagtctaggctcctcgagaaagagaaccgcgagttagaaaagatcatcgccgagaaggaagaacgcgtcagcgagcttagacatcagctccagagtcgccaacagttaagaagcagaaggcacccccctacaccccccgagccaagtggcggcctaccaaggggaccacctgaaccaccagaccggctgtcttgcgacggtagcagagtgcacttactatacaagtag

SEQ ID NO: 288689 - DNA, 2700 bp, Artificial Sequence
  derived and/or modified sequence
atgctgctgctgctgctgctggcccccctgttcctgcggccccccggggccggcggcgctcagacgccaaatgcaacatccgaggggtgccaaataatccatcccccatgggagggtggaattagatataggggcttgacccgtgatcaggtcaaggctatcaattttcttccggtggactatgagatagaatatgtgtgccggggggaacgcgaagtagtgggtccaaaggtgagaaagtgtttggccaacggaagctggactgacatggatacaccctctaggtgtgttaatcggactccccacagtgagaggagagccgtgtacatcggggctctgttccccatgtccgggggatggcctgggggccaggcgtgccagccagccgtagagatggctctagaggacgtcaatagccggcgagacatcctaccggattacgagctgaagctgatccatcacgatagtaaatgcgaccccggccaggccaccaagtacctgtacgagcttctatacaacgaccccattaagattattctcatgcccggttgtagctctgtcagcaccttggtcgcagaagcagcacggatgtggaacctaatcgtacttagctatggatctagttcaccagcattgtctaaccgccagcgctttcctacttttttccgcacacacccgtccgccacattacacaacccaaccagagtgaagctgtttgagaaatggggatggaagaaaatcgctactattcagcagaccaccgaggtctttacctccaccctcgacgacttggaagagagggtgaaagaggcgggaatagaaattacgttcagacagtcattcttctccgaccctgccgttccggtaaagaacctcaagcgccaggatgctagaattatcgtggggctgttttatgaaaccgaagcaaggaaagtgttttgcgaagtctacaaggagagactgtttggcaaaaagtacgtttggtttcttatcgggtggtacgcagacaactggttcaagatttatgatccatcaatcaactgcacagtggacgagatgaccgaagctgtggaggggcatattacaactgagattgttatgctcaaccccgccaatacacgaagtatttccaatatgacctcccaggaatttgttgaaaagctgaccaaaaggctcaaacggcaccccgaggaaacgggcgggttccaggaggctccactagcctacgacgccatatgggcgctggccctggccctgaacaaaaccagcggcggcggtgggcgctctggagtgcgcttggaggactttaattacaacaatcagacaattaccgatcagatctaccgagcaatgaactcctccagcttcgagggggtttccggccatgtcgtatttgatgcttctggctcgagaatggcctggacactcattgagcaactgcaaggcggcagctacaagaagatcggatattatgactcaactaaagacgatctgtcatggtcaaagaccgacaagtggatcggcggtagcccgcctgctgatcagacgctcgtcatcaagaccttcagatttttgtcccaaaaactgttcatttcagtgagtgtgctgtcgtcactcgggatcgtgttggccgtggtgtgtttgtctttcaatatttataattctcacgtgagatacatccagaatagccagcctaacctaaacaatctgaccgccgttgggtgctctctggcattggcagcagtctttcccctgggcctcgacggctaccacattgggcggaaccaatttccgttcgtatgtcaggctcgtctatggctgctggggctgggcttttcattaggatacgggagcatgttcacaaagatctggtgggtacacactgtgtttactaagaaagaggagaagaaagagtggcgtaagacgctcgaaccctggaaactgtacgcgacagtcggcttgctggtcgggatggatgtgttgactttggctatctggcagatagtggatcctctacacagaacaatcgaaactttcgctaaagaggagcccaaggaagacatcgatgtgtcaattctccctcagctcgaacattgcagcagcaggaaaatgaacacttggctgggaatattctatggttacaaagggttgctgctgctactaggaatattcttggcttatgagactaagagtgtaagcacagaaaagataaatgaccatagggccgtaggcatggccatatacaatgtggctgtgttatgcttgatcaccgcccccgtgaccatgattctgtcttcccagcaggacgccgcgtttgcttttgcctccctagccatcgtgtttagtagctatattaccctggtggtacttttcgtccctaaaatgcgccgcctaattacacggggagaatggcagagtgaggcacaggatacgatgaaaacaggctcaagcacgaataacaacgaggaagagaagtcccgcctcctggagaaggaaaacagagagctggaaaagattatagccgagaaggaagaaagagtgtctgagctgcggcaccagctgcagtcccggcaacagctgcggtcccggagacatcctcccaccccacctgaacctagcgggggcctcccaagagggccccctgagccacccgaccgactttcctgtgacgggagccgggtgcatctgctttataagtag

SEQ ID NO: 288690 - DNA, 2700 bp, Artificial Sequence
  derived and/or modified sequence
atgctgctgctgctgctgctggcccccctgttcctgcggccccccggcgccggtggagctcagacccctaacgctacaagcgagggatgccagataatccatcctccctgggaaggcggcatccggtacagggggctgacacgggatcaagtgaaagccattaactttctgcctgtggactatgaaatcgaatatgtttgcagaggtgaaagggaggtggttggccctaaggtgcgcaagtgtctagccaatggttcgtggactgacatggacactccaagtcggtgcgtgaaccggacaccacactctgaaaggagagctgtgtatattggggcactcttccctatgtccggcggatggccaggcgggcaggcttgccagcccgcggtggagatggctctagaagacgtgaactctcgcagagacattttgcctgattacgaattgaaactgattcaccatgactcaaagtgcgatcctggtcaggcgactaaatatttgtatgaactgttatataatgatccgattaaaataattctgatgccagggtgctcatcagtgagtactctcgtcgcagaagccgcccgtatgtggaacctgatcgtgctttcctacggctcatcttcccctgccttgtcaaatcgtcagagattccctacattcttccgcacacacccgtcggccaccctgcacaacccaacacgcgtcaagctgttcgaaaagtggggatggaaaaagatagcaacaatacagcaaactactgaagtgtttacctctaccctggatgaccttgaggaaagagtcaaggaagccgggattgagatcacctttcggcaatcttttttcagtgaccctgccgtccctgtgaagaatctgaagcgccaggatgcgcgtataatagtgggcctcttttatgaaaccgaagcccggaaggtgttctgcgaggtgtataaagaaaggctgttcgggaagaaatatgtttggtttctgatcgggtggtatgctgacaattggtttaagatttacgaccccagcatcaactgcacagtggacgagatgacggaggctgtggaaggtcatataaccacagaaattgtgatgctgaatcccgctaatacacgctctatcagtaatatgacttcccaggagttcgtcgagaaactgacaaagcgcctcaaaagacatccagaagaaactggcggctttcaggaggctcccctagcctacgacgctatttgggccctcgcactcgctcttaataagacaagcggcggaggtgggcggtctggtgtgcgccttgaggacttcaattacaataatcagactatcaccgaccagatttacagagcaatgaacagctcatccttcgaaggcgtctcgggccacgtggtgttcgacgcctccggcagtaggatggcctggacattaatagaacagctccagggaggatcatacaagaaaattgggtattacgactctaccaaggacgatttatcatggagcaagactgataaatggattggagggtctccccccgccgaccagacactcgttatcaagactttcaggttcctttcccaaaagctctttatatcggtgagcgtgttgtcatctctgggcattgtgttggcagtcgtatgcttaagctttaatatctacaattcgcacgtgcggtacatccaaaattcccagccaaatctcaataatctgaccgcggtgggatgctcactagctttggcagccgtgttccccctgggactggatggctaccacatcgggaggaatcagtttccatttgtttgtcaagcccggctgtggctgctgggcctggggttttccctggggtacgggagcatgttcacaaagatttggtgggtgcatacggtgttcacgaagaaagaggaaaaaaaagaatggcggaaaaccctcgaaccatggaaattgtacgccacagtcggtctgctggtgggaatggacgtgctaactctcgctatttggcagatcgtggatcccttgcaccgtactatcgaaaccttcgccaaagaggagccaaaagaggacatagatgttagtatcctgccccagctggagcactgctcaagcaggaagatgaacacatggctcggaatattctacgggtataaaggtctgctgctactgcttggaattttcttggcttatgagacgaagtccgttagtacggaaaaaatcaacgaccatagagctgttggcatggcaatctacaatgtggctgtcttatgtttaatcactgcaccggtgactatgattttgtcttctcagcaagatgctgcattcgcattcgcctcactggccatagttttttcatcctatatcacgttagtggtactctttgtgcctaagatgaggagactcattacccggggcgaatggcagtctgaggctcaggacacaatgaagaccgggagttctaccaataataacgaggaggaaaagtctcggctcctggagaaggaaaatcgagaactagaaaagattatcgcagagaaggaggagcgcgtcagtgaattgcgacaccaacttcagagtcgccaacaacttcgaagccgtaggcaccctcctactccaccagagccgagtgggggtctaccgcggggtccacccgaaccacccgacaggctgagttgcgatggatccagagtccatctcctgtataagtag

SEQ ID NO: 288691 - RNA, 2700 nt, Artificial Sequence
  derived and/or modified sequence
augcuccuccuguugcuccuggcaccacuguuccugcguccccccggcgcagggggagcucaaacgcccaacgcaacuucggaggggugccaaauaauccauccgccuugggagggcggaauuagauaccggggcuugacccgcgaucagguaaaagccauuaacuuccugcccguggacuaugagauugaguauguuugucguggggaacgugaggucgugggucccaaagucagaaagugucuggcuaauggcucuuggaccgacauggacacaccaucuagaugcgucaaccguaccccacauucugagcgaagggcagucuauaucggcgcccuguuuccaaugucaggaggauggccaggggggcaggcuugccagccugcuguugagauggcucucgaggaugucaacuccagacgagauauccugccggauuacgagcugaaacugauccaucacgauucuaagugcgaccccggucaggcuacuaaauaucuguaugaacuguuguacaacgaccccauaaaaauaauccucaugccagguuguucaucugugucaacgcucgucgcggaggccgccaggauguggaaccucauagugcuauccuauggcucaagcuccccggcuuuaagcaaucgacagagguucccaacauuuuucagaacacaccccucggcgacccugcacaacccuacccgcgugaaacuguuugagaaaugggguuggaaaaaaauugcaaccauccagcaaaccaccgagguguuuacaucaacacucgaugaucucgaagaacgagugaaggaggcuggcauugagaucacauucaggcaaaguuuuuuuucagacccggcggugcccgugaagaaccugaagcggcaggacgcaagaauuauugugggacucuucuacgagaccgaggcuagaaaaguguuuugugaaguguacaaggagcgcuuguuuggaaagaaguacgugugguuuuugaucgggugguaugcugacaauugguuuaagaucuaugauccaucaauuaauuguacuguggaugagaugacagaagcgguggagggucauauuacaacugaaauuguuaugcucaaccccgccaacaccaggagcaucucaaacaugaccucucaggaauuuguagagaaacucacuaagcgacugaaacgccauccagaagaaaccggaggcuuccaggaggccccacucgccuacgaugcgauaugggcacuugcucuggccuuaaauaagacaagugguggcggcggcagaagcgguguccgguuagaggauuucaauuacaauaaucaaaccaucacugaccagaucuacagagcgaugaauucgucuucguucgaaggagugagcggacaugucgucuuugaugccucuggcuccagaauggcauggacuuugauagagcaguugcaaggcggguccuacaaaaagauugguuacuacgauagcaccaaagacgaucuauccugguccaaaacagauaaauggaucggaggaagucccccugcugaccaaacauuagugauuaagacauuccgguuucuuucccagaaacucuucauuucggugucaguucugucuucucucgguauuguguuggccgugguaugcuuauccuuuaacaucuacaauagucacguucgguauauacaaaauucucagccaaaucugaacaaucugaccgccgucggcugcucacucgcccuggccgccgucuuccccuuggggcucgauggcuaucacaucggcagaaaccaauucccuuucgugugucaagcuagauuguggcuguugggacugggguuuuccuugggguacggcuccauguucacaaaaaucugguggguccauaccguguucacgaaaaaggaggagaagaaggaauggagaaagacacucgaaccuuggaagcuguacgcaaccguuggucugcugguaggaauggacguguugacccuggccauuuggcagaucguggauccgcuacauagaaccaucgagaccuucgccaaagaagaaccaaaggaggauauugauguuucaauucugccgcaguuggaacacuguagcucccguaaaaugaacacguggcucggaauuuuuuacggcuacaaagggcuguuguuacugcuggguaucuuucuggcuuaugagaccaaaagcgugaguacggagaagauaaacgaccaccgagccgucggaauggccauuuauaauguagcugugcuuugccuaaucaccgcucccguaaccaugauucuguccucucagcaagaugcagccuucgcuuucgccucacuggcuauagucuuuaguucauacauuacacuaguagugcuguucgugcccaaaaugagaagacuuauaacacggggcgaauggcagucugaagcccaggauaccaugaagacuggaucuagcaccaacaacaaugaggaggagaaauccagauugcuugaaaaggaaaauagggagcuggagaaaauaauugcugagaaggaagagcggguuagcgaguuacgccaccagcugcagaguaggcagcagcuacgguccaggaggcacccccccaccccuccggaacccuccggcggauugccacgcggccccccagagccccccgauagacugucaugcgacggaucuagagugcaucuccuguacaaguag

SEQ ID NO: 288692 - RNA, 2700 nt, Artificial Sequence
  derived and/or modified sequence
augcuauuacuccuccuucucgcucccuuauuuuugaggccacccggugccggcggagcccagacaccgaacgccacuuccgagggaugucagaucauucacccccccugggaagggggaauccguuauaggggccucacucgagaccagguuaaagcgauuaauuuucugccuguggacuaugaaaucgaguaugucuguagaggggaacgcgagguggugggcccuaaaguacggaagugccuugcaaacggcagcuggacagauauggauaccccuagccgaugcgugaauagaacgccacacagugaacggcgggccguauacaucggugcuuuguucccgauguccggcgguuggccaggaggccaagccugucagccggccguggaaauggccuuggaggaugucaauagucggcgcgauauucucccagacuacgaauuaaaacugauccaucacgauagcaaaugcgaucccggccaggccacaaaauaccuguaugaacuccuguacaacgacccaauaaaaauaauucucaugccaggaugcuccuccgucucaacgcucguggcggaggcagcacggauguggaaucugauuguccucagcuacggcuccuccuccccugccuuaaguaaccgccagcgguucccuaccuuuuucaggacucacccuagugcuacacugcauaauccaacuagagucaaguuguuugagaaguggggauggaagaagauagcuacgauucaacagacgacagaaguguuuacuagcacucuugacgaucuggaggagcgagugaaagaagcugggaucgagaucacauuucgccagucuuucuucagcgauccugccgugccugugaagaaucucaaacgccaggacgcccgcauuaucguggggcuguuuuacgagaccgaagcuagaaagguauuuugcgaagucuacaaagagcggcucuuuggaaagaaauaugugugguuucugaucggcugguacgccgacaacugguucaaaauuuacgacccaucaauuaacuguacuguugacgaaaugacugaggcagucgaagggcauauuacaaccgagauugugaugcugaaucccgcuaauacucguagcauuucaaauaugaccagucaagaauuuguagagaaguuaacgaagcgacuuaagcggcacccagaagaaacggguggcuuccaggaggcaccucuugcuuaugaugccauaugggcacucgcacucgcuuuaaacaagaccuccggaggaggcggcagauccggcgugaggcucgaagauuucaauuauaacaaccaaaccaucacagaccagaucuauagagccaugaauucaagcuccuucgaaggcgucucuggacacgucguguuugacgccucggggucacggauggccuggacacugauagagcaguuacaggggggcucuuacaagaaaauuggauacuacgacucuaccaaggacgaucucaguuggaguaaaaccgauaaguggauaggggggagcccuccggcggaccagacucuugugaucaaaaccuuuagauuucugagccagaaacuguucaucucagugucagugcuaagcagcuugggcauagugcucgcaguggugugccucucuuuuaauaucuauaauucucacgucagauauauccagaacagccagccaaaucugaacaaccuuacugccguaggcuguagucuggcccuugccgccguguuuccacuuggacuggaugguuaccacauuggaaggaaucaguuuccauuuguaugccaagcgaggcugugguugcucggacuggguuucucccugggguacggauccauguucaccaaaaucugguggguccauaccguguucacuaaaaaggaggaaaaaaaggaauggcgaaagacccucgaaccauggaaacuguacgcaacagugggacuuuuagugggcauggacguuuugacuuuggcuaucuggcaaauuguugacccccuucaccgaacgauugaaaccuuugccaaagaggagcccaaagaggauauugaugugagcaucuuaccccaacuggaacacugcaguucacggaaaaugaacacuuggcugggaaucuuuuacgguuauaaagggcugcuccuuuuauuaggcaucuuuuuagcuuacgagaccaaaucuguuucaacggagaagaucaacgaccaccgggcagugggcauggcuauuuacaaugucgccguauugugccuuaucacugcacccgucacuaugauuuugucuagccagcaagaugcugccuucgccuuugcauccuuagcgauaguguuuucauccuauaucacccuugugguccucuuugugcccaaaaugagaagguuaaucacucgcggggaguggcaaucagaggcgcaggacacuaugaagaccggcucaagcacuaacaauaaugaagaagaaaaaucucgacugcuggaaaaggaaaaucgcgagcuugagaaaauuauugcugaaaaagaggagcgagucagugaguuacgccaccagcuccaguccagacaacaacugcgaucucggagacacccucccaccccaccugagcccagcggcggccugccaagggguccaccggagccucccgauaggcuuaguugcgacggauccaggguucaucugcuguacaaauag

SEQ ID NO: 288693 - RNA, 2700 nt, Artificial Sequence
  derived and/or modified sequence
augcuuuugcuccuucuucucgcuccacuauuucucaggccgcccggagcaggaggugcgcagacacccaacgccacuuccgaagggugccagauuauccauccaccgugggaaggaggaauacgcuauagaggccugaccagagaccaggugaaagccauaaauuuccucccaguagauuaugaaauagaguaugucugccgcggugaacgugaggucgugggaccaaagguccgcaagugucucgcuaauggauccuggacggacauggauacaccaucuagaugcgugaacagaaccccccauagcgaacgcagagcaguuuauauuggcgcgcuuuuccccaugucgggcggguggccugggggccaggccugucaaccugccguggagauggcuuuggaggacgucaacagccgcagagauauccuaccagacuaugaacuuaagcucauccaccacgacagcaagugcgauccaggacaagcaacaaaguauuuauaugagcucuuguacaaugauccgauuaaaauuauacuuaugcccgguugcagcagcgucagcacccuuguugcagaggccgcccggauguggaacuugauaguucugucuuaugggucaagcucucccgcauuaagcaaccgccagcgauuccccacuuuuuuucgcacucauccaagugccacauugcauaaccccacccgcguuaaauuguuugaaaaguggggcuggaagaagauugccacgauccagcagacuacagaaguguucacaagcacacuggacgacuuggaagagcgaguuaaagaggccggcaucgagauuacauuuagacaaucguucuucuccgacccagccgucccugugaagaaucugaaacgucaagacgcucggauuauugucggccuguucuacgaaacugaggcacgaaagguguuuugcgagguuuacaaggagagauuauucgguaagaaguaugugugguuccuuauugggugguacgccgauaacugguucaaaauuuacgauccaagcauuaauuguacaguggacgagaugacagaggcuguggagggccacauuacuacggagauugugaugcugaacccugccaacacccgcagcaucuccaauaugacuagucaggaguucgucgagaagcugacgaagagacugaaaaggcauccugaggagaccgggggauuucaggaagcgccccucgcauacgacgcuaucugggcccuugcccucgcccugaauaaaacuagcggggggggcggucgcucuggcguccgcuuagaagacuucaacuacaacaaucaaacuauuaccgaccagauuuaucgagccaugaacuccaguaguuuugagggcguuaguggccacguugucuuugaugcauccggaucacgcauggcuuggacucugaucgaacaguuacagggggguucauauaagaaaaucggguauuaugacuccaccaaagacgaccugucauggucaaagacagacaaguggauagggggcucuccccccgcagaccaaacacuggucaucaaaaccuuucgauuucucagccaaaagcuguuuauuucggucuccgugcugucuucgcucggcaucgugcucgcagucguaugccuuucguucaacauauauaauucccacgugcgguacauucaaaauagucagccuaauuugaauaauuugacugccgucggauguucucuggcguuagccgccguguucccccuggggcucgacggcuaucacauugggagaaaccaauucccauucgugugucaggcacggcuguggcuacucggccuuggauucagccucggcuaugguagcauguucacgaaaauauggugggugcauacaguuuucacaaagaaagaggaaaagaaagaguggagaaagacgcuugaacccuggaagcuguacgcuaccguggggcugcuuguugggauggacgugcugacccuugccaucuggcagaucguggacccccuucacagaacuaucgaaaccuucgccaaggaggagccaaaagaagauauagaugucucuauucugccccagcuugagcacuguaguagcaggaaaaugaacacuuggcuagggaucuuuuauggcuacaaaggacugcuuuugcugcucggaaucuuucuggcauacgagaccaaguccguaucaacagaaaagaucaaugaccauagggccguaggaauggccauuuacaacgucgccguucugugccuuauaacagcccccgugacuaugauucugucaucucagcaggacgcagcuuuugccuuugccucacuugcuauaguuuuuuccagcuauauuacccuugugguccuguucguuccgaagaugcggcgucuaauuacucgcggugaguggcagucagaggcccaggauaccaugaaaacaggcucguccacuaauaauaacgaagaggagaagucgcggcuccucgagaaagagaaucgggagcuggaaaaaaucaucgcugagaaggaggaacggguuucugaacugcgccaccaguugcaaucaagacaacaauuacguucaaggagacauccucccacacccccugaacccucagguggacucccacggggcccuccugaaccaccagauaggcugaguugugauggcaguaggguucaucugcucuauaaauag

SEQ ID NO: 288694 - RNA, 2700 nt, Artificial Sequence
  derived and/or modified sequence
augcuguuacuacugcuccuugcaccucucuuucugagaccuccgggcgccggcggugcccagaccccuaacgcuacuucagaaggaugccaaauuauucacccaccuugggagggcgggauuagauauaggggccugaccagagaccagguuaaggcaaucaacuucuugcccguggauuacgagaucgaguauguuugucgaggggaacgugaaguugugggaccgaaagugagaaagugccuugcuaauggaaguuggacugacauggacacaccaucccggugugugaauaggacgccucauucagaaagacgcgccguuuacauuggagcacuguucccuaugaguggaggauggccaggcggacaggcaugccaaccugcuguugaaauggcgcucgaggacgucaauaguaggcgggauauccucccagacuacgagcugaagcuuauccaucacgauuccaagugcgacccgggacaggcaacuaaauauuuguacgagcugcuuuauaacgacccgauaaaaauuaucuugaugccuggcuguucauccgugagcacccucgucgcugaagcugcgcggauguggaaccugauugugcuauccuaugggucauccaguccggcguugagcaaucggcagcgcuuccccaccuuuuuccgaacgcacccaucagccacucuucacaacccaacccgaguuaagcuguuugaaaaguggggcuggaagaaaauagccaccauacagcagaccaccgaagucuuuacauccacccuggacgacuuagaggagcgggucaaggaagcuggcauugaaauuacauuccgccaaagcuucuucagcgaucccgcugugcccguuaaaaacuugaaaaggcaggacgcgaggauuaucgugggacuguuuuaugagacugaagcucgcaaaguguuuugcgagguguauaaagaacgccuguuugguaaaaaguaugugugguuucuuaucggcugguaugcagacaauugguucaaaauuuacgauccauccauuaauuguacaguagaugagaugaccgaggccguggaggggcauauuacaacagaaauugucaugcucaaucccgcgaacacacgaucaauuuccaauaugaccucccaggaauucguggagaaauuaacaaaacgccuuaagagacauccagaagagacaggaggcuuccaggaggcaccccucgccuacgaugcaaucugggccuuggcccuugccuugaauaaaacuucuggaggagguggccgcucuggcgugcggcuggaggauuuuaauuacaauaaucagaccaucaccgaccagauuuaccgggcuaugaacucgagcagcuucgagggaguguccggccacgucguguuugaugcaucugggucccguauggccuggacucucaucgaacagcuacagggggguaguuauaaaaaaaucggcuauuacgacucuacaaaagaugaucuuuccugguccaaaacggacaaauggauaggcggcaguccgcccgccgaucagacccuugucauuaagacuuuucgguuccugagccagaagcuguucaucucugugagcguguugagcagccuagggauagugcuggcuguggucugucuguccuuuaacaucuauaacucacacguccgauauauccaaaacucccaaccaaacuugaacaaucugaccgccgugggcuguagccuggcuuuggccgcuguguucccacucggccuugacggguaucauauuggaagaaaucaguuuccuuucgugugucaggcgaggcuguggcucuuaggacugggcuuuagccuugguuacgggucgauguucacuaagaucuggugggugcauaccgucuuuaccaaaaaagaagagaagaaagaauggagaaaaacuuuggaaccuuggaaacuuuacgcgaccgugggcuugcugguaggcauggauguccugacccuggcaauuuggcagauuguggauccgcugcaucgaaccaucgagaccuuugcaaaagaagagccuaaggaggauauugacgugucaaucuuaccacaacuggaacauugcuccucccgcaaaaugaauacauggcugggcauauucuacggauacaaagggcugcugcugcuacuagggauauuucucgcuuaugaaacuaaguccgucagcacugaaaagauuaacgaucauagagccguggggauggccauuuacaauguggcagugcuuuguuugauaacagcacccgugaccaugauauuaucaucacagcaagaugcugccuuugcauuugcaucucuugccaucguguucagcucuuacauaacccuggugguguuguuugugccuaagaugagacgccuaaucacacgcggugaguggcagucugaagcacaggauacgaugaagacggguagcaguaccaacaacaaugaggaggaaaagucucgguuguuggagaaagaaaaucgagagcuggagaagaucauugccgaaaaggaagagagagucucagaacugcgacaucagcuucagucuaggcaacagcuacggagccgcagacauccuccaacccccccggagcccaguggaggcuugccacgaggacccccagaaccaccugaucgauugucaugcgacgggucccgaguucaccugcuguacaaguag

SEQ ID NO: 288695 - RNA, 2700 nt, Artificial Sequence
  derived and/or modified sequence
auguuauuacuucugcugcucgcuccacuguucuugaggccaccuggugccggcggcgcucagacaccaaacgcuacaucagaagggugccaaauuauccaccccccaugggagggcggcauccgguauagaggcuugacccgggaucagguaaaagcuauaaauuuccucccaguggacuacgagauugaauacgugugcagaggagaaagagaagucgucggcccuaaaguucguaagugucuggcaaacggcaguuggaccgacauggauacaccgagccgauguguaaaccggacaccucauuccgagaggcgggccguguacauuggggcacucuuuccaaugagcggaggguggccggguggucaggccugccagccugcggucgaaauggcacuggaagaugugaacagcaggcgcgauauacugccugauuacgaguugaagcugauccaccacgauagcaaaugcgaccccggacaggccaccaaauaucuguacgagcuauuguauaaugacccuaucaaaauuauuuuaaugcccgguuguuccaguguuuccaccuuggucgcagaggcugcaagaauguggaaccucauuguuuugucuuauggcuccagcagcccugcacugaguaaccgucagcgcuucccuacuuucuuccgcacucauccaucugccacguugcacaauccuacuaggguuaaguuguucgaaaagugggguuggaaaaagauugcgacaauucagcagacaaccgagguauuuacuagcacacuggacgauuuggaggaacgcgucaaggaggccggaauugagaucacauuuagacagagcuucuuuuccgauccugccgugccagugaagaaccugaagcgucaggaugcccgcaucaucgucggucuguucuaugaaacggaggcacgaaaaguauucugcgaagucuauaaagaaagacuauucggaaagaaauacguuugguuucugauaggcugguacgcugacaacugguuuaaaauauacgauccaucuauuaauugcacagucgaugaaaugacggaggcugucgaagggcauauuacuacagaaaucguuaugcugaacccggcaaacaccagaucaaucuccaauaugaccucucaagaguuugucgaaaaguugacuaaacgacuaaagcgccauccagaagaaacugggggcuuccaggaagcccccuuggcuuaugacgcuauuugggcccuggcgcuugcauugaauaagacgaguggcgggggcggaagauccggugugaggcuggaagauuucaauuacaauaaucaaacuauuacagaucagauuuauagagccaugaacucuuccucauucgaggggguaucuggccaugugguuuuugacgcaucuggcagccggauggccuggacacuuauugagcaguugcagggugggagcuacaagaagaucggguauuacgacuccacuaaggacgaccugucaugguccaagacagacaaguggauuggaggcagcccaccagcagaccagacgcuagucauaaagacuuucagguuccucucacaaaaacuguucauuucggugucagugcugucuucacugggcauagugcucgccguaguaugcuuaaguuucaauauuuauaauucccacgugcgguauauccaaaacagucagcccaaucugaacaaccucaccgcuguugggugcucacuggcguuggcagccguauucccacugggacuugacgguuaccacaucggucgcaaccaauucccuuuuguuugccaggcucgcuuguggcuccugggccuuggguucucgcuaggcuauggaucuauguucaccaaaauaugguggguucacaccguguucaccaaaaaggaagagaagaaagaguggcgaaagacauuagaaccuuggaaauuauacgcgacaguaggguuacuggugggcauggaugugcugacauuagcaauauggcagauugucgauccacuucaucgcaccauugagacuuuugcaaaagaagagcccaaggaggauaucgacguguccauccugccccagcucgagcauugcaguagccgaaaaaugaacaccuggcuugguaucuucuacggauacaagggccuacuucugcucuugggaaucuucuuggcguaugaaaccaaaagcguauccacggagaagaucaaugaccaccgcgcaguggggauggccaucuauaacgucgcuguucuuugccuuaucacagccccgguuacuaugauacuguccucacagcaggaugccgccuucgcguucgccagucucgcaaucguguucucuagcuacaucacucuggucgugcuguuuguuccuaagaugcgacgccuaauuacucgcggagaauggcaaagugaagcccaggacaccaugaaaacagguagcucuacaaacaauaacgaggaagagaagagccgucuuuuggaaaaagaaaaucgugaacuggaaaagaucaucgcugaaaaagaggagagagucucagaacugaggcaccagcuccagagccgccagcagcuucggagcaggaggcacccccccaccccccccgaaccuucgggaggucugcccaggggccccccagaaccaccugauagacugucuugcgacggaucaaggguucaccuguuauacaaguag

SEQ ID NO: 288696 - RNA, 2700 nt, Artificial Sequence
  derived and/or modified sequence
augcugcuccuucuucugcucgcaccguuguuucugagaccaccgggcgccggaggcgcacagacuccaaacgcgacuagugaagguugccagaucauucacccaccgugggagggggguauuagguaccggggucuaacccgugaccaaguaaaagccaucaauuuccugcccguugauuaugagaucgaguacgugugccgaggggagagagaaguggugggaccuaaggugagaaaauguuuggccaauggcagcuggacagauauggacacucccagucguugcgugaacagaaccccccacagcgagagacgcgcuguuuauauuggugcucuguucccaaugucaggaggauggcccggcggccaggccugccagcccgcugucgaaauggcucuggaagacguuaacucucgucgcgauauccuuccugacuacgaguugaaacugauccaucacgacucuaaaugcgauccuggucaggccacaaaguaccuguaugaauuacuuuauaacgaccccauuaaaauuauccuuaugccgggauguuccaguguaagcacccuuguggccgaggccgcuagaauguggaaucucauagugcuguccuauggcucuucuucaccggcccucagcaaccgccagcgguuuccaacauuuuucagaacucacccuuccgcaacauuacauaaccccacucgcgugaaacucuuugagaaauggggguggaagaagaucgccaccauccagcaaaccaccgagguguucaccuccacccuugacgauuuggaagagcgaguaaaggaggccgggauagagauuaccuuucgacaaucguuuuucagugaccccgcuguucccgugaaaaaucuaaagcgccaggacgcccggaucauuguaggucuguuuuaugagacagaggcucgaaaaguauucugugaaguguauaaggaacgguuguucgggaagaaauaugugugguuucuuauuggcugguacgcugacaauugguucaaaauuuaugauccuuccauuaauugcaccgucgacgaaaugacugaagcuguggaaggccacauaacaacagagauugugaugcugaauccagccaacacaagaucuauuaguaacaugaccucucaggaauuuguggaaaaacugacuaaacgauugaagagacacccugaggagaccggaggcuuccaggaggcuccguuggcuuacgacgcuauaugggcauuagcucucgcacucaacaaaacuucugguggaggcgggagaucuggcguccggcucgaagauuucaacuacaauaaccaaacaaucacggaccagauuuaucgcgcaaugaacuccagcuccuucgaggggguuagcggucauguugucuuugacgccuccggaucucgcauggccuggacgcugaucgagcaacugcagggcgggaguuauaaaaagauaggcuacuacgauuccacaaaggaugaucugagcuggaguaaaaccgauaaguggaucggcggcucaccucccgcagaucaaaccuuggucauuaagacauuucgcuuccugagucagaagcuguuuauuagcguuuccgucuuaagcucacuaggcauagugcucgccguaguuugccucuccuucaauauuuauaacucacacguucguuacauucagaacucucagcccaaccucaauaaccucacagcuguagguugcagcuuggcccuugccgcaguguucccacuggguuuggacggguaccacauuggaagaaaccaauuuccguuugugugucaagcccgcuuauggcuccuuggucuuggauucucucuggguuaugguuccauguuuaccaagaucugguggguacacaccguuuucacgaagaaagaagaaaaaaaggaauggcggaagacucuggagccauggaagcuguaugccaccguggggcugcucgugggcauggacguuuuaacacuagcuaucuggcagaucguggauccauugcaucggacuauugaaaccuucgcaaaggaagaacccaaggaggacauagaugugagcauccugccacagcuggaacacuguuccagcagaaagaugaacacauggcuuggcaucuuuuacggcuauaaaggucuccuuuugcuucuuggcauuuuucuggccuaugaaaccaagucagucucaacagagaagaucaacgaucauagggccguggggauggccauauacaaugucgcugugcucugccugaucacugccccugugacgaugauccugucuucacaacaggaugcagcuuuugcuuuugccucacuagcuaucgucuucagcaguuacaucacguuaguuguacuguuugucccuaagaugcgcaggcugauaacccggggagaguggcagucugaggcccaggauacgaugaaaacaggaagcucaaccaauaauaaugaagaagagaagucgcggcuuuuagagaaagaaaacagagaguuagagaagaucauagcugagaaagaagagcggguuagcgaacugaggcaccaacuccagucgcggcagcagcugagaagcaggcggcauccgccuacuccuccugagccuagcggcggacugccccguggacccccggaaccuccagacaggcugucaugcgauggaaguaggguccaccuacuguauaaguag

SEQ ID NO: 288697 - RNA, 2700 nt, Artificial Sequence
  derived and/or modified sequence
augcugcuccuguuguuacuggcccccuuauucuuacgccccccuggggcaggaggcgcucagaccccuaaugcuaccagcgagggcugucagauuauacacccacccugggagggaggcauucgauaccgagggcugaccagggaccaggugaaggcuaucaauuuccugccaguugauuacgagauugaguacguaugccggggagaaagagaggucguugggccgaaagugagaaagugccucgccaaugggagcuggacugauauggauaccccuucgcggugugugaaccguaccccccacucugagcggcgggccguauacauuggagcccuguucccuaugagcgggggauggcccgggggccaggcuugucagccugccgucgagauggcucucgaggaugugaauucccggcgggauauccugcccgacuaugagcugaaacugauccaccacgacucgaaaugcgaucccgggcaggccacuaaauaccuguacgaacugcuguacaacgacccaauuaagaucauucugaugcccggcugcucaagcgucucgacucucguugccgaggccgcucgaauguggaaucugauugugcucucauauggaucaaguaguccugccuugucaaaccgucagcgcuuucccaccuucuuccgaacgcauccuucagccacucugcauaacccuacaagggugaaacuguucgagaaauggggguggaaaaaaaucgcuacuauacagcagacuaccgaaguauucacaaguacccucgacgaucuggaagaaaggguuaaggaagcaggcauugaaauuacuuucagacagucauuuuuuucagacccugccgucccagugaaaaaucugaaacgucaagacgcaaggaucauugucggccuguucuacgagacagaagccagaaagguuuucugcgagguguauaaagaacguuuguucggaaaaaaauaugugugguuccugaucggcugguaugcugacaacugguuuaaaauuuacgauccaaguaucaacugcaccgucgacgagaugaccgaggcaguggaaggacauauuaccacggagauuguaaugcugaacccugcaaacacccgaucaauaagcaauaugacaucacaagaguuuguggagaagcuuaccaagaggcucaagcgucaucccgaggagacuggcggcuuccaagaggcgcccuuggccuaugaugcuaucugggcuuuagcacuagcucuuaacaaaaccaguggagggggagggagaucaggugucagacucgaggacuucaacuacaauaaucaaaccauuaccgaccaaauuuauagagccaugaacuccucuagcuucgagggcgucuccggccacgugguuuuugacgcuucaggcagucggauggcuuggacgcucauugaacagcuucaggggggcuccuacaaaaagauaggauauuacgauucaacuaaagaugaucucucguggagcaagacugacaaauggaucggugguucuccuccugcugaccaaacacuggucaucaagaccuuccgguuccuuucccagaaacucuuuauuagugugucugugcugagcucccugggcauagugcuggcugucguuugccugucauucaauauuuauaauagccacguuagguauauccagaauagccaaccaaaccuaaacaaucuaacagcuguuggcuguucgcuggcacuagcagcgguguucccccucgggcuggacggguaccacauaggaagaaaccaguuucccuuugugugucaggcucggcuguggcuuuuaggucuuggguucagccuaggguacggcucuauguucaccaaaauuugguggguccacacagucuucacgaaaaaggaggagaaaaaggaguggagaaagacacuggaacccuggaaauuguacgccaccgugggucuccugguggguauggacguccugacacuggcaauauggcagaucguggauccucuucacagaaccauugaaaccuuugccaaggaagaaccuaaagaagacaucgauguaucuauccucccccagcuagagcauugcucuucacggaagaugaacacaugguuaggcauuuucuauggguacaagggucuccuacugcugcuggguaucuuucuugcguacgagacuaagagcguauccacagagaaaauuaacgaccauagggcagugggcauggcaauuuacaacgucgccguuuuaugccugauaacagcuccugugacaaugauccuuuccucucagcaggacgccgcuuuugcguucgccagucuggcaauaguuuucaguuccuauaucacgcuaguuguucuuuuuguucccaagaugaggagauugauaacccggggcgaauggcaaucagaggcccaagacacgaugaaaacuggcagcuccacaaacaacaacgaggaagaaaagucaaggcuucucgaaaaggagaaccgugagcuagaaaagauuaucgccgaaaaggaggaaagagucuccgagcucaggcaccagcuacagagccgucagcagcuucgcucgagacggcacccaccgacaccaccggagcccuccggaggucugcccagggggcccccagaaccccccgaccggcuguccugcgacgguucgagagugcaccugcuguauaaauag

SEQ ID NO: 288698 - RNA, 2700 nt, Artificial Sequence
  derived and/or modified sequence
augcugcugcugcuacugcuagccccccuguuucucaggccccccggugcaggaggcgcgcaaacuccuaaugcaacaagugaaggaugucaaaucauccacccaccaugggaaggcgguauccguuaucgcggguuaacacgggaucaggucaaggcuauuaacuucuuaccaguggauuaugagaucgaauacgugugccgaggggagagggagguggugggccccaaagugcggaaguguuuggcgaacggcucuuggacugacauggacaccccuaguaggugcguaaaccggaccccccacagcgaaagacgugccguguacauuggugcccucuuuccaaugucggguggcuggccuggaggucaagccugccagccugccguugagauggcacuggaagacgucaauucuagaagggauauucugccggacuacgaguuaaagcuuauucaucacgauucuaagugcgaccccggacaagcgacaaaguaccuguaugaacuguuguauaaugacccuauuaaaaucauccuuaugccuggcuguuccuccgugagcaccuuaguggcagaagcugcacgcauguggaaucuuauuguccucagcuauggaucuaguuccccagcccugucuaaccgucaacgauuccccaccuuuuucagaacgcacccaucugccacguugcacaaccccacacgcgucaaacuguuugaaaaguggggguggaaaaagauugccacaauccaacagaccacggagguguucaccucaacccucgacgacuuagaggaacggguuaaggaggcaggcauagaaauuacauuucgccagucauucuuuucugaccccgccguacccgugaagaaccuuaaacgccaagacgcccgcaucaucgugggcuuauuuuaugagaccgaagcuagaaaaguauucugugaaguguacaaggaacgacuguucgguaagaaauacgucugguuuuugauuggcugguacgcugauaacugguuuaagauauaugauccuagcauuaauugcacaguugacgaaaugaccgaggccguggagggacacaucacuacagaaaucgucaugcuuaaccccgcgaacacgagaucuaucucuaacaugacaucccaggaauucgucgagaagcugacgaagagacucaaacggcauccugaggagaccgguggguuccaggaagcaccacuagcuuacgacgcaaucugggcucuagcucuggcacucaacaaaacaucuggaggcggaggccgaagcggcgugaggcuggaagauuuuaacuacaauaaucagacaaucacagaccaaauauacagggccaugaacagcaguaguuuugagggcgucuccggacaugugguguucgacgcuucugggaguaggauggccuggacauuaauugagcagcugcagggagggagcuauaaaaaaaucggcuacuacgauaguacuaaggaugaccuuucaugguccaaaacagauaaauggaucggaggaagucccccugcugaccaaacauuagugauuaagacauuccgguuucuuucccagaaacucuucauuucggugucaguucugucuucucucgguauuguguuggccgugguaugcuuauccuuuaacaucuacaauagucacguucgguauauacaaaauucucagccaaaucugaacaaucugaccgccgucggcugcucacucgcccuggccgccgucuuccccuuggggcucgauggcuaucacaucggcagaaaccaauucccuuucgugugccaagcaagguuguggcugcuagggcuuggauuuucucugggauauggcagcauguucacaaagauuugguggguccacacgguguuuacaaaaaaagaggaaaaaaaggaauggagaaagacgcuugagccuuggaaacuuuacgcuaccgucggccuguugguuggcauggacguccugacccucgcuaucuggcagaucgucgaccccuugcacagaacuaucgaaaccuucgcuaaggaagaaccuaaagaagauaucgaugucaguauacucccucaacucgaacacuguaguaguaggaaaaugaauacuugguuggguauauuuuacggcuauaagggccuccugcuacuuuuggggauuuuucucgcauacgaaaccaaguccguuucaaccgaaaagauaaaugaccacagagcugugggcauggcuaucuauaauguggcgguccuuugucugauuacugcccccgugaccaugauccucucaagccaacaggaugcugccuucgcguucgccagucuagcuauugucuucucauccuauauaacccuaguuguucuauuugugccaaagaugcgacgccugauuacccgaggugaauggcaguccgaagcacaggauacaaugaaaacuggaucuuccacaaacaacaaugaagaggagaagucccgccugcuugaaaaggaaaacagagaguuggagaaaauaauagcugaaaaggaggagagagucagugaauuaaggcaucaauuacagagucgccagcagcugagguccaggcgacaccccccuaccccuccugaaccauccggcgguuugccgagagggccaccugagccccccgaccgucugucuugcgauggaagcagaguccaccugcuguacaaguag

SEQ ID NO: 288699 - RNA, 2700 nt, Artificial Sequence
  derived and/or modified sequence
auguugcuccuauuguugcuggccccauuguuccugaggccgcccggugccggcggagcccagacucccaacgccacaagcgagggaugucaaaucauucaccccccuugggaggguggcauuagguaccgcggacugacaagagaccaaguaaaagcuaucaacuuucugcccguggacuaugagauagaauauguguguagaggagagagagaggugguugggccaaaagucagaaaaugccuggccaaugguucuuggaccgauauggacacuccauccagaugcgugaaccgcacaccacacagcgaaagacgugcagucuauauuggcgcccucuucccuaugucaggcggauggccaggaggccaagcaugccagcccgcugucgaaauggcgcucgaggacgugaacuccagacgggauauucuucccgauuaugagcugaagcugauucaucacgauuccaaaugcgaccccggucaggccacaaaauaucucuacgagcuucuuuacaacgacccuaucaagauuauccugaugcccggaugcagcucugugucuacucuuguggcugaggccgcuaggauguggaacuugauugugcuguccuaugguucuucaucuccugcgcuuucuaacagacagagauucccaacuuuuuuccgcacacauccuucugcuaccuugcauaacccaacccgugugaaguuguuugagaaguggggcuggaaaaaaaucgcaacuauucaacagaccaccgagguuuucaccagcacucucgacgaucuggaggaacgggugaaagaggccggcaucgaaaucaccuuccgacagucauucuucucagaucccgcagugccuguaaaaaaucuuaaaagacaggaugcgagaauuauagugggccuguucuacgaaaccgaggcaagaaaggucuucugcgaaguguacaaagaacggcuguucggcaagaaguacguaugguuuuuaauagguugguacgcagacaauugguucaagaucuaugauccauccauuaauuguacagucgacgaaaugacagaagcagucgagggccauauaacuaccgaaauuguaaugcucaauccugccaacacaagaaguaucagcaacaugacaagucaagaauuuguugaaaagcuuacgaaaagacucaagagacauccugaggaaacugguggcuuccaggaggcaccgcuggcauacgacgcuaucugggcuuuagcacuggcuuuaaauaagacgucugguggcgggggaaggagcggggugcgccucgaagacuuuaauuauaacaaucaaaccauuacagaucagauuuauagagccaugaauucgucuagcuuugaggggguaagcgggcauguaguauuugaugccagcggcaguagaauggcuuggacacugauagagcagcuccaaggaggguccuauaagaagaucggguauuaugacuccacaaaggaugaucuaagcuggaguaagaccgauaaguggauuggcggaucuccaccagccgaccaaacgcucgugaucaaaaccuuccgcuuccucucucagaaacuuuuuauuuccguuagugugcugaguagccucggaauaguccuugccgucguaugccucagcuucaacauuuauaauucccacguuagauacauucagaacucucagcccaaccucaacaauuugaccgcggucggcuguagccucgccuuggccgccguguucccccucggacucgacggcuaucauaucggaaggaaccaguucccguucgugugccaagcccgauuguggcuccugggucucggauuuucucucggauaugguuccauguucacaaaaauauggugggugcauacagucuuuacaaaaaaggaggaaaaaaaagaguggagaaagacucuugagccguggaaacuuuacgcaacagugggauugcucgugggaauggacgugcuaacucuggccauuuggcagauuguggauccccuccaucgcaccauagaaacauuugcaaaagaggagccaaaagaagacaucgauguuuccauauuaccacaacuugaacauugcagcucccgcaagaugaauacauggcuagggauauucuacgguuauaagggauuacugcuccugcuaggcauuuuucuggcuuacgaaacaaagaguguaucuacugaaaagaucaaugaucaccgcgcugugggcauggccaucuacaacguugcaguucuaugccucauaacugccccuguuacuaugaucuuauccucgcagcaggaugccgccuucgccuucgcuucacuggccauuguuuuuucuucauacaucacucuggugguacuguuugucccuaagaugagaagacugauuacuagaggugaauggcaguccgaagcccaagauaccaugaagacaggguccuccacuaacaacaacgaagaagagaaaagucgccuucuugaaaaggaaaaucgagagcuugaaaaaaucaucgcugaaaaggaggaaagagugucugaguuacgccaccaguugcaguccagacaacagcuacgcaguaggcgccauccacccaccccccccgagccaucuggaggauuaccaaggggcccccccgagccaccagaucgccuaagcugugacggaagccgggugcaucuccuguacaaguag

SEQ ID NO: 288700 - RNA, 2700 nt, Artificial Sequence
  derived and/or modified sequence
augcuucugcuuuuacugcuggccccguuauucuuaagaccuccuggcgcugguggagcacaaacuccuaaugcuaccucugagggaugccagaucauucaccccccaugggaaggcggaaucagauaccgcggccugacucgggaccagguaaaggcgauuaauuuucugccugucgauuacgaaaucgaauauguauguagaggagagcgggaaguuguagguccuaaaguucguaaaugucuggcuaauggauccuggacugacauggauaccccuagucggugcgugaaucgcacgccacauuccgaacgccgagccguguacauuggagcccuauuccccaugucuggaggcuggccuggaggucaagcuugccagccggcaguggaaauggcacuagaagacguuaacagcagaagggauauucugccugauuacgagcugaaacucauucaucacgacaguaagugugaucccgggcaggcuacuaaauaccuauacgaauuacucuauaaugacccaauaaagaucaucuugaugcccgguugcucauccguaucuaccuuagucgccgaagccgcccgcauguggaaccuuaucguuuuaaguuacgguagcaguucccccgccuugaguaauaggcagagauuuccaaccuuuuucagaacacaucccuccgcaacucuccacaauccaacacgggugaagcuguucgagaaguggggguggaaaaagaucgccacaauacaacagaccacggaagucuuuacgaguaccuuagaugaccucgaggaacguguuaaagaagcuggcauagagauaacuuuucggcagucauucuuuucagacccggcaguucccgugaagaauuuaaagaggcaagacgcccggaucaucgugggacuguucuaugaaaccgaggcacgcaaaguauuuugcgaaguguauaaagagcggcucuucggcaaaaaguacguuugguuuuuaaucggaugguacgcugauaacugguucaagauuuacgauccuuccaucaacuguacagucgaugaaaugaccgaagcagucgaagggcauauuacaacugaaaucgucaugcugaacccagcgaacacaagaagcauuucuaauaugacgagucaagaguucguggagaagcuaacaaaaagacuuaaaaggcacccggaagaaacaggcggauuccaagaagcuccacuggccuacgacgccaucugggcucuggcucuggcucugaacaagaccucagguggugggggaagaagcgguguuagauuagaagacuuuaacuacaacaaucagacuaucaccgaucagauuuaucgugccaugaauuccagcuccuucgaaggugugagcgggcacguggucuucgacgcuuccggaucccgaauggcauggacccucaucgagcagcuccaaggcggcagcuacaaaaagauuggcuauuacgauucaacuaaagacgaccuguccuggucaaagacugacaaguggauuggcgguucuccuccugcagaccagacgcuugugauuaagacuuuucgguuccugagucagaaguuguuuaucagugugagcguacucucaagucugggcauagucuuagcagugguuugucuuucuuucaacaucuauaauucccacguccgguacauccaaaauucucaacccaaccugaauaaucuuacugcaguugguugcagucuggcccucgcugcagucuuuccucugggacuagacggcuaucacaucggcagaaaucaguucccuuuuguuugucaagcacgucuuuggcugcuaggccuuggcuucucguuaggguacggaucuauguuuacuaaaauuuggugggugcauaccguguuuaccaaaaaggaggaaaagaaagaauggaggaaaacgcuggagccauggaagcuuuacgccacugugggauuacuuguagggauggacguucugacucuggcaaucuggcaaaucguggacccucuucauagaacaauugaaaccuucgcuaaggaagaacccaaggaagauauugacguguccauccugccacaacuugagcauuguagcagucgaaaaaugaacacuuggcugggcauuuucuaugguuauaagggcuuacuccuccugcucgguauuuucuuggcauacgaaaccaaauccgugucaacagagaaaaucaaugaccaccgugcagucggcauggcuauauacaauguagcuguacuguguuuaauaaccgcaccggugacuaugauccuauccucucagcaagaugccgccuucgcuuucgccucccuugccauugucuucucaaguuauauaacacucgucguccuguuugucccuaaaaugcgacggcucauaacgagaggcgaauggcagucagaggcacaagauacuaugaagacaggcaguucaacuaauaauaaugaagaagagaaaaguagacucuuggagaaagagaaccgcgaacuugagaaaaucaucgcugaaaaggaagaacguguuuccgaacugagacaucaauuacagucgagacagcagcuacggucacgucgccauccccccacgccacccgaaccuuccggcggucugccacgggggcccccagaacccccugauaggcucucuugugacgguucaaggguacauuugcuguauaaauag

SEQ ID NO: 288701 - RNA, 2700 nt, Artificial Sequence
  derived and/or modified sequence
augcuguuacuacugcuccuugcaccucucuuucugagaccuccgggcgccggcggugcccagaccccuaacgcuacuucagaaggaugccaaauuauucacccaccuugggagggcgggauuagauauaggggccugaccagagaccagguuaaggcaaucaacuucuugcccguggauuacgagaucgaguauguuugucgaggggaacgugaaguugugggaccgaaagugagaaagugccuugcuaauggaaguuggacugacauggacacaccaucccggugugugaauaggacgccucacucagagagacgcgcgguguauauaggcgcucuguucccaaugagcggugguuggcccggaggucaggccugucagcccgcuguugaaauggcucuagaagacguuaauaguaggagagauauauuaccggacuaugaacuuaaacugauucaucacgauaguaagugcgacccgggccaagccacuaaauaccucuacgaauuauuguacaacgauccuaucaagauuauacuuaugccuggcugcucaaguguaucaacucucguggcagaggcugcacgcauguggaacuuaauagugcugaguuacggcaguucauccccagcuuuaagcaacaggcagagauucccgacguucuuccguacucaccccagugcuacccuccacaacccuacuagaguaaagcuauuugagaaauggggcuggaagaagaucgcuaccauacaacagaccaccgaaguuuucacauccacucuagacgaccucgaggagagagugaaggaagcuggaauagaaauuaccuucagacaguccuucuucagcgacccagcugugccagucaagaauuugaagcggcaggacgcccgcaucaucgugggacuguucuacgagacggaggcuagaaaaguguucugugaaguguacaaggaaagacuguuuggaaaaaaauaugugugguuccugauuggcugguaugccgauaauugguuuaagauauacgauccuucuaucaauuguaccguagaugagaugacugaggcuguggaaggccauaucaccaccgagaucguuaugcugaauccugcgaacaccagaagcauuucaaacaugacgucacaagaauucguagagaagcugaccaaaagacucaaacggcacccagaagagacagggggguuucaggaagccccucucgcguaugaugcaauaugggcacuugcauuggcucucaacaagacaagcggcggcggaggcaggagcggugugcgacucgaagacuucaauuacaauaaccagacaauuaccgaccaaaucuaccgggccaugaacagcucauccuuugagggcguuucaggccacgucguauucgaugcuagcggcucuagaauggcguggacccucauugaacagcuccagggagggagcuacaaaaaaaucggauauuaugacucuacaaaagaugaucuuagcugguccaaaacagauaaguggauugggggcucaccucccgcagaccagacucucguuauuaaaaccuuccgguuccucucccaaaaguuauuuaucagugucuccguguuaucuucgcugggcaucgugcuagcgguagucugcuuaucauuuaauaucuacaacagucacguucguuacauucagaacucgcaaccuaacuugaauaacuuaacagcggugggcuguagccuagccuuggcggcgguguuucccuuaggacucgacgguuaccauaucgggagaaaccaauuuccguucgucugccaggcccgguuguggcugcuuggccuagguuucucccucggcuauggcucaauguucacgaaaaucuggugggugcauacuguauuuacuaagaaagaagagaagaaggaauggcggaagacacuggaaccauggaagcuguacgcuacagugggacucuuaguugggauggacguauugacacuugcuauauggcagaucguugauccgcugcacaggacuaucgagacauucgcuaaagaggaacccaaagaggauaucgacguaaguauucugccacaguuagagcacuguuccucccgcaagaugaauaccuggcuggguauuuuuuaugguuacaagggucuucugcuuuuauuggguaucuuucuggcuuacgaaacuaaaaguguaagcaccgagaaaaucaaugaccaucgcgccguaggaauggcgauuuacaacgucgcgguccucugucuuauaacagcuccaguuacaaugauccucuccagccagcaagaugcugcauuugccuucgcuucucucgcuauuguguucuccagcuauauaacucugguugugcuauucguucccaaaaugagaaggcucauuacgagaggcgaauggcagagcgaggcccaggauacaaugaaaaccggaaguaguaccaacaauaaugaggaggagaaaucccggcuacuggaaaaggaaaaccgggaacuggagaagauaauugccgaaaaagaagaacggguguccgagcugaggcaccaacuccagucccgucaacaguuaagguccagaaggcaucccccgacacccccagaaccaucaggaggauuaccgcgaggcccacccgaacccccagaucgacugaguugugacggaucccgcguccaccuacuuuacaaguag

SEQ ID NO: 288702 - RNA, 2700 nt, Artificial Sequence
  derived and/or modified sequence
auguuauuacuucugcugcucgcuccacuguucuugaggccaccuggugccggcggcgcucagacaccaaacgcuacaucagaagggugccaaauuauccaccccccaugggagggcggcauccgguauagaggcuugacccgggaucagguaaaagcuauaaauuuccucccaguggacuacgagauugaauacgugugcagaggagaaagagaagucgucggcccuaaaguucguaagugucuggcaaacggcaguuggaccgacauggauacaccgagccgauguguaaaccggacaccccauuccgaacgccgggcggucuacauuggugcccuuuuuccaaugagcggaggauggccaggcgggcaagcuugucagccagcaguggaaauggcacucgaagauguuaacagcaggagggacauacugccggacuaugagcuaaagcugauucaccacgacucuaagugugacccaggccaggcuacuaaguaccuauacgagcugcuuuauaacgacccaauuaaaauuauucucaugccaggauguucuucagugucuacacucgucgccgaggccgcuagaauguggaacuuaauuguucugucauacgguuccuccucaccugcucugucuaaucgccaacgcuucccaacauucuuuagaacacauccuucagccacacugcacaacccaacaagagucaaguuauuugaaaaauggggguggaagaaaaucgccacuauacaacagacuacagaagucuucacuagcacucuggacgauuuggaagagcgcguuaaggaagcuggcaucgagauuacauuucggcagucauucuuuagugauccagccguaccaguaaagaaucugaagcgccaggaugcgagaauuaucguggggcuguuuuacgagaccgaggccaggaaaguguuuugcgaaguuuacaaggaaagguuguuuggaaaaaaauacgugugguuccucauaggcugguacgcugauaacugguucaaaaucuacgauccgucgauuaacugcacuguagacgaaaugacugaagcugucgagggucacauuacgacugagauugugauguugaauccggccaauacuagaaguauaucaaacaugacaucacaggaguuuguugagaaacucacaaagcgccugaaaagacauccugaagagacugggggauuccaagaagccccgcuggcauacgacgcuaucugggcacuggcacuggccuugaauaaaacuucaggaggggguggaaggucuggcguaagauuagaggacuuuaauuacaauaaucaaaccauuacugaucaaaucuaucgugcaaugaacucuagcagcuucgagggggugucaggccacgugguguucgacgcaagugggucucgaauggccuggacucugaucgagcaauuacagggcggcaguuacaagaaaaucggcuacuaugacucuaccaaggaugaucugucaugguccaagacugauaaguggauagguggcucaccuccagcggaccaaacacuggugaucaagacguuucgguuucucucccaaaaguuguucaucucggucucuguguugucgagucugggcaucguucuggccgugguauguuugucuuucaauaucuacaacucgcacguccguuacauccaaaauucccaaccuaaccucaacaaucuuacagcuguggggugcucucucgcccuugccgcgguauuuccacugggccuggauggcuaucauaucggcagaaaccaauuucccuuugucugucaagcccgauugugguuauugggccucggcuuuucacuggguuacggcaguauguuuaccaagaucugguggguucacacaguguuuaccaagaaagaggaaaaaaaggaguggagaaaaacacuugaaccauggaaguuauacgcaacuguaggucugcugguggggauggacgugcugacgcuggccauauggcaaauaguggacccuuugcaucgcacaaucgagacguuugcuaaagaggagcccaaagaagauauagacguuuccauucugccccagcucgagcacugcucuucucggaaaaugaauacuuggcuuggcauauuuuacggcuacaagggauugcuucuucuuuugggcaucuuccuggccuacgagacaaaauccgugagcacagaaaagauuaaugaccaccgggccgucgggauggcuauauauaacgucgcaguucuuugucucaucacugcgccugugacuaugauccuuuccucccaacaagacgcugccuuugccuucgccucacuugccaucguguucucaucauacauaacucucgugguuuuauucgucccuaaaaugaggcgcuugauaacucggggcgaguggcaaagcgaggcccaggacacuaugaaaaccggcagcaguaccaacaauaacgaagaggagaagucucgucuccuggagaaagagaaccgugaauuagagaagaucaucgcagaaaaggaagaaagagugagcgaacugagacaccagcugcagucuaggcaacaacugagguccagaagacaucccccaacacccccagagccgagcggagggcuuccacgagguccaccagaaccaccugauaggcuuucuugugauggaucuagagugcaucuccuauauaaguag

SEQ ID NO: 288703 - RNA, 2700 nt, Artificial Sequence
  derived and/or modified sequence
auguuacuacuguuguugcuugcaccucuuuuucugcgaccuccaggugcaggaggagcccagacgccaaaugcuaccucagaagggugccagauuauucauccgccaugggagggcggcauccgguauagaggauuaacgcgggaucaggugaaggccauaaauuuucugccaguagauuaugaaauagaguaugucugcagaggcgagcgagaagugguggggccaaaagugcggaagugccuugcaaauggaaguuggacagauauggauacuccaagucgcugugugaaccguaccccacacucugaaaggcgugccgucuacauaggcgcucucuuucccaugucaggcggauggccaggugggcaagcuugucagcccgcgguagagauggcacuggaggaugucaacucucgacgcgauauacuccccgacuacgaacugaaguugauacaccacgacucuaaaugugaucccggucaggcaaccaaguaucuauaugagcuucuguauaacgauccuauuaaaauaauucuuaugccggggugcuccagcguaucaacauuaguagcugaagccgcacgcauguggaacuuaaucguucuuucuuauggaagcuccucaccagcccucucuaacagacagcgcuuuccuacauuuuuuaggacccauccuuccgccacacuccacaaucccaccagagucaaguuguucgagaaaugggguuggaaaaaaauugccacuauccagcagaccacugaaguauucaccucuacacuggacgauuuggaagaaagggugaaagaagccggcauagaaaucaccuuucgucagagcuucuucuccgaucccgccgucccgguuaaaaaucugaaaagacaagaugcuaggauaauugucggacuguucuacgagacugaggcucggaaaguguucugugaggucuacaaagaaagacuguucggcaaaaaauacgugugguucuuaauuggaugguaugcagauaacugguuuaagauuuaugaccccuccaucaauuguacaguugacgaaaugacagaagccguggagggccacauuacuacugagauugugauguuaaacccagcaaacacuagaucaauuucuaacaugacaucacaagaauucguagaaaaacucacuaaaaggcuaaaaagacaccccgaagagaccgguggauuccaagaagcuccucucgccuacgacgcaaucugggcauuggcacuggcacuaaacaaaacaagugguggaggcgggagaucaggggugagauuggaggacuuuaacuacaauaaccaaacaauuaccgaucaaauuuacagggccaugaauaguuccuccuuugaaggcgucucagggcaugucgucuucgaugcuagcggaucacgaauggccuggacacucauugagcagcugcaaggaggauccuauaaaaagaucggauacuacgacuccacaaaagaugauuuaagcugguccaaaaccgacaaguggaucggcggcuccccuccagccgaccagacccucgucaucaagacuuuucgguuccugucgcaaaaguuauuuaucaguguaucuguccuaucuucgcuuggcaucguccucgcaguugugugucucuccuuuaauauauacaauagucaugugcgguauauccagaacucacaaccaaaccugaacaaccuaacugccgucggauguucccucgcucuggccgccgucuuuccucuuggacuugauggguaccauaucggcagaaaccaguuucccuuugucugccaggcuagacucuggcuguuagggcuggguuucucauuaggauaugggucuauguucacaaaaaucuggugggugcauacugucuuuacgaaaaaggaagaaaagaaggaauggaggaaaacacucgaacccuggaagcuauaugccaccgugggacugcuugucggaauggaugugcugacucuugcaauuuggcagauaguugauccucuccaccguaccaucgaaacauucgcgaaggaagagcccaaagaggauauagauguaagcaucuugccccaacuggaacacuguucuuccagaaagaugaacaccuggcuggguauuuuuuacggauacaaaggacugcugcugcugcuugguaucuuccuugcguacgaaacuaaguccguuucaaccgaaaaaaucaaugaccacagggccgugggaauggccauuuauaauguggcagucuugugccucaucacagccccuguuacuaugauucuguccucccaacaggaugcagcuuucgcuuucgccagcuuagcuaucguguuuuccucuuacauaacucuaguuguuuuguuuguuccuaagaugcgccgccucauuacgcgcggugaguggcaaagugaggcucaagacaccaugaaaacaggcuccucuacaaacaacaaugaggaagaaaagucaagacugcuggagaaggaaaaccgggaacuggaaaaaauuauagcugaaaaggaagaaagagucucugaacucagacaccagcuacaauccaggcaacagcuuagaucuagacgccauccacccacucccccugagcccucuggugggcugccacguggaccuccagagccccccgauagacucucaugugauggaucgagagugcaucuucuuuacaaguag

SEQ ID NO: 288704 - RNA, 2700 nt, Artificial Sequence
  derived and/or modified sequence
augcugcuccuucugcugcuagcaccucuguuucuacgccccccaggagcuggaggugcucagacacccaacgcuacuucagagggcugucagaucauucaucccccuugggaggggggaauuagauaucgggggcugacacgcgaucaggugaaggccauuaauuuccugcccguggacuaugagauugaauauguguguagaggagaaagagaaguuguaggaccaaaagugcgaaagugucuggccaauggcucauggaccgauauggauaccccaaguagguguguuaaccgaacaccucauagugagagaagagccguguacauuggugcccucuucccuaugucuggugguuggccugguggacaagcuugucagccagcugucgagauggcacucgaggaugugaacucuagaagggacauccugccagacuacgagcugaaacuuauucaccaugacucaaagugugaccccggucaggccacuaaguauuuguaugagcuuuuguacaaugauccaaucaaaauuauucucaugccaggauguagcuccguaucgaccuuaguugcagaggccgcuaggauguggaaccucaucguacuuagcuacggcuccaguagccccgcccucucaaaccggcaacgcuucccaacuuuuuucagaacucaucccagcgccacucugcauaauccuacccguguuaaauuguuugaaaaaugggguuggaagaaaaucgcuacuauccagcaaaccacugagguuuucacuagcacucuggacgaucuugaagaaagggugaaagaagcagguaucgagauuacauuucggcaguccuucuuuuccgacccugcgguucccguuaaaaaccuuaaacgacaagacgcaagaauuauagugggucuguucuacgagacugaggccagaaagguguucugcgagguguacaaagaaagacuguuuggaaaaaaauacgugugguuccucaucgggugguacgccgauaacugguucaagauauaugauccuuccaucaauugcacaguugacgagaugaccgaggcuguggaagggcacauuacgacggaaauugucaugcuaaauccagcgaauacaaggucaaucucuaacaugacaagucaggaguuuguggaaaaauugacaaagaggcugaaacgacacccagaggaaacgggcggguuccaagaagcgccauuggccuacgaugcaauuugggcacuggcucucgcgcuuaauaagacgucuggcggcggaggcagaagcggcguacggcucgaggauuucaacuacaauaaccagacaauuaccgaccaaauuuaccgagcaaugaauaguagcuccuucgagggggugucaggacacgugguauuugacgcaucaggaaguagaauggccuggacuuugaucgaacaacugcaggggggauccuacaaaaagaucggguauuacgauuccacaaaggacgaucugucauggucuaagacugauaaguggauugguggaagcccucccgcagaccaaacacucguaaucaagaccuuucgcuuucucucucaaaaacucuuuauuuccguguccguccugucaucucucgguauuguccucgcuguugucugucugucauucaacauauacaacucacaugugcgcuauauccagaacagccagcccaaccucaauaaucugaccgccguugggugcucacuggcucuggcugcuguuuuuccccugggguuagacggcuaccacauaggccgaaaccaguuucccuuugucugccaggcaagauugugguuacucggccugggcuucagccucggauacgguuccauguucacaaaaauuugguggguccauacugucuuuaccaaaaaagaagagaagaaggaguggaggaaaacgcucgagcccuggaaacuuuacgccaccgugggucuacugguaggaauggaugucuuaacccucgccaucuggcagaucguugacccuuugcaccgcaccauagagacuuucgccaaagaagaacccaaagaagauaucgacgugucgauccuuccacaguuggagcacugcucaucucggaagaugaauaccuggcucggaauauucuacggauauaagggacuacuccuccuguuggggaucuucuuagcuuacgagacuaaauccguuuccacagagaagauaaaugaucaucgggccguaggcauggcaauuuauaaugucgcuguucucugucucaucaccgccccugugaccaugauccuuuccagucagcaagaugcggcuuucgcauucgcuucauuagcaaucguguucaguuccuauaucacucuaguuguguuauuugugcccaagaugagaagguuaauuaccagaggagaguggcagucagaagcacaagauacuaugaagacaggauccaguaccaauaacaaugaagaagagaaaucacggcugcuggagaaggaaaaucgcgaacuggaaaagauuaucgcagaaaaggaggaacgggucucugaauugcgucaccaacugcagagcaggcagcagcugaggagcagaaggcaucccccuacucccccggaaccuuccggaggucuaccccgcggaccccccgaaccgcccgaucgccuuucaugugacgguuccagaguccaccugcuguacaaguag

SEQ ID NO: 288705 - protein, 201 aa, Artificial Sequence
  derived and/or modified sequence
MAWMLLLILIMVHPGSCALWVSQPPEIRTLEGSSAFLPCSFNASQGRLAIGSVTWFRDEVVPGKEVRNGTPEFRGRLAPLASSRFLHDHQAELHIRDVRGHDASIYVCRVEVLGLGVGTGNGTRLVVEKEHPQLGAGTVLLLRAGFYAVSFLSVAVGSTVYYQGKCLTWKGPRRQLPAVVPAPLPPPCGSSAHLLPPVPGG

SEQ ID NO: 288706 - DNA, 606 bp, Artificial Sequence
  derived and/or modified sequence
atggcctggatgctcctgctgatcctcattatggtgcaccccggttcctgcgcactatgggtgtcgcagcccccagagatccggacgcttgagggtagcagcgcttttctcccttgttcttttaacgcttcccaaggcagactcgccattggatcggtaacgtggtttagagatgaggtggtccctggcaaagaagtgagaaatggaacgccagaattccgcggccgccttgcaccgctcgctagttcgcggttcttgcacgaccaccaggccgagcttcacatccgtgacgttcgggggcacgacgcctcaatttatgtctgcagggtggaggtgctgggcctcggcgtgggtaccggtaacggcactagactcgtagtggagaaggagcacccccagttgggcgctggaaccgtgctcctcttaagagccggattttacgctgtgtcctttttgtcggtcgccgtggggtccactgtttactaccaggggaagtgtctgacatggaaagggcccagacggcagctgcctgcagtcgttcccgcgcccctgccccccccctgcggtagcagcgcccacctgctccctcccgtccccggcgggtag

SEQ ID NO: 288707 - DNA, 606 bp, Artificial Sequence
  derived and/or modified sequence
atggcctggatgctgctgctgatcctgattatggtgcatcccggcagctgcgccctctgggtgtcacagccaccagaaatcagaacactggagggaagttccgcctttctgccttgtagctttaatgcttcacaggggcgtctggctatcgggagcgttacctggttccgagacgaagtggtgcccggcaaagaggttcgaaacggaacacccgaattcaggggcagactcgcccccctcgcctcctctcgcttcctgcatgatcaccaagctgagctacacattcgcgatgtcagggggcatgatgcatctatctacgtttgtagagtcgaagttctgggactaggtgttggcacaggaaacgggacccgactcgttgtggagaaggaacacccgcaactgggcgcaggcactgtgctgctccttagggccgggttttatgccgtaagctttctcagcgtggccgtgggatcgacagtgtattaccaggggaagtgccttacttggaagggaccgcggaggcaattaccagccgtggtccccgcgccacttccaccaccctgcggcagcagtgcgcacttgctgcctccggtgcccggtgggtag

SEQ ID NO: 288708 - DNA, 606 bp, Artificial Sequence
  derived and/or modified sequence
atggcatggatgctgcttctgattcttatcatggtgcaccctggctcgtgcgccctgtgggtgtcccagccacccgagataaggacactggaaggatcctccgcattcctcccgtgcagtttcaacgcctctcagggtagactggcaatagggtcagtcacctggttccgggatgaggtagttcctggcaaggaggttcgtaatggcactcccgagttcaggggacgactggctccactcgcaagtagcaggtttctacacgatcatcaggccgagctccacatccgggacgttcggggccatgacgcctccatatatgtgtgtcgagtggaggtgctcggcttgggggtgggaaccggcaatggtacaagactggttgttgagaaggagcacccccaacttggtgcaggcactgtcttgttgctgcgagccgggttttatgctgtctccttcctcagtgtggccgtcggaagcactgtttactaccagggtaagtgtctgacctggaagggcccaagacgacagctgcctgctgtggtgccagcaccactgcctcccccctgtgggagtagcgcccatttgctgcctcctgtccctgggggctag

SEQ ID NO: 288709 - DNA, 606 bp, Artificial Sequence
  derived and/or modified sequence
atggcttggatgctcttactgattctcataatggtacatcccggttcctgtgccctgtgggtgtcccaaccacctgaaatcagaactctggagggcagtagtgccttcctaccgtgctcctttaacgctagccagggccgacttgccattggaagcgtgacctggttccgcgacgaagtggtcccgggcaaagaagtgaggaacggcaccccagaatttaggggcagacttgctcccctggccagctcaagattcttgcatgaccatcaggccgagttacatatcagggatgtccgaggtcatgacgccagcatttatgtctgtcgcgtcgaagttctcggacttggtgtcggaaccgggaatggcactcgtttggtcgtggaaaaagagcacccccagctgggcgccgggacggtgttactcctccgggctggattttatgccgtgagctttctcagtgtggcagtggggtcaacggtgtactaccagggaaagtgcctgacctggaaagggccgcgaagacagctgccggccgtggttcccgctcctctgcctcctccatgcggatcaagtgcacacctgctcccacctgttcctggcgggtag

SEQ ID NO: 288710 - DNA, 606 bp, Artificial Sequence
  derived and/or modified sequence
atggcttggatgttgttgctcatcctgattatggtgcaccctggctcgtgtgctctctgggtgtcccagccaccagagatacgcacactcgaaggttcatccgccttcctgccctgcagcttcaatgcttcccagggtcggctggcaatcgggtcagtcacctggtttagggatgaggtagtcccggggaaagaagttcggaacggcacacccgagttcaggggcaggctcgccccactagccagctccagatttctgcacgatcatcaagctgagctgcatattagagatgttaggggacacgacgcctccatctatgtgtgtagggtggaggtgctgggcttaggtgtcggtacgggaaatggcacccgtttagtggtggagaaagaacacccccagctgggcgcgggaacagtcttgctgctgagggcaggcttctacgccgtgagtttcctgtcggtggccgtggggagcactgtgtactaccagggaaagtgcctgacgtggaagggcccgcgtcggcaactgcccgcggtagttccagcccccttgcctcccccctgtggatcgagcgctcacctcctgcccccagtgcctggaggttag

SEQ ID NO: 288711 - DNA, 606 bp, Artificial Sequence
  derived and/or modified sequence
atggcttggatgctgctgctgatactcattatggttcatcctggatcctgcgccctatgggtgtctcagccccctgagattcggacattagaaggatcttccgcctttttgccctgcagctttaacgcatcccagggccggcttgctatagggtccgtgacttggttccgcgacgaggtggttcccggaaaagaggttcgcaacggcacacctgagttccgcggacggctcgcccctctcgctagctcaagattccttcatgatcatcaggcagaactccatatacgagacgtccgggggcatgacgcctcaatctacgtgtgcagagtggaggtgcttggcctgggggtcggcaccggcaatgggactcgtctggtggttgaaaaggaacatccacaactgggcgcaggcacagtcttgcttttgcgcgccgggttctacgccgtgagttttctcagcgtggccgtcggtagtactgtctactatcagggcaagtgcctcacttggaagggccctcggagacagttgcccgctgtggtgcccgcccccctcccaccgccgtgtgggtccagcgctcatcttcttcctcccgttccagggggctag

SEQ ID NO: 288712 - DNA, 606 bp, Artificial Sequence
  derived and/or modified sequence
atggcctggatgcttctcctgatcctgattatggtgcaccctggaagctgtgccctttgggttagccagcctcccgaaatacgaacccttgagggctcctccgcttttctgccttgctcatttaatgcttctcaaggaaggctggccatcgggtccgttacatggttccgtgacgaagtggtccctggtaaggaggtgcgtaatggaactcccgagttcagggggaggctggcccccctcgctagcagtagattcttgcacgaccaccaggccgagctgcacattcgggacgttagggggcacgatgcttccatttacgtgtgtcgggtagaagttctcggcctgggcgtcggcaccggtaatgggacaaggttagtagtagagaaagaacatccacaacttggtgccgggacagttttgcttctgagggccggattctatgccgtaagtttcctgtctgtcgctgtcggcagcaccgtgtactaccaaggcaagtgcctgacctggaagggcccgaggcggcagctgcccgccgtggtccccgccccattgcccccaccctgtggttcttctgctcatctcctgcccccggtccccgggggatag

SEQ ID NO: 288713 - DNA, 606 bp, Artificial Sequence
  derived and/or modified sequence
atggcttggatgctactactgatcctgatcatggtccaccccggttcctgtgccctgtgggtctctcagccaccagagatcaggacactggagggttcgtccgcctttctaccttgcagtttcaacgcttcgcaagggcgactggctatcggctctgtgacctggttccgtgacgaagtggttcctggaaaggaagtgcggaacggaaccccagagttccggggcagactcgctcccctcgctagtagccggttcctgcacgaccatcaagcagagctgcacatccgcgatgtccggggtcatgacgcttctatttatgtctgcagggtcgaagtgctaggactgggcgtagggaccgggaatggaaccaggttggtggttgaaaaagagcaccctcagctgggagctgggactgtcttgctcctgcgggccggcttctatgcggtgagctttctcagcgtggccgtgggtagcaccgtctactatcaaggaaagtgtctcacatggaagggcccaaggcggcagctaccagcggtggtccctgcaccgttgcccccaccctgtggtagctctgcccacttgctccccccagtgccagggggttag

SEQ ID NO: 288714 - DNA, 606 bp, Artificial Sequence
  derived and/or modified sequence
atggcctggatgctgctgctgatcctgatcatggtgcaccctggcagctgtgccctgtgggtgtcccagcccccagagatccgcaccctggagggcagcagcgccttcctgccctgcagcttcaatgccagccagggccgcctggccatcggctctgtgacctggttcagagatgaggtggtgcctgggaaggaggtgagaaatggcaccccagagttccggggccgcctggcccccctggccagcagccgcttcctgcatgaccaccaggccgagctgcacatcagagatgtgcggggccatgatgccagcatctacgtgtgccgggtggaggtgctgggcctgggcgtgggcactggaaatggcacccggctggtggtggagaaggagcacccccagctgggcgccggcaccgtgctgctgctgcgggccggcttctatgctgtgtccttcctgtctgtggccgtgggcagcacagtgtactaccagggcaagtgcctgacctggaagggcccccggcggcagctgcctgctgtggtgcctgcccccctgcccccaccctgtggcagcagcgcccacctgctgccccctgtgcctgggggctag

SEQ ID NO: 288715 - DNA, 1042 bp, Artificial Sequence
  derived and/or modified sequence
ccacaagctggccccttggcctcctagagaccctgacatctcctccagcagcatctgtcctctctcctcagggaggcaagcatttgatgctcgaggtccctggcagttgtggtccttggcaagtgatgtgtgagtcccgtgtgtcataggaagctccccatccccatctggtgaccaaaggcctggctacaagtagtgagtccttcctcctccacccagacctcactgctcagatccccttcgccaactgggacatcttccgacatggcctggatgctgttgctcatcttgatcatggtccatccaggatcctgtgctctctgggtgtcccagccccctgagattcgtaccctggaaggatcctctgccttcctgccctgctccttcaatgccagccaagggagactggccattggctccgtcacgtggttccgagatgaggtggttccagggaaggaggtgaggaatggaaccccagagttcaggggccgcctggccccacttgcttcttcccgtttcctccatgaccaccaggctgagctgcacatccgggacgtgcgaggccatgacgccagcatctacgtgtgcagagtggaggtgctgggccttggtgtcgggacagggaatgggactcggctggtggtggagaaagaacatcctcagctaggggctggtacagtcctcctccttcgggctggattctatgctgtcagctttctctctgtggccgtgggcagcaccgtctattaccagggcaaatgtctgacctggaaaggtccaagaaggcagctgccggctgtggtcccagcgcccctcccaccaccatgtgggagctcagcacatctgcttcccccagtcccaggaggctgagcctgattgtcctgagaaatgggaaggatcagatatgactcctccttggcaactgccctttcctgccaggcccacacataccctcttctggctgttaggggagcttgggtccctgaacactgtcattcacccaataaattactatttgaccccagagtgggtggaagggtga

SEQ ID NO: 288716 - DNA, 1042 bp, Artificial Sequence
  derived and/or modified sequence
ccacaagctggccccttggcctcctagagaccctgacatctcctccagcagcatctgtcccctctcctcagggaggcaagcatttgatgctcgaggtccctggcagttgtggtccttggcaagtgatgtgtgagtcccgtgtgtcataggaagctccccatccccatctggtgaccaaaggcctggctacaagtagtgagtccttcctcctccacccagacctcactgctcagatccccttcgccaactgggacatcttccgacatggcctggatgctgttgctcatcttgatcatggtccatccaggatcctgtgctctctgggtgtcccagccccctgagattcgtaccctggaaggatcctctgccttcctgccctgctccttcaatgccagccaagggagactggccattggctccgtcacgtggttccgagatgaggtggttccagggaaggaggtgaggaatggaaccccagagttcaggggccgcctggccccacttgcttcttcccgtttcctccatgaccaccaggctgagctgcacatccgggacgtgcgaggccatgacgccagcatctacgtgtgcagagtggaggtgctgggccttggtgtcgggacagggaatgggactcggctggtggtggagaaagaacatcctcagctaggggctggtacagtcctcctccttcgggctggattctatgctgtcagctttctctctgtggccgtgggcagcaccgtctattaccagggcaaatgtctgacctggaaaggtccaagaaggcagctgccggctgtggtcccagcgcccctcccaccaccatgtgggagctcagcacatctgcttcccccagtcccaggaggctgagcctgattgtcctgagaaatgggaaggatcagatatgactcctccttggcaactgccctttcctgccaggcccacacataccctcttctggctgttaggggagcttgggtccctgaacactgtcattcacccaataaattactatttgaccccagagtgggtggaagggtga

SEQ ID NO: 288717 - DNA, 606 bp, Artificial Sequence
  derived and/or modified sequence
atggcctggatgctgctgctgatcctgatcatggtgcaccccggcagctgcgccctgtgggtgtcccagccacccgagatcagaacgctggagggtagcagtgccttcttgccatgctcattcaacgcttcgcagggccgcctggcaatcggttccgtgacctggttccgggatgaagtggtgccagggaaagaagtgcggaacgggaccccagagtttcgcggtcgacttgccccattggcttcatcaaggtttctgcatgaccaccaggcggaactccatatcagagacgtgcgggggcatgatgcttccatatacgtctgtcgggtggaggtcctgggcctgggggtcggcaccggaaacggtacgcggctcgttgtggagaaagaacatccacagcttggtgccggtaccgtcctcctattgcgggcaggattttatgcggtgagttttcttagtgtggccgtaggcagcaccgtatactatcagggcaaatgtctgacctggaaagggccaagaaggcagctgcccgctgtcgttccggctccactaccccctccatgcggctcttcagcccatttgttacctccagtgcctgggggatag

SEQ ID NO: 288718 - DNA, 606 bp, Artificial Sequence
  derived and/or modified sequence
atggcctggatgctgctgctgatcctgatcatggtgcaccccggcagctgcgcactctgggtgtcacaaccccccgaaatccggacattagaaggttcttccgcttttctcccatgtagctttaatgctagccagggaagactggctataggcagtgtcacgtggtttcgagatgaggtggttcctgggaaggaggttaggaacgggacgccggagtttcgaggtcgcttagcccctctcgcatccagccgatttcttcacgaccaccaagctgaactgcatatccgggacgttcggggccatgacgcatccatttacgtgtgcagagtagaagtgctggggctcggcgtcggaaccggcaatgggactcgcttggtcgttgagaaggagcacccacaactgggagctgggaccgttctcctccttagggcaggattctatgctgtttcgttcctgagtgtggctgtgggcagtacagtgtattaccagggaaaatgcttgacctggaaggggccacgtcgccaactcccagctgtcgtgcctgcccccctcccacccccttgcggcagcagcgcgcacctgctgcctcctgtcccagggggatag

SEQ ID NO: 288719 - DNA, 606 bp, Artificial Sequence
  derived and/or modified sequence
atggcctggatgctgctgctgatcctgatcatggtgcaccccggcagctgcgcactgtgggtttcccagcctccggaaatacgcaccttggagggtagcagtgctttcttgccttgctcttttaacgcctcccaagggcgactggcgataggtagtgtcacctggtttagagatgaggtggtgcccggtaaggaagtgcgcaacggtacacccgagttccgtggacgattggcacccttagcctcatcgagatttttacacgatcaccaggccgagttgcacatccgcgacgtaagaggccacgacgctagtatatatgtgtgtagggtggaggtgctcggcctaggcgtgggaaccggtaacggtactcgcctggttgtcgaaaaagagcacccccagctgggcgccggaaccgttctgctactgagggcaggtttctatgcggtatcatttttgtcggtggccgtggggagtacagtttactatcagggaaaatgtctaacatggaagggaccacgccgtcagttgccggcggtcgtgcctgcccccctccctcccccgtgcggatcttcagcacatctgttgcctcctgtgccgggagggtag

SEQ ID NO: 288720 - DNA, 606 bp, Artificial Sequence
  derived and/or modified sequence
atggcctggatgctgctgctgatcctgatcatggtgcaccccggcagttgcgcactctgggtgagccagccccctgaaatacgcactcttgagggcagcagtgcctttttaccctgtagcttcaatgccagccagggcaggctggcgatcggtagtgttacatggttccgcgatgaagtggtccctggaaaggaagtgcgcaatggaaccccagaattccgggggcgattagctcccctggcctctagccggttcctccacgaccaccaggctgagctccacattagagatgtcaggggccacgatgcctcgatttacgtgtgtcgagtggaggttcttgggctaggagtgggtaccggcaacggcactcgactggtagtggagaaagagcacccacagctcggagccggtaccgtgctgctacttagagctggtttctatgccgtgtctttcctgagtgtggctgtcggaagcaccgtgtactatcaggggaagtgccttacatggaaagggccacgaagacagttgccagccgtggtgccagcccccctgcctcccccttgcggttcttcagcccacttactgccacccgtacccggcgggtag

SEQ ID NO: 288721 - DNA, 606 bp, Artificial Sequence
  derived and/or modified sequence
atggcctggatgctgctgctgatcctgatcatggtgcaccccggcagctgcgctctatgggtgtcacagccacctgaaattcgcactctggaggggtcaagcgcattccttccctgttcctttaatgctagccagggccggctggccattggcagtgttacatggtttcgggatgaagtagtgccaggcaaggaggtcagaaacggcaccccagaatttagagggaggcttgcccccctcgcctcctctagatttttgcacgatcaccaggcagaactgcatatcagggacgtccgagggcatgacgcaagcatatatgtgtgtagggtggaggtactcggcctcggagttggcaccgggaatgggacccgcctcgtggtggagaaagagcatcctcagcttggcgccggtacggtccttcttttgcgtgccggcttttatgccgttagttttctgtccgtggccgtcggttcaaccgtctattaccaggggaaatgtctaacatggaaggggcctcggaggcagctgcccgcagtcgtgcccgctccgttgccacctccctgcgggtcctccgctcatcttttgccaccggtgccaggaggatag

SEQ ID NO: 288722 - DNA, 606 bp, Artificial Sequence
  derived and/or modified sequence
atggcctggatgctgctgctgatcctgatcatggtgcaccccggctcatgtgctctctgggtctcgcagccccctgagatcagaacacttgaaggcagtagcgcatttctaccgtgttcatttaatgccagccagggcagactggcaatcggatccgtgacgtggttccgagacgaagtggtcccgggaaaagaggtgcgcaatggcacacccgaatttaggggaagactggcccctcttgcctcctccaggttcctgcatgaccaccaggctgagctacacatcagggacgtacgtggacacgatgcctcgatttacgtctgtcgcgtggaagtgctaggcctgggcgtcggcacaggcaatggtacacggttagttgtggagaaagaacacccacaactaggtgccggcacagtcctcttactgcgggcaggtttctacgccgtgagcttccttagtgtggcagtggggtccacagtttactatcagggcaaatgtcttacctggaagggccctcgccgtcagctgcctgccgtcgtgcctgctccactgccaccaccttgtggttcctcggcccacctgctgccaccagtaccaggaggatag

SEQ ID NO: 288723 - DNA, 606 bp, Artificial Sequence
  derived and/or modified sequence
atggcctggatgctgctgctgatcctgatcatggtgcaccccggctcatgcgcactctgggtgtctcagccaccagagattcgaactctcgagggaagctcagcgttcctgccctgtagtttcaatgccagccagggtcggttggccatcggctcggtcacatggtttagagacgaagtcgtgccagggaaagaggtgagaaatggcacacccgaattccgcggccgcctcgcaccgctagccagttcacgattcctgcatgaccatcaggctgaactccacatcagagatgttagagggcatgatgcctccatctacgtttgcagggtggaagttttgggcttaggtgtgggaacagggaacggtacccggttggttgtggagaaagaacacccacagttaggcgccggcaccgtccttctcctccgcgccggattttacgcagtgtcctttctgagcgtggccgtaggctctacagtctattaccaagggaagtgtttgacgtggaaaggtcctagaagacagctccccgccgtagtgcctgcacccctgcctccaccctgtggctcatctgcccacttgctgccaccagttccagggggatag

SEQ ID NO: 288724 - DNA, 606 bp, Artificial Sequence
  derived and/or modified sequence
atggcctggatgctgctgctgatcctgatcatggtgcaccccggctcatgcgcgctttgggtgtctcagcctcccgagatcagaactctggaagggtcaagcgcatttctaccctgttcattcaatgccagtcagggcaggctagccatcgggtccgttacatggtttagggacgaggtggtacccgggaaagaggtgcgcaatgggacaccagaattcagaggcagactcgctcctcttgcgagctccagattcctgcatgatcaccaggcggaacttcatatcagagatgtgagaggtcacgacgcttccatctacgtctgccgagtggaagtgcttggactgggtgtgggcacagggaacgggacccgtctcgtggtcgagaaggagcatccacagctgggggcaggtactgtactgctgctcagggcaggattttacgccgtctcatttctgagcgtcgctgtggggagtactgtatattaccagggaaaatgtctcacatggaaggggccacggagacaactacctgcagtggttccggccccactcccaccaccatgtgggtcttccgctcacttactgccgcctgtcccagggggatag

SEQ ID NO: 288725 - DNA, 606 bp, Artificial Sequence
  derived and/or modified sequence
atggcttggatgttgttactgattttaatcatggtgcatcccggatcctgcgccctctgggtaagtcagccccctgaaatcaggactctagagggctcatcggccttcctcccttgttctttcaacgcctcccagggacgactcgctattggttccgtcacctggttcagggatgaggtggtgcctggcaaggaagttcggaatggcactcctgaatttcgagggagactcgcacccctcgcgagctctaggttcctgcatgaccatcaggctgagcttcacattagagacgtccggggtcacgacgcgtcgatttacgtgtgcagggtggaggtgttagggctgggagttggaacgggcaacgggacacggctggtggtggaaaaggagcatccacaattgggagccggtaccgttctgcttctccgtgccggattctacgccgtgtcttttctgtcagtggcagttggcagcacagtgtattatcaggggaagtgccttacgtggaagggcccacgaagacagctgcctgcggtcgtcccagccccactgccacctccatgtggcagctctgcgcacctgttgccccctgtacccggaggttag

SEQ ID NO: 288726 - DNA, 606 bp, Artificial Sequence
  derived and/or modified sequence
atggcttggatgctgctgttaatactgatcatggtacaccccggaagctgcgcgttgtgggttagtcagccaccggagattcgaacactggagggatctagtgctttcctgccctgttcatttaatgcgtcacagggtcgattagctattggatccgtcacgtggttcagagatgaggtggttccagggaaggaggtgcgcaatggcacccctgagttcaggggccgtctggcgcctctggcgtcctcccgattcctgcatgatcaccaggcggaattgcacattcgcgacgttagaggacatgatgcttctatctatgtgtgtcgggtggaggtgttaggcctaggcgtggggacaggcaacggtacacgcctagtcgtggagaaggagcacccacagctgggcgctggcactgtactgctgctgagagccggtttttatgctgtgagctttctaagcgttgccgttggtagcacagtgtactaccagggcaagtgtctgacgtggaaagggcctaggaggcagctgcctgctgtggtgccagctcccttgcctccgccttgtgggtcaagtgcccacctgctgcctccggtgccaggtggatag

SEQ ID NO: 288727 - DNA, 606 bp, Artificial Sequence
  derived and/or modified sequence
atggcttggatgctgctgctgattctgatcatggtgcaccccggaagttgcgcactgtgggtgagccagccccctgagatcagaaccttagaaggcagctcagccttcctgccttgtagcttcaacgcttcgcagggtcgtcttgctattggatcagtgacctggttccgcgacgaggtagtgcccggaaaagaggtgcgaaatggcacccccgagttccgcggtcggctcgcccctttggccagttcccgctttcttcatgaccaccaggcggagctacacatccgagatgtgcgtggtcatgacgcctcaatttatgtttgtagagtagaagtcctcgggcttggtgtcggcacaggcaacgggacccgactggtggtcgagaaagaacatccacagctgggggcaggcacagtgctgctattaagagccggattctatgctgtgtcctttctgagcgtcgccgtgggatcaaccgtctattaccagggaaagtgtctcacttggaagggccctcggcgtcagctgcctgcagtcgtcccagcacctttgcctcctccgtgcggaagctcggcacacctcttacccccagtccccggaggctag

SEQ ID NO: 288728 - DNA, 606 bp, Artificial Sequence
  derived and/or modified sequence
atggcttggatgcttctcctcatcctgatcatggtgcacccaggtagttgtgccctatgggtctcccagccacccgaaattagaaccctggagggttcatcggcatttctgccgtgctccttcaatgcatctcagggaaggctcgcaatcgggagcgtaacatggtttagagacgaggttgttcccggaaaggaagtgaggaacgggacaccagagtttcgagggagattagccccactggccagtagccgatttctgcatgaccaccaagccgaattacacattagggacgtgcggggacacgacgcgtccatctacgtttgcagggtcgaggttctgggcctgggtgtgggtaccggaaacggcacccgcttagtcgtagaaaaggaacacccacaattaggagcagggactgtgctactcctgagagcaggtttctacgcagttagttttctgtccgtggctgtggggtccaccgtgtactaccagggaaaatgcctaacctggaaggggccacggaggcagcttccggctgtggtcccagcaccgctgccacccccatgcgggtctagcgctcacttgttgcccccagtgccaggcggatag

SEQ ID NO: 288729 - DNA, 606 bp, Artificial Sequence
  derived and/or modified sequence
atggcatggatgcttctcttaatcctgatcatggtgcacccagggagttgtgctctgtgggtgagtcagccccctgagattcgcacactagagggatcttccgccttccttccctgtagtttcaacgcctcacagggaaggctggctattgggagcgtaacttggttcagagatgaagtcgtcccaggaaaggaagtgagaaacggaactcccgagttccgcggacgccttgccccactagccagctccagattcctccacgaccaccaggcggaactccacatcagagatgttcgcggtcacgacgctagcatttacgtgtgccgggtggaagttctggggctgggtgtaggcaccggaaacggcaccagattggtcgtggagaaggagcatcctcagttaggcgcaggtacggtgttattgttgcgtgccggattttacgcggtgtcttttttgtctgttgcggtgggctcaaccgtctattatcagggcaagtgccttacttggaaaggtcctaggagacagctacccgcagtggtgcccgctccattgccgccaccctgcggctcaagtgcccatctgctgcctcctgtccccggtggttag

SEQ ID NO: 288730 - DNA, 606 bp, Artificial Sequence
  derived and/or modified sequence
atggcatggatgctgctgttaatccttattatggtgcacccaggctcatgcgcactgtgggtaagccaaccaccggagatacgcaccctggaggggagttccgccttcctgccatgcagttttaatgcatctcagggcaggctggctatcggtagcgtgacttggtttcgggacgaagttgttcctgggaaagaagtgcgtaacggcactccggaatttagggggaggctggctccgctggcgtcttccagattcctgcatgaccatcaggcagaattgcacattcgtgatgttcgaggtcacgatgcctccatttacgtgtgtcgcgtggaggttttaggactgggcgtgggcaccggcaatgggacgcgccttgtggtcgagaaggaacatcctcaactaggggctgggaccgttcttttactgcgggcaggattctacgccgtcagcttcctgagcgtggcggtcggatccactgtctactaccagggtaaatgtctgacatggaaaggtccacgcagacaactcccagcagtggttcccgcacctctgcccccaccctgcggttcttccgctcacctgctcccccctgttcccggagggtag

SEQ ID NO: 288731 - DNA, 606 bp, Artificial Sequence
  derived and/or modified sequence
atggcctggatgttattgctgatcctgatcatggttcatcctggtagttgcgctctctgggtgtctcagcccccagagatccgaaccctggaagggtccagcgcgttcctgccttgctcctttaatgccagccaggggagacttgccattggttccgtgacatggtttcgggatgaagtggttccgggtaaagaagtgaggaacggaacacctgagttccgaggcagacttgcgccactcgcatcttcccgattcctgcatgatcaccaggcggaactgcatattcgcgacgtgcgcggacatgacgcgtccatctatgtgtgtcgcgtggaggttctgggactcggggtggggactgggaacggtacgcgtctcgttgtggagaaagagcatcctcagttgggcgctggcactgttctgctgctccgcgcaggcttttacgccgtcagctttctaagtgtggcagtgggctctaccgtatactatcagggtaagtgcttaacttggaaaggaccacggcgacagctgcccgcagtggtccccgctcccctaccaccgccatgtggatcatcagcccatctactgcctcctgtacctgggggatag

SEQ ID NO: 288732 - DNA, 606 bp, Artificial Sequence
  derived and/or modified sequence
atggcatggatgcttctgttaattcttatcatggttcaccctggaagctgcgcgctatgggtttcacaacctcccgagattcgtactctagagggaagttctgccttcttaccttgcagctttaatgctagccaggggaggctggcaatcggatccgtcacatggttccgggatgaagtcgtgccaggcaaggaagtgcgaaacggaacccccgagttccgaggtagactggccccattggcaagctcaagattcctgcatgaccaccaggccgagctgcatatccgcgacgtaaggggtcatgacgcctctatctatgtgtgtcgcgttgaagtgctggggcttggtgtcggcaccggcaatggcacacggcttgtggttgagaaggagcatcctcagctgggtgctggaaccgtacttcttttaagagccggattctatgcagtgtcttttctcagtgtggccgttggatctactgtgtattaccagggcaagtgtctcacgtggaaaggaccaagaaggcagctcccggctgtggtccccgcaccccttcctccaccatgcggctcctctgcacatctgctccccccagtgccaggcggatag

SEQ ID NO: 288733 - DNA, 606 bp, Artificial Sequence
  derived and/or modified sequence
atggcctggatgctgctgctgatcctgatcatggtgcaccccggcagctgcgccctgtgggtgagccagccccccgagatcagaaccctggagggcagcagcgccttcctgccctgcagcttcaacgccagccagggcagactggccatcggcagcgtgacctggttcagagacgaggtggtgcccggcaaggaggtgagaaacggcacccccgagttcagaggcagactggcccccctggccagcagcagattcctgcacgaccaccaggccgagctgcacatcagagacgtgagaggccacgacgccagcatctacgtgtgcagagtggaggtgctgggcctgggcgtgggcaccggcaacggcaccagactggtggtggagaaggagcacccccagctgggcgccggcaccgtgctgctgctgagagccggcttctacgccgtgagcttcctgagcgtggccgtgggcagcaccgtgtactaccagggcaagtgcctgacctggaagggccccagaagacagctgcccgccgtggtgcccgcccccctgccccccccctgcggcagcagcgcccacctgctgccccccgtgcccggcggctag

SEQ ID NO: 288734 - protein, 402 aa, Artificial Sequence
  derived and/or modified sequence
MMGSWKHCLFSASLISALIFVFVYNTELWENKRFLRAALSNASLLAEACHQIFEGKVFYPTENALKTTLDEATCYEYMVRSHYVTETLSEEEAGFPLAYTVTIHKDFGTFERLFRAIYMPQNVYCVHLDQKATDAFKGAVKQLLSCFPNAFLASKKESVVYGGISRLQADLNCLEDLVASEVPWKYVINTCGQDFPLKTNREIVQYLKGFKGKNITPGVLPPDHAVGRTKYVHQELLNHKNSYVIKTTKLKTPPPHDMVIYFGTAYVALTRDFANFVLQDQLALDLLSWSKDTYSPDEHFWVTLNRIPGVPGSMPNASWTGNLRAIKWSDMEDRHGGCHGHYVHGICIYGNGDLKWLVNSPSLFANKFELNTYPLTVECLELRHRERTLNQSETAIQPSWYF

SEQ ID NO: 288735 - DNA, 1209 bp, Artificial Sequence
  derived and/or modified sequence
atgatgggatcatggaaacattgtctcttctcagcgtccctgatctctgctctgatattcgtgttcgtgtacaatactgagctttgggagaacaaaaggtttttgcgggcagccctgtcaaatgctagtcttctggccgaggcctgccatcagatcttcgaagggaaggtgttctaccctaccgagaacgcattgaaaaccaccctggatgaagctacttgttacgagtatatggttcggtctcattacgtgaccgagactctgtcagaggaggaggctggatttccactggcgtatactgtgacaattcacaaagacttcggtacattcgaacgtctgttccgcgccatttatatgccacaaaatgtgtactgtgtgcacctcgaccagaaagccacggatgccttcaagggggccgtgaaacagctgttatcgtgttttccaaatgcattcttggcatctaaaaaagagtcagtggtgtacggaggcatctccaggctccaagccgacctcaattgtttggaggatcttgttgcttcggaggtgccatggaaatatgtgattaatacatgtggacaggacttccccctgaaaactaacagggagatcgtgcaatacctcaagggcttcaagggtaagaacatcactccaggggtactgcccccagatcacgcggtgggaaggactaaatatgttcatcaggaactcctgaatcacaagaatagctacgtcatcaagactacaaaactgaagactccccctccccatgacatggtcatttacttcggtaccgcctatgtggcacttacccgagattttgccaacttcgtgctgcaggaccagctggcacttgacctgctgtcatggagcaaagacacatacagcccagatgagcatttctgggtgaccttgaaccgtattccaggcgtccctggatccatgcctaatgcatcctggaccggcaacctccgggctatcaagtggagtgatatggaggacaggcacggcggttgtcacggccactatgtccatggcatttgtatctacggaaatggcgatctgaaatggctggtcaactcaccatccctttttgcgaataaatttgagctaaacacataccccctgaccgtagaatgtctggaactccgccatcgggaacggacgctcaatcagtccgaaacagccattcagccatcctggtacttctag

SEQ ID NO: 288736 - DNA, 1209 bp, Artificial Sequence
  derived and/or modified sequence
atgatggggagctggaagcactgtctgttttctgcatccctcatctccgcgctgatattcgtgtttgtctacaacaccgaactatgggagaacaaaagattccttagagccgccctgtccaatgcctcactgctggctgaggcctgtcaccagatcttcgaggggaaagttttttacccgacagagaacgcattaaaaaccacactcgatgaagctacctgttatgaatacatggtccggagccattatgtcactgaaacactgtcagaggaggaagcaggttttcccctggcgtataccgtcaccatccacaaggactttggaacctttgaaaggttgttcagggccatctacatgccgcaaaacgtttattgtgtccacctcgatcagaaagccactgacgcctttaaaggggccgtgaagcagctgctgtcatgctttcccaacgcatttctcgcatcaaaaaaagagtcagtggtttacggcgggatttcccgattgcaggctgaccttaattgcctggaggacctagttgcctccgaggtgccctggaagtatgtgattaacacttgcggccaggacttccctctcaagacaaacagggagattgtacagtatctcaaggggtttaaagggaaaaacattacccccggcgtgctccctcctgatcacgctgtcggccgcacaaaatatgtgcaccaagaactactcaaccacaagaactcctatgtcatcaaaactaccaagttgaaaacacctccaccacacgacatggtaatttatttcggaacagcttacgtagccttgacaagggatttcgccaatttcgttctccaagaccagctagccctggacttactgtcttggtccaaggatacctactcaccagacgagcatttctgggtgaccctcaacagaatcccgggagttcccggctcaatgcccaacgcctcatggacaggtaatttacgggcgattaagtggagtgatatggaggacagacacggggggtgccatggccattatgttcacggaatttgcatttatggcaacggagacctgaagtggctcgtaaatagcccaagcctgttcgccaataagttcgagcttaacacatatccccttaccgtggagtgcctggaactcaggcatcgggagcgcactctaaatcagagcgagactgccatccagccatcttggtatttttag

SEQ ID NO: 288737 - DNA, 4525 bp, Artificial Sequence
  derived and/or modified sequence
atatctctccaggcagtattcacatgctttaaactgaagctcgtagcttggcagtgcagtttaagcaaataaactcaggctgttgaacacaatgattaacaggaagcaggggaggggacatagttactagactctggccgggacaagaggctgaggttaaggtcttagagccgatgacttgcagaatggtcacctcacccacttgtaatttcatggtgggaacaggtggaccccctggaatcagaacctctctgaggacatctgtttttgtgtagacacaggttgcaggttagcaggagaacaggcaagccaaatgcaaaggagccacttcagaaatgtgtcacagaaaagtgaaaatgcaacctagtggtaagtgaagaggggaagaagaaagaaaaaggaccagaaccgtgaactgaagggacagggaacagccagacgagagcttcagccatcacgaggatgatttcggaacctggagaaaatgtaagttaaatatatctacactctgatcctatctcaagagagagatattttactcatttcctggttgtgaatgatgggctcttggaagcactgtctttttagcgcgtctcttatctctgccctgatttttgtatttgtttacaatactgagttatgggagaataaacgttttctgagggcagctctgtccaatgcttcactgttagcagaagcctgtcatcagatttttgaggggaaagttttttacccaacagaaaatgcattgaaaactacccttgatgaagctacctgctatgagtacatggttcgaagccactatgtaacagaaacactctctgaagaagaggctgggttccctttagcttacacagtgaccatccacaaagacttcggcacttttgagaggctcttcagggcgatttatatgccccaaaatgtctactgtgtgcacctggatcagaaggcgacggatgcctttaaaggtgcagtgaaacagttactcagctgcttcccaaatgcttttctggcttccaagaaggagtcggttgtctatggggggatctccaggctccaggctgacctgaactgcctggaagaccttgtggcctctgaagttccctggaagtatgtcatcaacacctgcgggcaagactttcccctgaaaaccaacagggaaatagttcagtatctgaagggatttaaagggaaaaatatcacccccggagtgctgcctcctgaccacgctgttggacggactaaatacgtccaccaagaactgttaaaccacaaaaattcctacgtgattaaaacaacaaaattaaaaactcctcctcctcatgacatggtgatttactttggcacggcctacgtggctctcacaagggactttgctaacttcgtcctccaagaccagctcgcacttgacttactctcctggtccaaggacacctacagccccgacgaacatttctgggtgacactcaacaggattcccggtgttcctggctctatgccaaatgcatcctggactggaaacctcagagctataaagtggagtgacatggaagacagacacggaggctgccacggccactatgtacatggtatttgtatctatggaaacggagacttaaagtggctggttaattcaccaagcctgtttgctaacaagtttgagcttaatacctacccccttactgtggaatgcctagaactgaggcatcgcgaaagaaccctcaatcagagtgaaactgcgatacaacccagctggtatttttgagctattcatgagctactcatgactgaagggaaactgcagctgggaagaggagcctgtttttgtgagagacttttgccttcgtaatgttaaccgtttcaggaccacgtttatagcttcaggacctggctacgtaattatacttaaaatatccactggacactgtgaaatacactaacaggatggctgggtagagcaatctgggcactttggccaattttagtcttgctgtttcttgatgctcacctctatattagtttattgttaggatcaatgataaatttaaatgacctcagatctttgcaccagatactcatcatatacaaatgttttagtaaaaaagagaattgtagataatactgtctaggaaaataagaattaggtttctttgaagaaggaatcttttataacaccttaacagtcaccactgtgctcaaccagacagatagtgaaacagctttctgggtaattcaccaatttcctttaaaacataagctacctgaatggagaatacatcttgtttctgagtttcaacactagcatttttggcttactcatggacaaagttctgtatatagtataaagtcattaacaagaaacaggatatgctttaagacagaattcactgtctgttgcttcagtaaaaggacctcggggaataaaacatttctctcttatatgccagaatgtaggctggtccctatgtcatgtcttccattaagaacactaaaaagtccttgcaagaatggagatatgcattcaagagaggtgctatcacatagatctagtctgaagtctggaacactttcctcttctatgacccctctctccccagtattatcttacttgcaaaatggagaccaaattctatcctgtgaggcttttaattgcaccatagtatgctctgagtagctttacactgcctggtactgatagtagtggctcgatttttaagagccttcaattgtagatgaacatctctgttatttatccctcattcatccatccgttcattcattcagccttcaatcaacatctcttgagtgtctattatgtacaggacatgtactgagacaaaaaggaaacataagagctttttcactctaaaaatcttggcaataatgtcaacaccagaaagcctcctctggagaatcttacagagtgattgtagtttaatacaggaacacacagggctgtgtagcatgataccaggcccaggagatcagtaattacaaattaagggttaaatcagagattattcaacagagagggagaaaggaggagacagagggaggacctgttgtgttccagccattctggtattcctttatgtatctaatttcattcaaacctcacaacagtcttgtgaggcccttatataattactcccattttgcagatgaagtaactgaggcttagaaaggttaatagcaccggggaacaatttctctgggtgagaattgggactctgttgctggtcttctcagttcatttcctgaggtggatttactgagagaaggtgaaataaagccatatttagtataccagagaaggtagattttaagaatggtctcagtgttaatactgagaaaaagtcctgtcagttcagaaaaaatgtgaagtctactttagtattcctgtaatactaaaccgttgagtttctaaatatttatttattctaacaaaaagcaattactacaaatggatgacacatttaatgaacacaattttattttttttctgtaactgtgcttgttgaatgtcaatcatatttaaagggaatgactttgaagtaaaaccttttttcttgctactgaaaaaaatggagttgttttgggtggtaaagtgttaaggaatagggacagctggtcacacaaggaactcttgaaggccacatgtgaaaacctgtcacttgcacagaggccagtcccactaaggtgaccagagtgggctccaagcacaaactgccattggctatagatgggactgtgtccccccaaaattcatgtgttggagccttaaccctcaatgtgatggtatttgagatggggcctttggtaagggaagtttagatgaggtcacgagggtaggaccctcatgatgggatgagtccccttacaagacctctggcttgggccgggcgtggtggctcacacctgtaatcccaacactttgggaggccaaggcaggtagatcacttgatgccaggagttccagaccaggctggccgacatggtgaaaccccatctctactaaaaaatataaaaattagccgggctttgtggcatgtgcctgtaatcccagctatttggcaggctgaggcatgagaatcgcttgaacccaggaggtggaggttacagtgagctgagagtgccccactgcactccagcctgggtgacagagcgagactttgtcccaaaacaaaataggtgaggggatagcgaatgcactcagggtcagcagtggagtttaaaaattgtctcttttcaacttatttaaatgacagcacctgagaagaggaaccgttttacactggatgtttctcatgtagaacaagaaatctttctggaattgatgtttacatgtctgttgttggtcatctctcctgtgtcttaaatactttaatgttggaagagcatagtgtttgggctagtgggtttctgacagcccatgggaatgccctgaaactactgtatctgatgtttgttttcgatgaggttccatgttttgttttcttgggaataaattaatatattgttttcc

SEQ ID NO: 288738 - DNA, 2214 bp, Artificial Sequence
  derived and/or modified sequence
aaacaggcttactgtgttcactgctggacgcctctgggcaatcttaccctcctgggaactgagagagacaatgctaggagccagaaacatgaggaatacatgagctcggcgccaatggaacatgctttcacaccgggtgcagctaaccaccacatcatacaaaactcgtcgctgacgttttagatgtataatctgattggcatggactcacagaggagggagtaagggaagagtaagaagatttcaaaggagagacacaggttgcaggttagcaggagaacaggcaagccaaatgcaaaggagccacttcagaaatgtgtcacagaaaagtgaaaatgcaacctagtggtaagtgaagaggggaagaagaaagaaaaaggaccagaaccgtgaactgaagggacagggaacagccagacgagagcttcagccatcacgaggatgatttcggaacctggagaaaatgtaagttaaatatatctacactctgatcctatctcaagagagagatattttactcatttcctggttgtgaatgatgggctcttggaagcactgtctttttagcgcgtctcttatctctgccctgatttttgtatttgtttacaatactgagttatgggagaataaacgttttctgagggcagctctgtccaatgcttcactgttagcagaagcctgtcatcagatttttgaggggaaagttttttacccaacagaaaatgcattgaaaactacccttgatgaagctacctgctatgagtacatggttcgaagccactatgtaacagaaacactctctgaagaagaggctgggttccctttagcttacacagtgaccatccacaaagacttcggcacttttgagaggctcttcagggcgatttatatgccccaaaatgtctactgtgtgcacctggatcagaaggcgacggatgcctttaaaggtgcagtgaaacagttactcagctgcttcccaaatgcttttctggcttccaagaaggagtcggttgtctatggggggatctccaggctccaggctgacctgaactgcctggaagaccttgtggcctctgaagttccctggaagtatgtcatcaacacctgcgggcaagactttcccctgaaaaccaacagggaaatagttcagtatctgaagggatttaaagggaaaaatatcacccccggagtgctgcctcctgaccacgctgttggacggactaaatacgtccaccaagaactgttaaaccacaaaaattcctacgtgattaaaacaacaaaattaaaaactcctcctcctcatgacatggtgatttactttggcacggcctacgtggctctcacaagggactttgctaacttcgtcctccaagaccagctcgcacttgacttactctcctggtccaaggacacctacagccccgacgaacatttctgggtgacactcaacaggattcccggtgttcctggctctatgccaaatgcatcctggactggaaacctcagagctataaagtggagtgacatggaagacagacacggaggctgccacggccactatgtacatggtatttgtatctatggaaacggagacttaaagtggctggttaattcaccaagcctgtttgctaacaagtttgagcttaatacctacccccttactgtggaatgcctagaactgaggcatcgcgaaagaaccctcaatcagagtgaaactgcgatacaacccagctggtatttttgagctattcatgagctactcatgactgaagggaaactgcagctgggaagaggagcctgtttttgtgagagacttttgccttcgtaatgttaaccgtttcaggaccacgtttatagcttcaggacctggctacgtaattatacttaaaatatccactggacactgtgaaatacactaacaggatggctgggtagagcaatctgggcactttggccaattttagtcttgctgtttcttgatgctcacctctatattagtttattgttaggatcaatgataaatttaaatgacctcagatctttgcaccagatactcatcatatacaaatgttttagtaaaaaagagaattgtagataatactgtctaggaaaataagaattaggtttctttgaagaaggaatcttttataacaccttaacagtcaccactgtgctcaaccagacagatagtgaaacagctttctgggtaattca

SEQ ID NO: 288739 - DNA, 1209 bp, Artificial Sequence
  derived and/or modified sequence
atgatgggctcctggaagcactgcctcttcagcgccagcctcatcagcgccctgatctttgtgtttgtgtacaacacagagctgtgggagaacaagcgcttcctgcgggccgccctgagcaatgccagcctgctggccgaggcctgccaccagatctttgagggcaaggtgttctaccccacagaaaatgccctgaagaccaccctggatgaggccacctgctatgagtacatggtgcgcagccactacgtgacagagaccctgtctgaggaggaggccggcttccccctggcctacacagtgaccatccacaaggactttggcacctttgagcggctcttccgggccatctacatgccccagaatgtgtactgtgtgcacctggaccagaaggccacagatgccttcaagggagctgtgaagcagctgctgagctgcttccccaatgccttcctggccagcaagaaggagagcgtggtgtatggaggcatcagccggctgcaggccgacctgaactgcctggaggacctggtggccagcgaggtgccctggaagtatgtgatcaacacctgtggccaggacttccccctgaagaccaaccgggagatcgtgcagtacctgaagggcttcaagggcaagaacatcaccccaggagtgctgcccccagaccatgctgtgggccgcaccaagtatgtgcaccaggagctgctgaaccacaagaacagctatgtgatcaagaccaccaagctgaagaccccacctcctcatgacatggtgatctacttcggcacagcctacgtggccctgacccgggactttgccaactttgtgctgcaggaccagctggccctggacctgctgtcctggagcaaggacacctacagcccagatgagcacttctgggtgaccctgaaccgcatccctggggtgcccggctccatgcccaatgcctcctggacaggcaacctgcgggccatcaagtggagcgacatggaggacagacatggaggctgccacggccactacgtgcacggcatctgcatctatggaaatggagacctgaagtggctggtgaacagccccagcctgtttgccaacaagtttgagctgaacacctaccccctgactgtggagtgcctggagctgcggcaccgggagaggaccctgaaccagagcgagacagccatccagcccagctggtacttctag

SEQ ID NO: 288740 - DNA, 1209 bp, Artificial Sequence
  derived and/or modified sequence
atgatgggcagctggaagcactgcctgttcagcgccagcctgatctccgctctgatcttcgtcttcgtctacaatactgagctttgggagaataagagatttctgcgggccgctctaagcaacgctagcctacttgccgaggcatgccatcaaatcttcgaaggcaaggtgttttatccaactgaaaacgctctgaaaaccaccctggacgaagcgacgtgttacgaatacatggttcggtcccattatgtgaccgaaacattgagtgaggaggaagccggtttcccactggcgtacacggtcaccatacacaaagactttggcaccttcgaacgactgttccgcgcaatttacatgcctcagaatgtgtattgcgtccacctggatcaaaaagcgaccgatgcttttaagggagccgtgaagcagcttctcagctgcttccccaacgctttcttggcgtcaaagaaggagtcagtggtttacggagggatatcgcgcctgcaggccgatctcaactgtctggaagaccttgtggcctccgaagtaccttggaagtacgtgatcaacacctgcggacaggattttccactcaagacgaacagagagatagtgcaatatctgaagggctttaagggtaagaatatcaccccgggtgtattaccgcccgatcatgcagtgggcaggaccaaatacgtgcatcaggagctgctcaatcataaaaacagctatgtgatcaagacaaccaagctcaaaacgcctcctcctcacgatatggtcatctactttggaaccgcgtacgtggcactgactcgtgacttcgcaaactttgtgctccaggatcaactggccctagacctcctgagctggtccaaagatacctattctcccgacgagcacttttgggtgaccttaaatcggattcccggcgtgcctggatcaatgccaaatgcctcttggactgggaatctgcgcgccattaagtggagcgacatggaggatcgtcacgggggttgtcacgggcactatgtgcacggcatctgcatctatggtaacggcgacctgaaatggctggtaaactcacccagcctctttgccaacaaattcgagttgaatacctaccctttaaccgttgaatgcctcgagctgcgacaccgcgaaagaacacttaatcagtctgaaactgcaatccagcccagctggtacttttag

SEQ ID NO: 288741 - DNA, 1209 bp, Artificial Sequence
  derived and/or modified sequence
atgatgggcagctggaagcactgcctgttcagcgccagcctgatctcagccctgatattcgtcttcgtgtacaacacagagttatgggagaacaagcggtttttgcgagccgcgctgtcgaacgcttcactgttggctgaggcatgccatcagatatttgagggaaaggtgttctacccaactgagaatgccctcaaaacaacattagacgaggccacgtgttacgaatacatggtccggtctcactacgtgacagagaccctctctgaagaggaagctggatttcccctggcctataccgtgaccatacataaagattttgggacctttgaaagactatttcgggcaatatacatgccacagaatgtctattgcgtgcacctggatcagaaggccacagacgcattcaagggagctgtcaagcaactgcttagttgcttccccaacgctttcttagcgagcaaaaaagagagcgtggtctacgggggaatcagtcgactccaggcagatctgaactgtctggaagacctggttgcaagtgaggtgccctggaaatacgtaattaacacctgcggccaggattttccattaaagactaaccgcgagattgtgcagtacctaaaaggctttaagggcaagaacatcacccccggagtactgccaccagatcatgccgtaggtcgcaccaagtacgtgcaccaggaactgctcaatcataagaactcatacgtgattaagactacaaagctgaaaacccctcccccccacgatatggtaatatatttcggcaccgcttatgttgcccttacgagggattttgcgaactttgtcctgcaggatcagttggcactcgacttgctttcctggtctaaagacacgtatagcccagacgaacacttttgggtgaccctcaaccggattcccggcgtgcctggctcaatgcctaacgccagctggaccggcaatctgagagctattaagtggagtgatatggaggaccgacacgggggttgtcacggccattatgtgcacgggatctgtatctacggaaacggtgacctgaaatggttagtcaattctccttccctctttgcaaataagtttgagctaaatacctatccactgactgtcgaatgtcttgaactgcgccacagagaaagaactctgaaccaatcggagacagcgatacagcctagttggtatttctag

SEQ ID NO: 288742 - DNA, 1209 bp, Artificial Sequence
  derived and/or modified sequence
atgatgggatcctggaagcattgtttatttagcgcgtcattgatcagtgccctcatatttgtgttcgtgtacaatactgagctgtgggaaaataaaagatttttgagagctgctctgagcaacgcttccttgctggctgaggcctgccaccaaattttcgaaggcaaggtcttttacccaacggagaacgcactcaagacgaccttagatgaagccacgtgctatgaatatatggtccgcagccactatgtcacggaaaccctgtctgaagaagaggccggattccctctggcttatactgtgacaatccacaaagactttggtacatttgagaggctgtttagagcaatctacatgccacagaacgtctactgcgttcatctagatcaaaaggctaccgatgccttcaagggcgctgtgaagcagctcttgtcttgttttcctaatgcgtttctggcctctaaaaaagagagcgtggtttacggagggattagtcgccttcaagccgatctgaattgtttagaggaccttgtggccagtgaggtgccttggaagtacgtaatcaatacttgcggtcaagatttccctttaaaaactaaccgcgaaatagtccagtacctcaaggggttcaaagggaagaatatcacaccgggagtgttgcccccagaccacgccgtgggtagaactaagtacgtccatcaagaactgctgaaccataaaaactcatacgttatcaaaaccacgaaactgaaaaccccccctccccacgacatggtcatttatttcggaaccgcatatgtcgcgttgacacgagacttcgccaactttgtgctgcaagaccaacttgcattagatctgctgtcttggagtaaagacacatactctcccgacgaacatttctgggtcaccctgaataggattccaggtgtgccagggtctatgccaaacgcctcctggaccgggaacttacgggctatcaaatggagcgacatggaggataggcatggaggctgtcatggtcactacgttcatggcatctgtatttacgggaacggagacctgaaatggctggtgaactctccctcactgttcgctaacaagttcgagttgaatacatacccccttacagtagagtgtctggagttaaggcatcgggagcgaaccttaaatcaatcagaaactgcaatccagccgtcgtggtatttctag

SEQ ID NO: 288743 - DNA, 1209 bp, Artificial Sequence
  derived and/or modified sequence
atgatgggctcatggaaacactgcctctttagtgcatccttaatctccgcccttatatttgtgttcgtgtataataccgaattgtgggaaaacaaaaggtttttacgcgctgctcttagcaatgccagtctacttgctgaagcctgccatcagatatttgagggtaaggtgttttatccaacagagaacgctctcaaaactaccctggacgaggccacctgctatgaatacatggtcaggtcccactacgtgacagagacgcttagcgaagaggaggcaggcttcccactggcctacaccgtgacaatccacaaagacttcgggactttcgaacgactcttccgagccatttacatgccccagaatgtttattgcgtgcatctggatcagaaagccaccgacgcattcaagggagccgtcaaacagcttctgagttgttttcccaatgcctttctggccagcaaaaaggagtctgtagtgtacggaggcatctccagattgcaggcagatctgaattgtctagaagatctcgtggcgtcggaggtgccttggaaatacgtgattaatacatgtggacaggactttccgctgaagacaaacagagagatcgtgcaatatctcaaaggattcaagggaaaaaacatcactcccggagtcctgccccctgatcacgccgtcggtagaaccaagtacgtgcaccaggaacttctaaatcacaaaaactcatacgtgattaagactactaagttgaaaacacctcccccacacgatatggtgatctacttcggcacagcatacgtggcgcttactcgggattttgctaacttcgtgctccaggaccagctggcgttagatctcctgagctggtcaaaggatacgtactctcctgatgagcatttttgggtaactttgaatagaattcctggagttcctggctcgatgcccaacgcctcttggacggggaatcttcgggctatcaagtggtcagatatggaagatcgtcacgggggatgccacggacattacgttcacggtatttgtatctacggaaacggagatcttaagtggctggtgaatagcccctctctgttcgcaaataaattcgaattgaatacctacccactgaccgtagagtgcctggagcttcggcatagggagcggactctaaaccagtccgaaacagcaatacaaccatcctggtatttctag

SEQ ID NO: 288744 - DNA, 1209 bp, Artificial Sequence
  derived and/or modified sequence
atgatgggcagctggaagcactgcctgttcagcgccagcctgatcagcgccctgatcttcgtgttcgtgtacaacaccgagctgtgggagaacaagagattcctgagagccgccctgagcaacgccagcctgctggccgaggcctgccaccagatcttcgagggcaaggtgttctaccccaccgagaacgccctgaagaccaccctggacgaggccacctgctacgagtacatggtgagaagccactacgtgaccgagaccctgagcgaggaggaggccggcttccccctggcctacaccgtgaccatccacaaggacttcggcaccttcgagagactgttcagagccatctacatgccccagaacgtgtactgcgtgcacctggaccagaaggccaccgacgccttcaagggcgccgtgaagcagctgctgagctgcttccccaacgccttcctggccagcaagaaggagagcgtggtgtacggcggcatcagcagactgcaggccgacctgaactgcctggaggacctggtggccagcgaggtgccctggaagtacgtgatcaacacctgcggccaggacttccccctgaagaccaacagagagatcgtgcagtacctgaagggcttcaagggcaagaacatcacccccggcgtgctgccccccgaccacgccgtgggcagaaccaagtacgtgcaccaggagctgctgaaccacaagaacagctacgtgatcaagaccaccaagctgaagaccccccccccccacgacatggtgatctacttcggcaccgcctacgtggccctgaccagagacttcgccaacttcgtgctgcaggaccagctggccctggacctgctgagctggagcaaggacacctacagccccgacgagcacttctgggtgaccctgaacagaatccccggcgtgcccggcagcatgcccaacgccagctggaccggcaacctgagagccatcaagtggagcgacatggaggacagacacggcggctgccacggccactacgtgcacggcatctgcatctacggcaacggcgacctgaagtggctggtgaacagccccagcctgttcgccaacaagttcgagctgaacacctaccccctgaccgtggagtgcctggagctgagacacagagagagaaccctgaaccagagcgagaccgccatccagcccagctggtacttctag

SEQ ID NO: 288745 - protein, 973 aa, Artificial Sequence
  derived and/or modified sequence
MEVTCLLLLALIPFHCRGQGVYAPAQAQIVHAGQACVVKEDNISERVYTIREGDTLMLQCLVTGHPRPQVRWTKTAGSASDKFQETSVFNETLRIERIARTQGGRYYCKAENGVGVPAIKSIRVDVQYLDEPMLTVHQTVSDVRGNFYQEKTVFLRCTVNSNPPARFIWKRGSDTLSHSQDNGVDIYEPLYTQGETKVLKLKNLRPQDYASYTCQVSVRNVCGIPDKAITFRLTNTTAPPALKLSVNETLVVNPGENVTVQCLLTGGDPLPQLQWSHGPGPLPLGALAQGGTLSIPSVQARDSGYYNCTATNNVGNPAKKTVNLLVRSMKNATFQITPDVIKESENIQLGQDLKLSCHVDAVPQEKVTYQWFKNGKPARMSKRLLVTRNDPELPAVTSSLELIDLHFSDYGTYLCMASFPGAPVPDLSVEVNISSETVPPTISVPKGRAVVTVREGSPAELQCEVRGKPRPPVLWSRVDKEAALLPSGLPLEETPDGKLRLERVSRDMSGTYRCQTARYNGFNVRPREAQVQLNVQFPPEVEPSSQDVRQALGRPVLLRCSLLRGSPQRIASAVWRFKGQLLPPPPVVPAAAEAPDHAELRLDAVTRDSSGSYECSVSNDVGSAACLFQVSAKAYSPEFYFDTPNPTRSHKLSKNYSYVLQWTQREPDAVDPVLNYRLSIRQLNQHNAVVKAIPVRRVEKGQLLEYILTDLRVPHSYEVRLTPYTTFGAGDMASRIIHYTEPINSPNLSDNTCHFEDEKICGYTQDLTDNFDWTRQNALTQNPKRSPNTGPPTDISGTPEGYYMFIETSRPRELGDRARLVSPLYNASAKFYCVSFFYHMYGKHIGSLNLLVRSRNKGALDTHAWSLSGNKGNVWQQAHVPISPSGPFQIIFEGVRGPGYLGDIAIDDVTLKKGECPRKQTDPNKGARREGGGGAESGGSCAWRGFLSVEGGCLGLNRGSECLSDGNHVALTV

SEQ ID NO: 288746 - DNA, 2922 bp, Artificial Sequence
  derived and/or modified sequence
atggaggtgacttgtctgctccttctggctcttattccctttcattgcagagggcaaggagtctatgcacctgcccaggcgcagatcgtccatgcaggacaggcctgcgtggtgaaggaggataacatatctgagagagtgtacaccatccgagagggtgatacacttatgctccaatgccttgtgactggccatcctcgaccacaggttaggtggaccaaaaccgctgggtctgctagcgataaattccaggagaccagcgtgtttaatgagacactgaggatcgagcgcatagctcgcacacagggcggtcgctactattgcaaagctgagaacggagtcggtgttcctgccataaagtcgatccgagtcgacgttcaatatttagatgagcctatgttaacggttcaccagaccgtgtccgacgtgagaggaaatttttatcaagagaaaactgtcttcctgcgctgcacagtcaattccaacccccctgctcggttcatttggaaaaggggtagcgacaccttgtctcactcccaggataatggggttgatatctatgagccactctatacccagggtgaaaccaaggtgctcaaacttaagaacctacgcccgcaagattatgcaagttacacgtgccaggtctcagtccgcaatgtgtgtggcattcccgataaagccatcacctttcgcctgaccaacactacagccccgcctgctctgaagttaagcgtaaatgaaacgcttgtggtcaatccgggagagaatgtgacagtgcagtgtctgttgactggcggagacccactgccgcagcttcaatggtcccacggacctgggcccttacctctgggagctttggcccaaggaggtactctcagtatcccctcagttcaggccagggacagtgggtattacaattgcactgccacaaataatgtgggtaatcctgccaaaaaaacagtgaatcttcttgtaaggtcaatgaagaatgcaaccttccagattactcccgatgttatcaaagaatccgagaatattcagctagggcaggatctgaaattgagttgccatgttgatgccgtcccccaggaaaaagtgacttaccagtggtttaagaacgggaaacctgcgcggatgagcaaacggctgctggtgactcgcaacgatccagaactccctgccgtaacctctagcctggaattaatcgatctacacttcagcgattacgggacctacctgtgtatggccagctttcccggcgccccggtccccgacctgtctgtggaggtgaatatctctagcgaaaccgtccccccgaccataagcgtacctaagggcagggccgtagttaccgtgagggagggaagccctgctgagttgcaatgtgaggtgaggggtaaaccaagaccacccgtactttggagtagggtggataaagaggccgcgcttcttccgtctggtctgccactggaggagacacctgacggcaagctgcgtctggagcgagtgtcacgggacatgagtggaacttataggtgccagaccgcgcggtacaatggctttaatgtgcgccctcgggaagcccaagttcaactgaatgttcagttcccgccagaggttgagcctagctcccaggatgttagacaagcattgggcaggccagtgcttctgcgctgttcgctgctgcggggatctccccaaagaattgctagtgccgtgtggaggtttaagggtcaactgctgcctcctccccccgtggtcccagccgccgccgaggccccagatcacgccgaactaaggctggacgcggtgacgcgcgactcatctggatcatacgaatgtagcgtaagtaacgatgtgggaagcgcagcgtgtctgttccaggtgtcagccaaggcttattcaccagagttttattttgatacaccaaatccaacccgttcgcacaagctgagcaaaaattacagctacgttcttcagtggacacagagggagccagacgccgtggatcctgtcctgaactatagactcagcattcggcagctgaatcagcacaacgccgtggtcaaggcgattcccgtgagaagggtcgagaaggggcaactcctcgagtatattttgacggatctgcgcgttccccactcctacgaggtgagactgacaccttacaccactttcggagccggcgatatggccagcaggatcatacactacacggagccaattaacagccctaacttgtcagacaacacgtgccatttcgaggatgagaaaatttgtggctacacacaggatctgaccgataacttcgactggacgcgacagaacgctctgacccagaaccccaagaggtctcctaatacaggcccccccacagacatctccgggacacctgagggatactacatgtttatagagacatctaggccacgggaattgggagaccgcgcacgcctagtgtcccccttgtacaacgcctccgccaagttttattgcgtgagctttttttatcacatgtatggtaagcatataggctctcttaatctcctagtgcgcagccgcaataagggcgcactcgatacccacgcctggagtctctcaggcaacaaggggaacgtgtggcagcaagctcatgtgcccatcagcccgtctggcccttttcaaataatctttgaaggcgtccgagggcccggctatctgggtgacattgctattgacgacgtaacactgaagaaaggggagtgcccccgaaagcagacagaccccaacaagggtgccaggcgggagggggggggaggtgccgaatccggtggctcgtgtgcctggagaggcttcctgtctgtagagggaggctgtctcgggcttaatcgggggtccgagtgcctgtctgatggaaaccacgtcgctttgacagtctag

SEQ ID NO: 288747 - DNA, 2922 bp, Artificial Sequence
  derived and/or modified sequence
atggaggtgacctgcctgctgctgctggccctgatccccttccactgccggggccagggcgtgtatgccccagcccaggcccagatcgtgcacgccggccaggcctgtgtggtgaaggaggacaacatcagcgagcgggtgtacaccatccgggagggggacaccctgatgctgcagtgcctggtgacaggccacccccggccccaggtgcgctggaccaagacagctggcagcgccagtgacaagttccaggagacctctgtgttcaatgagaccctgagaattgagcgcatcgcccggacccagggcggccgctactactgcaaggcagaaaatggagtgggcgtgcctgccatcaagagcatccgggtggatgtgcagtacctggatgagcccatgctgactgtgcaccagacagtgtctgatgtgcggggcaacttctaccaggagaagacagtgttcctgcgctgcaccgtgaacagcaaccccccagcccgcttcatctggaagaggggcagtgacaccctgagccacagccaggacaacggggtggacatctatgagcccctgtacacccagggcgagaccaaggtgctgaagctgaagaacctgcggccccaggactatgccagctacacctgccaggtgtctgtgagaaatgtgtgtggcatcccagacaaggccatcaccttccggctgaccaacaccacagcccccccagccctgaagctgtctgtgaatgagaccctggtggtgaaccctggagaaaatgtgacagtgcagtgcctgctgactggaggagaccccctgccccagctgcagtggagccacggccctggccccctgcccctgggcgccctggcccagggcggcaccctgagcatccccagcgtgcaggcccgggacagcggctactacaactgcacagccaccaacaacgtgggcaacccagccaagaagacagtgaacctgctggtgcgctccatgaagaatgccaccttccagatcaccccagatgtgatcaaggagagcgagaacatccagctgggccaggacctgaagctgagctgccacgtggatgctgtgccccaggagaaggtgacctaccagtggttcaagaatggcaagccagccaggatgagcaagaggctgctggtgaccagaaatgaccctgagctgcctgctgtgaccagcagcctggagctgattgacctgcacttcagtgactatggcacctacctgtgcatggccagcttccctggggcccctgtgcctgacctgtctgtggaggtgaacatcagcagcgagaccgtgccccccaccatctctgtgcccaagggccgggctgtggtgacagtgcgggagggcagccctgctgagctgcagtgtgaggtgcggggcaagcccaggcctcctgtgctgtggagccgggtggacaaggaggccgccctgctgcccagcggcctgcccctggaggagaccccagatggcaagctgcggctggagcgggtgtcccgggacatgagcggcacctaccgctgccagacagcccgctacaacggcttcaacgtgcggccccgggaggcccaggtgcagctgaatgtgcagttccccccagaggtggagcccagcagccaggatgtgcggcaggccctgggccggcctgtgctgctgcgctgcagcctgctgcggggcagcccccagagaattgccagcgctgtgtggaggttcaagggccagctgctgcccccacctcctgtggtgcctgctgctgctgaggccccagaccacgccgagctgcggctggatgctgtgacccgggacagcagcggcagctatgagtgcagcgtgtccaatgatgtgggcagcgctgcctgcctcttccaggtgtctgccaaggcctacagccctgagttctactttgacacccccaaccccaccaggagccacaagctgagcaagaactacagctatgtgctgcagtggacccagcgggagccagatgctgtggaccctgtgctgaactaccgcctgagcatccggcagctgaaccagcacaatgctgtggtgaaggccatccctgtgcggcgggtggagaagggccagctgctggagtacatcctgacagacctgcgggtgccccacagctatgaggtgcggctgaccccctacaccacctttggagctggggacatggccagccgcatcatccactacacagagcccatcaacagccccaacctgagtgacaacacctgccactttgaagatgagaagatctgtggctacacccaggacctgacagacaactttgactggacccggcagaatgccctgacccagaaccccaagaggagccccaacacaggccccccaacagacatcagcggcaccccagagggctactacatgttcatcgagaccagccggccccgggagctgggggaccgggcccggctggtgagccccctgtacaatgccagcgccaagttctactgtgtgtccttcttctaccacatgtatggcaagcacatcggcagcctgaacctgctggtgcgcagcagaaataaaggagccctggacacccacgcctggagcctgagcggcaacaagggaaatgtgtggcagcaggcccacgtgcccatcagccccagcggccccttccagatcatctttgagggcgtgcggggccctggctacctgggggacatcgccattgatgatgtgaccctgaagaagggagaatgtcccaggaagcagacagaccccaacaagggggcccggcgggagggcggcggcggcgctgagagcggcggcagctgtgcctggaggggcttcctgtctgtggagggcggctgcctgggcctgaacagaggctctgaatgtctgagtgatggcaaccacgtggccctgactgtgtag

SEQ ID NO: 288748 - DNA, 3021 bp, Artificial Sequence
  derived and/or modified sequence
atggaggtgacctgccttctacttctggcgctgatccccttccactgccggggacaaggagtctacgctccagcccaggcgcagatcgtgcatgcgggccaggcatgtgtggtgaaagaggacaatatcagcgagcgtgtctacaccatccgggagggggacaccctcatgctgcagtgccttgtaacagggcaccctcgaccccaggtacggtggaccaagacggcaggtagcgcctcggacaagttccaggagacatcggtgttcaacgagacgctgcgcatcgagcgtattgcacgcacgcagggcggccgctactactgcaaggctgagaacggcgtgggggtgccggccatcaagtccatccgcgtggacgtgcagtacctggatgagccaatgctgacggtgcaccagacggtgagcgatgtgcgaggcaacttctaccaggagaagacggtgttcctgcgctgtactgtcaactccaacccgcctgcccgcttcatctggaagcggggttccgataccctatcccacagccaggacaatggggttgacatctatgagcccctctacactcagggggagaccaaggtcctgaagctgaagaacctgcggccccaggactatgccagctacacctgccaggtgtctgtgcgtaacgtgtgcggcatcccagacaaggccatcaccttccggctcaccaacaccacggcaccaccagccctgaagctgtctgtgaacgaaactctggtggtgaaccctggggagaatgtgacggtgcagtgtctgctgacaggcggtgatcccctcccccagctgcagtggtcccatgggcctggcccactgcccctgggtgctctggcccagggtggcaccctcagcatcccttcagtgcaggcccgggactctggctactacaactgcacagccaccaacaatgtgggcaaccctgccaagaagactgtcaacctgctggtgcgatccatgaagaacgctacattccagatcactcctgacgtgatcaaagagagtgagaacatccagctgggccaggacctgaagctatcgtgccacgtggatgcagtgccccaggagaaggtgacctaccagtggttcaagaatggcaagccggcacgcatgtccaagcggctgctggtgacccgcaatgatcctgagctgcccgcagtcaccagcagcctagagctcattgacctgcacttcagtgactatggcacctacctgtgcatggcttctttcccaggggcacccgtgcccgacctcagcgtcgaggtcaacatctcctctgagacagtgccgcccaccatcagtgtgcccaagggtagggccgtggtgaccgtgcgcgagggatcgcctgccgagctgcaatgcgaggtgcggggcaagccgcggccgccagtgctctggtcccgcgtggacaaggaggctgcactgctgccctcggggctgcccctggaggagactccggacgggaagctgcggctggagcgagtgagccgagacatgagcgggacctaccgctgccagacggcccgctataatggcttcaacgtgcgcccccgtgaggcccaggtgcagctgaacgtgcagttcccgccggaggtggagcccagttcccaggacgtgcgccaggcgctgggccggcccgtgctcctgcgctgctcgctgctgcgaggcagcccccagcgcatcgcctcggctgtgtggcgtttcaaagggcagctgctgccgccgccgcctgttgttcccgccgccgccgaggcgccggatcacgcggagctgcgcctcgacgccgtaactcgcgacagcagcggcagctacgagtgcagcgtctccaacgatgtgggctcggctgcctgcctcttccaggtctccgccaaagcctacagcccggagttttacttcgacacccccaaccccacccgcagccacaagctgtccaagaactactcctacgtgctgcagtggactcagagggagcccgacgctgtcgaccctgtgctcaactacagactcagcatccgccagttgaaccagcacaatgcggtggtcaaggccatcccggtccggcgtgtggagaaggggcagctgctggagtacatcctgaccgatctccgtgtgccccacagctatgaggtccgcctcacaccctataccaccttcggggctggtgacatggcctcccgcatcatccactacacagagcccatcaactctccgaacctttcagacaacacctgccactttgaggatgagaagatctgtggctatacccaggacctgacagacaactttgactggacgcggcagaatgccctcacccagaaccccaaacgctcccccaacactggtccccccaccgacataagtggcacccctgagggctactacatgttcatcgagacatcgaggcctcgggagctgggggaccgtgcaaggttagtgagtcccctctacaatgccagcgccaagttctactgtgtctccttcttctaccacatgtacgggaaacacatcggctccctcaacctcctggtgcggtcccggaacaaaggggctctggacacgcacgcctggtctctcagtggcaataagggcaatgtgtggcagcaggcccatgtgcccatcagccccagtgggcccttccagattatttttgagggggttcgaggcccgggctacctgggggatattgccatagatgacgtcacactgaagaagggggagtgtccccggaagcagacggatcccaataaaggtgcaagacgggaaggaggtgggggagctgaatctggagggagctgtgcgtggcgggggttcctgtctgttgagggagggtgtttgggtctgaataggggttcagaatgtctgagtgatgggaatcatgtggctctgactgtgtgaaggtgtgccccacactcactcaggctgtgtacttgtgtaaacaatgagaagcctggcccccaccctcgtgatgagcatactgacctgttcacggtatca

SEQ ID NO: 288749 - DNA, 2922 bp, Artificial Sequence
  derived and/or modified sequence
atggaggtgacctgcctgctgctgctggccctgatccccttccactgcaggggccagggggtgtatgcacctgcccaggcacaaatagttcatgcagggcaggcctgtgtagtgaaagaggacaatatatcagagagagtgtacacgatccgtgaaggggatacactcatgttgcagtgccttgtaaccggacacccccggccacaggtgcggtggacgaagaccgcggggagtgcaagcgataagtttcaggaaacaagcgtgtttaacgagaccctgcggattgaaagaatcgcacggacccagggcggacgctactactgcaaagccgagaatggggtgggcgtccctgcgattaagtccatcagggtggacgttcaatacttagatgagcccatgctcactgtgcaccagactgtgagcgatgtgcgcggaaatttctatcaggaaaaaacagtctttctgcgctgcactgtgaacagcaacccccccgcccggtttatatggaagcgcggcagtgatacgctgtcacacagccaggacaatggcgtcgacatttatgaacctttgtacacacaaggcgaaacaaaggtgttaaagctaaaaaacctgagaccccaagattacgcatcatacacctgccaggtgtctgtccggaatgtgtgcggcattcctgataaagcgatcactttccgactcaccaacactaccgcaccaccagccctcaagctcagcgtcaacgaaacattggtggtgaatcctggcgaaaatgtaaccgttcagtgccttttgaccggcggggatccactgccgcaactacaatggtcccatgggcctggtccattaccgctcggggccctcgcccagggcggtaccctgagcattccgtctgtgcaggccagagacagcggctactataactgcactgctactaataacgttggcaatcctgccaagaaaaccgtgaacctgctggttcggagcatgaaaaatgctacattccaaatcacaccagatgtgatcaaggagtccgagaatattcaactaggtcaggaccttaaactgtcatgtcacgtagacgccgtgcctcaagaaaaagtcacatatcaatggtttaagaatggcaagccagcgagaatgagcaagcggctccttgtaactagaaatgaccctgagctccccgcagtcacgagctccttggaactcatcgatcttcactttagtgactatggcacctacttgtgcatggcatcattcccaggggccccagtgccagatttgagcgtcgaagtgaatattagctctgaaaccgtgccccctacaatctcagtcccaaaggggagagccgtggtaaccgtgagagaaggatccccagctgagcttcagtgtgaagttaggggtaagccccggccaccggtactttggtctagagtcgacaaggaggccgctcttctgccttcaggtctgccgctcgaggaaacacctgacggtaagcttagactggagagagtgtcccgtgacatgtctgggacataccgatgtcagaccgcacgctacaatggatttaacgtgcgccccagagaggctcaggtgcagctgaatgtgcagtttccacccgaggtggaaccaagctctcaagacgtgaggcaggccctgggcagacctgtccttctgcgctgttccttactgcgggggagccctcagcgcattgcctctgctgtctggcgctttaaagggcagttgctcccaccacccccagtcgtacccgcagccgcagaagccccagaccacgctgagcttcgactggacgcagttactagggactctagcggatcgtacgagtgtagtgtgagcaatgacgtggggtcagctgcctgcttgtttcaggtgtctgctaaagcatactcccccgagttctacttcgacactcccaatcctactagatcccacaaactatctaaaaactactcctacgtgttgcagtggacgcagcgggagcctgatgccgtcgatcctgttctgaattaccggctttcgataagacagctaaatcagcacaacgcagtggtgaaggcgatccctgttagacgggttgagaaggggcaattgctggaatacattctcacagatctgcgcgttccgcactcctacgaggtaagactcactccatacacaaccttcggagcgggagacatggcaagccgtattattcactataccgagccaatcaattctcccaacctttctgacaacacatgtcactttgaagatgagaagatttgtggctacacacaggatctcaccgacaacttcgactggacacggcagaacgctcttacgcagaatccaaagcgtagccctaacactggccccccaactgatatttcgggcacgcccgaaggctattacatgttcatagagaccagccgcccaagggagttgggcgatagagcccgtctcgtgtcccccctgtacaatgcgtccgcaaagttttactgtgtgagttttttctatcacatgtatggcaagcatatcggctcgcttaacctacttgtccggtccaggaacaaaggagcactggatacacacgcttggagtctgtcagggaataaaggcaatgtctggcaacaagctcacgtgccaatcagtcccagcggcccctttcagatcatcttcgagggcgtgcggggcccaggctacctgggggatatcgccatcgacgatgtcactcttaaaaaaggcgagtgcccacgcaagcaaactgatcccaacaaaggagcccgcagggaggggggtggcggcgccgagtctggaggtagctgtgcttggcgtggctttctttcggtcgagggcggatgcctgggcctgaaccggggctctgagtgtctctctgatgggaatcatgtcgccctcaccgtgtag

SEQ ID NO: 288750 - DNA, 2922 bp, Artificial Sequence
  derived and/or modified sequence
atggaggtgacttgtctgctcttgcttgcacttattccttttcattgccgaggccaaggtgtctatgccccagcccaggctcagatcgtacacgcaggccaagcctgtgtggtgaaggaagataacattagtgaacgtgtctacaccatcagggaaggggataccctgatgctacagtgtttggtgaccgggcacccgaggccacaggttcgctggacaaagacggctggctctgccagcgacaaatttcaagagacatccgtgtttaacgagacccttcgtatagagcgaattgccagaacacagggaggtaggtactactgtaaagccgagaatggtgttggcgtcccggcaatcaagtccattagggtcgatgtgcagtatctggacgagcccatgctgacagtccatcagactgtcagcgatgtccgagggaacttctaccaggaaaagaccgtgttcttacggtgtaccgtgaatagcaatcctcccgcacgattcatttggaagcggggttcagacacgctttcgcattctcaggacaacggggtagacatctacgagcctctctatacacaaggggaaaccaaggtcctaaaactgaaaaatttacggccacaagattatgcgagctacacttgtcaggtctcagtccggaatgtctgcggtatccccgataaggctatcacatttaggctcacaaacacaaccgctccccctgcactaaagctctcagttaatgagaccctggtggtgaaccccggtgagaacgtcaccgtccagtgtcttcttactggtggtgatccactgccacaactgcagtggtctcacgggcctggcccactgccccttggggctcttgcacaggggggaaccctatcaattccctcagtgcaagcgagagactctggctattataattgtacagcgacaaacaatgtcggaaaccctgccaagaagacagtgaacttgctggttaggagtatgaaaaatgctacgttccagatcaccccagacgtgattaaagagtctgagaacatacagcttgggcaagatctgaagttatcctgccacgtcgacgccgtacctcaggagaaggtaacataccagtggttcaagaacggcaaacccgctcggatgtctaagaggcttctggtgactagaaacgaccctgagctgccagctgttaccagttccctggagttaattgacttgcattttagtgactacggtacttacctgtgcatggctagttttcctggcgctcctgtccccgacctgtcagtagaggtgaatatatcctctgaaactgttccacctactatttcagtgcccaaagggcgagccgtggttacggtgcgggagggttctccagcagaacttcaatgtgaagtgagggggaaaccaaggcctcccgtcctttggtcaagagtggacaaggaggctgcattgctccctagtggcctgccactggaggaaacaccagatggtaaactgagactggaacgagtgtcccgcgatatgtccggaacataccgatgccagactgcaagatacaatgggtttaacgttaggcctcgcgaagcccaggtacaactcaacgtacaatttccacctgaggtcgagcccagttcccaagatgtgagacaagcgctggggagaccagttctgttgcgatgctcgctcctgagaggaagccctcagagaatcgcctccgcggtctggagatttaaggggcagctgctgcctccacctccagtggtcccagccgcagcggaggcccctgaccatgctgagcttcggctcgatgcggtcacccgggactcaagtgggagctatgaatgttcagtgtctaacgatgttgggtctgcagcctgcctctttcaggtgagtgccaaagcgtactcccctgaattctatttcgacacgccaaatcctaccaggtcccacaagctgagcaaaaattactcatacgttcttcagtggacgcaacgggaacctgatgcagtggatccagtgctaaactataggctgtctatcagacaactcaaccagcacaacgcagtcgtgaaagcgattccagtacggcgagtggagaaaggtcagttactggaatacattctaacagacctgagggtaccgcactcttacgaggtgagactgacaccctatacaaccttcggagccggagatatggcctctagaataatacattacacagaaccgattaatagccccaatcttagcgacaacacctgccatttcgaagacgagaagatttgcggatacacccaggacctgactgacaacttcgactggacccgccagaacgctctgacgcaaaacccgaaacggtcccccaacaccggccctcctaccgacatatccggtacccccgagggttattatatgttcatcgagacaagtcggccaagggagctcggagacagggcacgcctcgtgagtccactctataacgcatctgcaaaattctactgcgtttcgttcttttaccatatgtatgggaagcacataggcagcctgaatctgttggtcagatctcgtaataagggtgctttagatactcacgcctggtctctttccggcaataaaggcaatgtgtggcagcaggcacacgtccctatctcgccttccggcccattccagatcatcttcgaaggagtgagagggccaggctacctcggcgatatcgcaatcgatgacgtaactctaaagaagggcgagtgccccaggaaacagacagaccctaataagggagcaagaagggagggaggagggggagcagagtcagggggatcatgcgcctggagaggcttcctctccgtagaggggggttgccttggcttgaatcgaggaagtgaatgtctgagcgacggaaaccacgtggcacttaccgtttag

SEQ ID NO: 288751 - DNA, 2922 bp, Artificial Sequence
  derived and/or modified sequence
atggaggtgacctgcctgctgctgctggccctgatccccttccactgcagaggccagggcgtgtacgcccccgcccaggcccagatcgtgcacgccggccaggcctgcgtggtgaaggaggacaacatcagcgagagagtgtacaccatcagagagggcgacaccctgatgctgcagtgcctggtgaccggccaccccagaccccaggtgagatggaccaagaccgccggcagcgccagcgacaagttccaggagaccagcgtgttcaacgagaccctgagaatcgagagaatcgccagaacccagggcggcagatactactgcaaggccgagaacggcgtgggcgtgcccgccatcaagagcatcagagtggacgtgcagtacctggacgagcccatgctgaccgtgcaccagaccgtgagcgacgtgagaggcaacttctaccaggagaagaccgtgttcctgagatgcaccgtgaacagcaacccccccgccagattcatctggaagagaggcagcgacaccctgagccacagccaggacaacggcgtggacatctacgagcccctgtacacccagggcgagaccaaggtgctgaagctgaagaacctgagaccccaggactacgccagctacacctgccaggtgagcgtgagaaacgtgtgcggcatccccgacaaggccatcaccttcagactgaccaacaccaccgccccccccgccctgaagctgagcgtgaacgagaccctggtggtgaaccccggcgagaacgtgaccgtgcagtgcctgctgaccggcggcgaccccctgccccagctgcagtggagccacggccccggccccctgcccctgggcgccctggcccagggcggcaccctgagcatccccagcgtgcaggccagagacagcggctactacaactgcaccgccaccaacaacgtgggcaaccccgccaagaagaccgtgaacctgctggtgagaagcatgaagaacgccaccttccagatcacccccgacgtgatcaaggagagcgagaacatccagctgggccaggacctgaagctgagctgccacgtggacgccgtgccccaggagaaggtgacctaccagtggttcaagaacggcaagcccgccagaatgagcaagagactgctggtgaccagaaacgaccccgagctgcccgccgtgaccagcagcctggagctgatcgacctgcacttcagcgactacggcacctacctgtgcatggccagcttccccggcgcccccgtgcccgacctgagcgtggaggtgaacatcagcagcgagaccgtgccccccaccatcagcgtgcccaagggcagagccgtggtgaccgtgagagagggcagccccgccgagctgcagtgcgaggtgagaggcaagcccagaccccccgtgctgtggagcagagtggacaaggaggccgccctgctgcccagcggcctgcccctggaggagacccccgacggcaagctgagactggagagagtgagcagagacatgagcggcacctacagatgccagaccgccagatacaacggcttcaacgtgagacccagagaggcccaggtgcagctgaacgtgcagttcccccccgaggtggagcccagcagccaggacgtgagacaggccctgggcagacccgtgctgctgagatgcagcctgctgagaggcagcccccagagaatcgccagcgccgtgtggagattcaagggccagctgctgccccccccccccgtggtgcccgccgccgccgaggcccccgaccacgccgagctgagactggacgccgtgaccagagacagcagcggcagctacgagtgcagcgtgagcaacgacgtgggcagcgccgcctgcctgttccaggtgagcgccaaggcctacagccccgagttctacttcgacacccccaaccccaccagaagccacaagctgagcaagaactacagctacgtgctgcagtggacccagagagagcccgacgccgtggaccccgtgctgaactacagactgagcatcagacagctgaaccagcacaacgccgtggtgaaggccatccccgtgagaagagtggagaagggccagctgctggagtacatcctgaccgacctgagagtgccccacagctacgaggtgagactgaccccctacaccaccttcggcgccggcgacatggccagcagaatcatccactacaccgagcccatcaacagccccaacctgagcgacaacacctgccacttcgaggacgagaagatctgcggctacacccaggacctgaccgacaacttcgactggaccagacagaacgccctgacccagaaccccaagagaagccccaacaccggcccccccaccgacatcagcggcacccccgagggctactacatgttcatcgagaccagcagacccagagagctgggcgacagagccagactggtgagccccctgtacaacgccagcgccaagttctactgcgtgagcttcttctaccacatgtacggcaagcacatcggcagcctgaacctgctggtgagaagcagaaacaagggcgccctggacacccacgcctggagcctgagcggcaacaagggcaacgtgtggcagcaggcccacgtgcccatcagccccagcggccccttccagatcatcttcgagggcgtgagaggccccggctacctgggcgacatcgccatcgacgacgtgaccctgaagaagggcgagtgccccagaaagcagaccgaccccaacaagggcgccagaagagagggcggcggcggcgccgagagcggcggcagctgcgcctggagaggcttcctgagcgtggagggcggctgcctgggcctgaacagaggcagcgagtgcctgagcgacggcaaccacgtggccctgaccgtgtag

SEQ ID NO: 288752 - protein, 205 aa, Artificial Sequence
  derived and/or modified sequence
MRAWMFVSMQAEIWMEKQYLSQREVDLEAYFTRNHTVLQGTRFKRAIFQGQYCRNFGCCEDRDDGCVTEFYAANALCYCDKFCDRENSDCCPDYKSFCREEKEWPPHTQPWYPEGCFKDGQHYEEGSVIKENCNSCTCSGQQWKCSQHVCLVRSELIEQVNKGDYGWTAQNYSQFWGMTLEDGFKFRLGTLPPSPMLLSMNEMTE

SEQ ID NO: 288753 - DNA, 612 bp, Artificial Sequence
  derived and/or modified sequence
atggagaagcagtacctgagccagagagaggtggacctggaggcctacttcaccagaaaccacaccgtgctgcagggcaccagattcaagagagccatcttccagggccagtactgcagaaacttcggctgctgcgaggacagagacgacggctgcgtgaccgagttctacgccgccaacgccctgtgctactgcgacaagttctgcgacagagagaacagcgactgctgccccgactacaagagcttctgcagagaggagaaggagtggcccccccacacccagccctggtaccccgagggctgcttcaaggacggccagcactacgaggagggcagcgtgatcaaggagaactgcaacagctgcacctgcagcggccagcagtggaagtgcagccagcacgtgtgcctggtgagaagcgagctgatcgagcaggtgaacaagggcgactacggctggaccgcccagaactacagccagttctggggcatgaccctggaggacggcttcaagttcagactgggcaccctgccccccagccccatgctgctgagcatgaacgagatgaccgtgagcgtgcccagcgacagcagaatgtgcatgtacctgtag

SEQ ID NO: 288754 - DNA, 618 bp, Artificial Sequence
  derived and/or modified sequence
atgagagcctggatgttcgtgagcatgcaggccgagatctggatggagaagcagtacctgagccagagagaggtggacctggaggcctacttcaccagaaaccacaccgtgctgcagggcaccagattcaagagagccatcttccagggccagtactgcagaaacttcggctgctgcgaggacagagacgacggctgcgtgaccgagttctacgccgccaacgccctgtgctactgcgacaagttctgcgacagagagaacagcgactgctgccccgactacaagagcttctgcagagaggagaaggagtggcccccccacacccagccctggtaccccgagggctgcttcaaggacggccagcactacgaggagggcagcgtgatcaaggagaactgcaacagctgcacctgcagcggccagcagtggaagtgcagccagcacgtgtgcctggtgagaagcgagctgatcgagcaggtgaacaagggcgactacggctggaccgcccagaactacagccagttctggggcatgaccctggaggacggcttcaagttcagactgggcaccctgccccccagccccatgctgctgagcatgaacgagatgaccgagtag

SEQ ID NO: 288755 - DNA, 612 bp, Artificial Sequence
  derived and/or modified sequence
atggagaagcagtatctttcgcagcgggaggtcgatctggaggcctactttacacggaatcatactgtgcttcaaggcaccaggttcaaacgggcgattttccagggtcagtattgccgaaatttcgggtgctgcgaagatcgcgacgatgggtgcgtgaccgagttctacgcggccaacgccctgtgctactgcgacaaattctgtgatcgggagaacagcgactgttgcccagactacaaaagtttttgccgggaggagaaggagtggcccccccatacgcaaccctggtaccctgagggatgttttaaggacggtcaacactacgaagagggatccgtaattaaagagaactgcaactcctgtacctgtagcggccagcaatggaaatgctcccagcacgtgtgtcttgtgcgatccgagctgatagagcaggtgaacaagggggattacggatggaccgcgcagaactattctcagttctggggcatgactcttgaggacggtttcaaattccgcttgggaaccctgccaccctccccaatgcttctgtctatgaacgaaatgactgtgtcagtgccctccgactcaaggatgtgcatgtatctctag

SEQ ID NO: 288756 - DNA, 618 bp, Artificial Sequence
  derived and/or modified sequence
atgagagcatggatgttcgtcagcatgcaagctgaaatctggatggaaaaacagtacctgtcccaaagagaagtggatctggaagcatatttcaccaggaaccatactgtcctacagggcacgcggtttaagcgtgccatcttccagggccagtactgcaggaacttcggctgttgtgaggatagagatgacggttgtgtaacggaattttatgcggcgaatgctctgtgttattgcgacaagttctgtgaccgggaaaatagcgattgctgtcccgattataaaagcttctgccgcgaagaaaaagaatggccccctcatacccagccgtggtatcctgagggatgttttaaagatggacaacactacgaagaaggctcagtcattaaggagaattgcaattcctgtacctgtagtgggcaacagtggaaatgttcgcagcacgtgtgtctggtgaggagtgagttgattgagcaagtcaacaaaggggactatggatggaccgcgcagaactattctcagttttggggaatgactctggaggacggttttaagtttagattgggaacgctgccccctagccccatgttgttgtcaatgaatgagatgaccgaatag

SEQ ID NO: 288757 - DNA, 612 bp, Artificial Sequence
  derived and/or modified sequence
atggagaagcagtacctgagccagcgggaggtggacctggaggcctacttcaccaggaaccacacagtgctgcagggcacccgcttcaagagggccatcttccagggccagtactgcaggaactttggctgctgtgaggacagagatgatggctgtgtgacagagttctacgccgccaatgccctgtgctactgtgacaagttctgtgaccgggagaacagcgactgctgcccagactacaagagcttctgccgggaggagaaggagtggccaccccacacccagccctggtacccagagggctgcttcaaggatggccagcactatgaggagggcagcgtcatcaaggagaactgcaacagctgcacctgcagcggccagcagtggaagtgcagccagcacgtgtgcctggtgcgctctgagctgattgagcaggtgaacaagggggactatggctggacagcccagaactacagccagttctggggcatgaccctggaggatggcttcaagttccggctgggcaccctgccccccagccccatgctgctgtccatgaatgagatgacagtgtctgtgcccagcgacagcaggatgtgcatgtacctgtag

SEQ ID NO: 288758 - DNA, 618 bp, Artificial Sequence
  derived and/or modified sequence
atgagggcctggatgtttgtgtccatgcaggccgagatctggatggagaagcagtacctgagccagcgggaggtggacctggaggcctacttcaccaggaaccacacagtgctgcagggcacccgcttcaagagggccatcttccagggccagtactgcaggaactttggctgctgtgaggacagagatgatggctgtgtgacagagttctacgccgccaatgccctgtgctactgtgacaagttctgtgaccgggagaacagcgactgctgcccagactacaagagcttctgccgggaggagaaggagtggccaccccacacccagccctggtacccagagggctgcttcaaggatggccagcactatgaggagggcagcgtcatcaaggagaactgcaacagctgcacctgcagcggccagcagtggaagtgcagccagcacgtgtgcctggtgcgctctgagctgattgagcaggtgaacaagggggactatggctggacagcccagaactacagccagttctggggcatgaccctggaggatggcttcaagttccggctgggcaccctgccccccagccccatgctgctgtccatgaatgagatgacagaatag

SEQ ID NO: 288759 - DNA, 612 bp, Artificial Sequence
  derived and/or modified sequence
atggagaagcagtacctgagccagcgggaggtggacctggaggcctacttcactcggaaccacaccgtgctacagggaacaagatttaagcgcgcgatcttccagggccagtactgcagaaacttcgggtgttgtgaggacagagatgacgggtgcgttacagagttctatgcagccaacgctctgtgttattgcgacaagttttgcgatagagaaaacagtgattgctgccctgattacaaatccttttgtcgtgaagaaaaagaatggccaccacacactcagccctggtatccagaagggtgtttcaaagacggccagcattatgaggagggatctgtgattaaagaaaactgcaactcttgcacttgttccggccagcagtggaaatgctctcaacatgtgtgcctcgtccgttcggagctgatcgagcaagtcaacaagggtgattatggatggactgctcagaattactctcagttctgggggatgactctggaagatggtttcaaatttcgcttgggcacactgcccccttcaccaatgttgctgagcatgaatgagatgactgtaagtgttccttccgacagcaggatgtgcatgtatctctag

SEQ ID NO: 288760 - DNA, 618 bp, Artificial Sequence
  derived and/or modified sequence
atgcgggcctggatgttcgtgagcatgcaggccgagatctggatggagaaacaatacctgtcccagcgtgaggtggacctggaggcctactttactcgaaaccacacagtccttcaggggactcgattcaaacgggcaatttttcagggccagtactgcaggaacttcgggtgctgcgaagaccgtgatgatggatgcgttacagaattttacgcggcgaatgcgctgtgttattgcgataagttctgcgatagagaaaatagcgattgctgcccggattacaagagtttctgtcgtgaggaaaaagaatggccaccccacactcagccatggtatccagagggttgttttaaggacggacaacactacgaggagggctctgtgatcaaggagaactgtaatagttgcacctgcagcggccagcagtggaaatgttctcagcacgtgtgcttggtgcggagtgagctgattgaacaggtgaataagggagactacggatggaccgcgcaaaattactctcaattttggggcatgactctggaggacggctttaagtttagacttggtaccttacctccgagcccaatgctcttatctatgaatgaaatgaccgagtag

SEQ ID NO: 288761 - DNA, 612 bp, Artificial Sequence
  derived and/or modified sequence
atggagaagcagtatcttagccaacgggaggtcgacctcgaggcctactttacccgcaaccacacagtactgcaggggactaggttcaaaagggctatatttcagggccagtactgcagaaattttggctgctgtgaagaccgagatgacgggtgcgtgacggagttttatgccgcaaatgcactctgttattgtgacaaattttgcgaccgagaaaactctgactgctgccctgactataagagcttttgtagggaagaaaaagaatggcccccacacactcaaccttggtaccccgagggatgtttcaaagacgggcagcactatgaggagggctccgtgatcaaggaaaactgcaactcttgcacgtgctctggacagcagtggaagtgcagccaacacgtctgtctagtgcggagtgagctaatagaacaagtgaataagggcgactacgggtggactgcccagaactacagccagttctggggcatgactttggaggatgggtttaaattcaggcttggtactctccctccttccccaatgctactaagtatgaacgagatgactgtgtcggtgccctcagattcgcgcatgtgtatgtacctctag

SEQ ID NO: 288762 - DNA, 618 bp, Artificial Sequence
  derived and/or modified sequence
atgcgcgcatggatgttcgtttcaatgcaggccgagatttggatggagaaacagtacctctctcagcgcgaggtggacctggaggcttatttcacaagaaatcacacagtcctgcagggcaccaggttcaaaagagcgatctttcagggccagtattgccggaacttcggatgttgcgaggatagagacgacggatgtgtaaccgagttttacgcggctaacgctctgtgttactgtgataagttctgcgatcgggaaaattcggattgttgtccagattacaagagcttctgcagagaagagaaagagtggccaccacacacccagccatggtatcccgaagggtgttttaaggacggccagcattacgaggagggttctgttatcaaagaaaactgcaatagctgtacctgcagtggacaacagtggaagtgctctcagcacgtttgcctagtgcgatctgaactgattgaacaagttaataaaggggactacggatggaccgctcagaattattcccaattttggggaatgacactggaggatggcttcaagttccgccttgggactttgccccctagtcctatgctgctgtcaatgaatgagatgactgaatag

SEQ ID NO: 288763 - DNA, 782 bp, Artificial Sequence
  derived and/or modified sequence
ggtaggtaaatggagtacagatgggaaatcaaaccagtgtgtgactgggcatgatttagagcaactgttattgatatgacagatcctagcaggcaacctcatgagagcctggatgttcgtttcaatgcaggcagaaatctggatggagaagcagtatttatctcaaagagaagtggacctagaggcttatttcactaggaatcacaccgttttgcaaggtactcgattcaaaagagccattttccaagggcaatactgtagaaattttggctgttgtgaagacagagatgatggctgtgtcactgagttctatgcggcgaatgcgttgtgctactgtgataaattctgtgacagagaaaattctgattgctgtcctgactacaagtccttttgccgtgaagagaaagaatggcctcctcacacacagccttggtatccagaaggttgcttcaaagatggtcaacattatgaagagggatcagtaattaaagaaaactgcaactcctgcacatgctcaggacagcaatggaaatgttcccagcatgtatgccttgttcgttcagaattaattgaacaggtcaataaaggagactatggatggacagcacagaattacagccaattttggggaatgactttagaagatggttttaaatttcgccttggcactttgccacctagtcccatgctcctgagcatgaatgaaatgacagaatgattgaatgggctggcaagatggccgatcaagaacagctctggttggcagctcccagcgagaccaa

SEQ ID NO: 288764 - DNA, 303 bp, Artificial Sequence
  derived and/or modified sequence
accacacggactgagactgatttgattaaagcaccagagtgtaatggccctcagagcagggctggtcctggggttccacaccctgatgaccctcctgagcccgcaggaggcaggggccaccaaggggcgggctggccggcatcgccgcaatcaaagcccatctggacatcctggtggagcgctccaaccgcagcagagccatcaacgtgcctccacgggtgaccgtgctccccaagtctcgggtggagctgggccagcccaacatcctcatctgcatcgtggacaacatcttcccccctgtga

SEQ ID NO: 288765 - DNA, 303 bp, Artificial Sequence
  derived and/or modified sequence
accacacggactgagactgatttgattaaagcaccagagtgtaatggccctcagagcagggctggtcctggggttccacaccctgatgaccctcctgagcccgcaggaggcaggggccaccaaggggtgggctggccggcatcgccgcaatcaaagcccatctggacatcctggtggagcgctccaaccgcagcagagccatcaacgtgcctccacgggtgaccgtgctccccaagtctcgggtggagctgggccagcccaacatcctcatctgcatcgtggacaacatcttcccccctgtga

SEQ ID NO: 288766 - DNA, 868 bp, Artificial Sequence
  derived and/or modified sequence
atttgattaaagcaccagagtgtaatggccctcagagcagggctggtcctggggttccacaccctgatgaccctcctgagcccgcaggaggcaggggccaccaaggctgaccacatgggctcctacggaccgccttctaccagtcttacggcgcctcgggccagttcacccatgaatttgatgaggaacagctgttctctgtggacctgaagaaaagcgaggccgtgtggcgtctgcctgagtttggtgactttgcccgctttgacccgcagggcgggctggccggcatcgccgcaatcaaagcccatctggacatcctggtggagcgctccaaccgcagcagagccatcaacgtgcctccacgggtgaccgtgctccccaagtctcgggtggagctgggccagcccaacatcctcatctgcatcgtggacaacatcttcccccctgtgatcaatatcacctggctgcgcaacggccaaactgtcactgagggagtggcccagaccagcttctattcccagcctgaccatttgttccgcaagttccactacctgcccttcgtgccctcagccgaggacgtctatgactgccaggtggagcactggggcctggatgcgccactcctcaggcattgggagctccaggtgcctattccaccaccagatgccatggagaccctggtctgtgccctgggcctggccatcggcctggtgggcttcctcgtgggcaccgtcctcatcatcatgggcacatatgtgtccagtgtccccaggtaatgatccttctgagagaaatgacttgtgggagacaccctgcagatcctcatgggtttgtgacagcccctgcgtgctcagtgccctttaagtgc

SEQ ID NO: 288767 - DNA, 303 bp, Artificial Sequence
  derived and/or modified sequence
accacacggactgagactgatttgattaaagcaccagagtgcaatggccctcagagcagggctggtcctggggttccacaccctgatgaccctcctgagcccgcaggaggcaggggccaccaaggggcgggctggccggcatcgccgcaatcaaagcccatctggacatcctggtggagcgctccaaccgcagcagagccatcaacgtgcctccacgggtgaccgtgctccccaagtctcgggtggagctgggccagcccaacatcctcatctgcatcgtggacaacatcttcccccctgtga

SEQ ID NO: 288768 - DNA, 868 bp, Artificial Sequence
  derived and/or modified sequence
atttgattaaagcaccagagtgtaatggccctcagagcagggctggtcctggggttccacaccctgatgaccctcctgagcccgcaggaggcaggggccaccaaggctgaccacatgggctcctacggaccgccttctaccagtcttacggcgcctcgggccagttcacccatgaatttgatgaggaacagctgttctctgtggacctgaagaaaagcgaggccgtgtggcgtctgcctgagtttggtgactttgcccgctttgacccgcagggtgggctggccggcatcgccgcaatcaaagcccatctggacatcctggtggagcgctccaaccgcagcagagccatcaacgtgcctccacgggtgaccgtgctccccaagtctcgggtggagctgggccagcccaacatcctcatctgcatcgtggacaacatcttcccccctgtgatcaatatcacctggctacgcaacggccaaactgtcactgagggagtggcccagaccagcttctattcccagcctgaccatttgttccgcaagttccactacctgcccttcgtgccctcagccgaggacgtctatgactgccaggtggagcactggggcctggatgcgccactcctcaggcattgggagctccaggtgcctattccaccaccagatgccatggagaccctggtctgtgccctgggtctggccatcggcctggtgggcttcctcgtgggcaccgtcctcatcatcatgggcacatatgtgtccagtgtccccaggtaatgatccttctgagagaaatgacttgtgggagacaccctgcagatcctcatgggtttgtgacagcccctgcgtgctcagtgccctttaagtgc

SEQ ID NO: 288769 - DNA, 868 bp, Artificial Sequence
  derived and/or modified sequence
atttgattaaagcaccagagtgcaatggccctcagagcagggctggtcctggggttccacaccctgatgaccctcctgagcccgcaggaggcaggggccaccaaggctgaccacatgggctcctacggaccgccttctaccagtcttacggcgcctcgggccagttcacccatgaatttgatgaggaacagctgttctctgtggacctgaagaaaagcgaggccgtgtggcgtctgcctgagtttggcgactttgcccgctttgacccgcagggcgggctggccggcatcgccgcaatcaaagcccatctggacatcctggtggagcgctccaaccgcagcagagccatcaacgtgcctccacgggtgaccgtgctccccaagtctcgggtggagctgggccagcccaacatcctcatctgcatcgtggacaacatcttcccccctgtgatcaatatcacctggctgcgcaacggccaaactgtcactgagggagtggcccagaccagcttctattcccagcctgaccatttgttccgcaagttccactacctgcccttcgtgccctcagccgaggacgtctatgactgccaggtggagcactggggcctggatgcgccactcctcaggcattgggagctccaggtgcctattccaccaccagatgccatggagaccctggtctgtgccctgggcctggccatcggcctggtgggcttcctcgtgggcaccgtcctcatcatcatgggcacatatgtgtccagtgtccccaggtaatgatccttctgagagaaatgacttgtgggagacaccctgcagatcctcatgggtttgtgacagcccctgcgtgctcagtgccctttaagtgc

SEQ ID NO: 288770 - DNA, 868 bp, Artificial Sequence
  derived and/or modified sequence
atttgattaaagcaccagagtgtaatggccctcagagcagggctggtcctggggttccacaccctgatgaccctcctgagcccgcaggaggcaggggccaccaaggctgaccacatgggctcctacggaccgccttctaccagtcttacggcgcctcgggccagttcacccatgaatttgatgaggaacagctgttctctgtggacctgaagaaaagcgaggccgtgtggcgtctgcctgagtttggtgactttgcccgctttgacccgcagggcgggctggccggcatcgccgcaatcaaagcccatctggacatcctggtggagcgctccaaccgcagcagagccatcaacgtgcctccacgggtgaccgtgctccccaagtctcgggtggagctgggccagcccaacatcctcatctgcatcgtggacaacatcttcccccctgtgatcaatatcacctggctacgcaacggccaaactgtcactgagggagtggcccagaccagcttctattcccagcctgaccatttgttccgcaagttccactacctgcccttcgtgccctcagccgaggacgtctatgactgccaggtggagcactggggcctggatgcgccactcctcaggcattgggagctccaggtgcctattccaccaccagatgccatggagaccctggtctgtgccctgggcctggccatcggcctggtgggcttcctcgtgggcaccgtcctcatcatcatgggcacatatgtgtccagtgtccccaggtaatgatccttctgagagaaatgacttgtgggagacaccctgcagatcctcatgggtttgtgacagcccctgcgtgctcagtgccctttaagtgc

SEQ ID NO: 288771 - DNA, 249 bp, Artificial Sequence
  derived and/or modified sequence
atgaccccccaacagggggatgtctacacatgccaggtggaacacacctcgctagattctcctgtgaccgtggaatggaaggcccaatccgatagcgcaaggtcaaaaacactgacgggcgctggaggccgggcaggagcgcaccatctgtggtcaggccacctgcatgcccaggaggaacaggaaagcagtacccggatctgtattaatcgggtgccagaattgacggaaaagaccatcgtgccttag

SEQ ID NO: 288772 - DNA, 249 bp, Artificial Sequence
  derived and/or modified sequence
atgactcctcagcagggggacgtgtatacttgccaggtcgagcacacgtctctggactcccccgtcactgtggaatggaaggcccagtccgattcagctaggtctaagaccttaacgggtgcaggaggccgagctggcgcacaccatttgtggtccgggcatctgcacgcacaggaggagcaagaaagctctaccagaatttgtataaacagagttccggagcttactgaaaagactatcgtgccttag

SEQ ID NO: 288773 - DNA, 249 bp, Artificial Sequence
  derived and/or modified sequence
atgacaccgcagcagggggatgtttatacctgccaggtagagcatacaagcttggattcccctgtgaccgtagagtggaaggcacagtctgacagtgctcgctcgaaaacattgacgggcgctggcggaagggccggagcacaccatttgtggtctgggcacctgcacgcccaagaagaacaggaatcctccaccagaatctgcattaatcgcgtgcctgagctcaccgaaaagactatcgtgccctag

SEQ ID NO: 288774 - DNA, 249 bp, Artificial Sequence
  derived and/or modified sequence
atgactccccaacagggtgacgtttacacctgccaggtagagcacacatcacttgactctcctgtcacagttgaatggaaggctcaatcagacagtgcacgctctaagacactcaccggtgcaggaggcagagctggagcacaccacctgtggagtggacatctgcatgcccaagaagaacaggagagtagcacacggatttgcatcaatagggtccccgagctgactgagaagaccatcgtcccttag

SEQ ID NO: 288775 - DNA, 249 bp, Artificial Sequence
  derived and/or modified sequence
atgactccgcagcagggcgacgtgtacatttgccaggtggagcacacaagtctcgactcccccgtgaccgtggaatggaaggcacaatcagattctgcccgttcgaaaacgctgaccggtgctggaggcagggccggtgcccatcacctttggtccggacatttacacgcccaggaggagcaggagagctcaactcgcatttgcataaacagagttccggacctcacagaaaaaactaatgtcccgtag

SEQ ID NO: 288776 - DNA, 249 bp, Artificial Sequence
  derived and/or modified sequence
atgacaccccagcaaggagacgtttacacctgtcaggtggaacacactagcttggattcccccgtgaccgtggaatggaaggcacagtccgactccgccaggagtaaaactttaactggtgccggtgggagggctggtgcacaccacctgtggagtggacatttgcatgcgcaggaagaacaggaaagctctacaaggatctgcatcaacagagttccagagctgaccgagaagacaattgtgccgtag

SEQ ID NO: 288777 - DNA, 249 bp, Artificial Sequence
  derived and/or modified sequence
atgaccccccagcagggagatgtgtacacctgccaggtggagcacaccagcctggacagccctgtgacagtggagtggaaggcccagagcgacagcgcccggagcaagaccctgactggagctgggggccgggccggggcccaccacctgtggagcggccacctgcacgcccaggaggagcaggagagcagcacccgcatctgcatcaacagagtgcctgagctgacagagaagaccatcgtgccctag

SEQ ID NO: 288778 - DNA, 249 bp, Artificial Sequence
  derived and/or modified sequence
atgaccccccagcagggagatgtgtacatctgccaggtggagcacaccagcctggacagccctgtgacagtggagtggaaggcccagagcgacagcgcccggagcaagaccctgactggagctgggggccgggccggggcccaccacctgtggagcggccacctgcacgcccaggaggagcaggagagcagcacccgcatctgcatcaacagagtgcctgacctgacagagaagaccaacgtgccctag

SEQ ID NO: 288779 - DNA, 249 bp, Artificial Sequence
  derived and/or modified sequence
atgaccccccagcagggcgacgtgtacacctgccaggtggagcacacgtctctggattcaccagtgacggtggaatggaaggcgcagagcgacagtgcacgctccaagacgttgactggagccggaggacgggccggcgcccaccatctgtggtcgggccatctgcacgcgcaggaagaacaggagagttcaacccggatctgcatcaacagggtccccgaattgaccgagaagaccattgtgccctag

SEQ ID NO: 288780 - DNA, 249 bp, Artificial Sequence
  derived and/or modified sequence
atgaccccccagcagggcgacgtgtacacctgccaggtggagcacacatccctggatagcccagtgaccgtcgaatggaaagcccaatcggactccgctcggagtaaaactcttaccggggccggcggaagagccggtgctcatcatctctggtcaggccatcttcacgctcaagaagagcaggagagctccactcgaatttgcataaacagggttcccgagctgacagaaaagacaatagtgccctag

SEQ ID NO: 288781 - DNA, 249 bp, Artificial Sequence
  derived and/or modified sequence
atgaccccccagcagggcgacgtgtacacctgccaggtggagcacaccagtctggattccccggtgacggtcgagtggaaggcccagtctgactctgccaggagtaagaccctcaccggcgccggcggacgcgcaggtgcccatcacttgtggtctggacatcttcatgcacaagaggaacaggagtcgtccacgaggatttgtattaaccgggtgcccgagctgaccgaaaagaccatagttccttag

SEQ ID NO: 288782 - DNA, 249 bp, Artificial Sequence
  derived and/or modified sequence
atgaccccccagcagggcgacgtgtacacctgccaggtggagcacactagtttggacagtcccgtcacggttgaatggaaggcccagtcagactctgctaggtcaaagacccttactggtgccggcggaagggcaggagctcatcatctctggtctggacacctacacgcacaagaagagcaggaatccagtactaggatctgtatcaacagggtacccgagcttaccgaaaaaacaatcgtaccttag

SEQ ID NO: 288783 - DNA, 249 bp, Artificial Sequence
  derived and/or modified sequence
atgaccccccagcagggcgacgtgtacatctgccaggtggagcacacatcactcgatagtcccgtgacagtcgaatggaaggctcaatcagactccgctaggtctaagaccctcaccggcgcaggcgggagagctggcgcccaccacttgtggagcggccatcttcatgcccaagaggagcaggagagctctacacggatctgcattaaccgagtgcccgatctgacggagaaaaccaacgtgccttag

SEQ ID NO: 288784 - DNA, 249 bp, Artificial Sequence
  derived and/or modified sequence
atgaccccccagcagggcgacgtgtacacctgccaggtggagcacactagcttggactctcctgtgaccgttgaatggaaggctcagagcgactccgcaaggtccaagactctcacgggcgcaggcggtcgggctggcgcacatcacctttggtcgggccaccttcacgctcaagaagaacaggaatcctccacaagaatttgcatcaacagagtgcctgagctgactgaaaaaacgatagtaccgtag

SEQ ID NO: 288785 - DNA, 249 bp, Artificial Sequence
  derived and/or modified sequence
atgactccacaacagggagatgtttatacatgtcaggtggaacatacgtcactggacagccctgtaactgtggagtggaaagctcagtctgatagcgcaagaagtaagactctcaccggcgcaggcggtagggctggcgcacaccacctgtggagtggtcatctgcatgctcaagaggagcaggaaagctcaacccgcatctgtattaatcgagtgcccgaacttactgaaaaaacaatagtgccatag

SEQ ID NO: 288786 - DNA, 249 bp, Artificial Sequence
  derived and/or modified sequence
atgactccccagcagggggatgtgtacacatgtcaggtggaacatacttccctcgacagcccggtcaccgttgagtggaaggcgcagagtgatagtgctcgatccaagacacttactggagcgggaggcagggcaggggctcaccacctctggagcgggcacctccatgcccaggaagagcaggagtccagcacccgaatctgcatcaaccgggtgccagagttaaccgagaaaactatcgtgccgtag

SEQ ID NO: 288787 - DNA, 249 bp, Artificial Sequence
  derived and/or modified sequence
atgacgccccagcagggtgatgtgtacacatgtcaggtcgagcatactagcctggacagccctgtgaccgtcgaatggaaagcccagtcagatagtgctcgttccaaaacccttaccggggcagggggtcgcgcaggggctcaccacttatggagcggccacctccacgcccaggaagagcaggaatcgtccacacggatttgcattaacagagtgcccgaacttacggagaagaccatcgtaccttag

SEQ ID NO: 288788 - DNA, 249 bp, Artificial Sequence
  derived and/or modified sequence
atgacaccacaacagggtgatgtgtacacttgccaggtagagcatacctctctggatagccccgtgaccgtcgagtggaaggcccagtcagactcggctcgctcaaagaccctgactggagcgggagggagggcgggagctcaccacctctggagcggacaccttcatgcgcaggaggaacaggaaagttctactcgcatttgtattaaccgggtcccagaactcacagagaaaaccattgtgccttag

SEQ ID NO: 288789 - DNA, 249 bp, Artificial Sequence
  derived and/or modified sequence
atgaccccgcagcagggggatgtatatatttgtcaagtcgaacacacttcattggactctcccgtcacagtggagtggaaggcccagagcgattcagccaggagtaaaacactgaccggcgcagggggtcgggcaggcgctcaccatctctggagcggccatcttcatgctcaggaggagcaagagtccagtactagaatctgcatcaatcgagtgccagatctgactgaaaagactaatgtcccgtag

SEQ ID NO: 288790 - DNA, 249 bp, Artificial Sequence
  derived and/or modified sequence
atgactccacaacaaggagatgtctatacctgtcaggttgaacacacctcgctggacagccctgttacagtggaatggaaggcccaaagcgacagcgccaggagtaagactctgaccggagcaggaggaagagccggtgcccaccacttgtggtcaggccatctgcacgcacaggaagagcaggagagttccacaagaatttgtattaaccgcgtgcctgagctgaccgagaaaaccattgtgccatag

SEQ ID NO: 288791 - DNA, 249 bp, Artificial Sequence
  derived and/or modified sequence
atgaccccccagcagggcgacgtgtacacctgccaggtggagcacaccagcctggacagccccgtgaccgtggagtggaaggcccagagcgacagcgccagaagcaagaccctgaccggcgccggcggcagagccggcgcccaccacctgtggagcggccacctgcacgcccaggaggagcaggagagcagcaccagaatctgcatcaacagagtgcccgagctgaccgagaagaccatcgtgccctag

SEQ ID NO: 288792 - DNA, 249 bp, Artificial Sequence
  derived and/or modified sequence
atgaccccccagcagggcgacgtgtacatctgccaggtggagcacaccagcctggacagccccgtgaccgtggagtggaaggcccagagcgacagcgccagaagcaagaccctgaccggcgccggcggcagagccggcgcccaccacctgtggagcggccacctgcacgcccaggaggagcaggagagcagcaccagaatctgcatcaacagagtgcccgacctgaccgagaagaccaacgtgccctag

SEQ ID NO: 288793 - protein, 24 aa, Artificial Sequence
  derived and/or modified sequence
MILNKALLLGALALTTVMSPCGGE

SEQ ID NO: 288794 - DNA, 645 bp, Artificial Sequence
  derived and/or modified sequence
atgatccttaacaaggcattgctacttggggcgcttgcactcactaccgtaatgtcaccgtgtggcggggaggacatcgtggcagatcatgtggccagctgcggtgtcaatctgtaccagttctacgggccatctgggcaatatacccacgaatttgatggtgatgaacagttctacgttgatctagagcggaaagaaacagcatggagatggcccgaattcagtaaatttgggggatttgacccccagggcgccctgcgcaacatggctgtcgctaagcataatctcaacattatgattaaaaggtacaatagcaccgctgcgaccaatgaggtgcctgaggtaaccgtcttcagcaagagcccggtgacactcggccagcctaacacgctcatctgcctggtcgataacatatttccgccagttgttaatataacttggctttccaacgggcaaagcgtgacagagggggtcagcgaaacctcctttctcagtaagagcgaccactcctttttcaagatctcttacctaacatttctcccaagcgccgatgaaatttatgactgtaaagttgaacactggggattggaccagcctcttctaaagcactggggagcctctcctagcactggggcagaagagtag

SEQ ID NO: 288795 - DNA, 645 bp, Artificial Sequence
  derived and/or modified sequence
atgatcctgaacaaggccctgctgctgggcgccctggccctgaccaccgtgatgagcccctgtggcggggaggacatcgtggccgaccacgtggccagctgtggggtgaacctgtaccagttctacggccccagcggccagtacacccatgaatttgatggagatgagcagttctacgtggacctggagaggaaggagacagcctggcgctggccagagttcagcaagtttggaggctttgacccccagggcgccctgaggaacatggctgtggccaagcacaacctgaacatcatgatcaagcgctacaacagcacagctgccaccaatgaggtgcctgaggtgaccgtcttcagcaagagccctgtgaccctgggccagcccaacaccctcatctgcctggtggacaacatcttcccccctgtggtgaacatcacctggctgagcaatggccagagcgtgacagaaggagtgtctgagaccagcttcctgagcaagagtgaccacagcttcttcaagatctcctacctgaccttcctgcccagcgcagatgagatctatgactgcaaggtggagcactggggcctggaccagcccctgctgaagcactggggcgccagccccagcactggagctgaggagtag

SEQ ID NO: 288796 - DNA, 696 bp, Artificial Sequence
  derived and/or modified sequence
acaattactctacagctcagaacaccaactgctgaggctgccttgggaagaggatgatcctaaacaaagctctgctgctgggggccctcgctctgaccaccgtgatgagcccctgtggaggtgaagacattgtggctgaccacgttgcctcttgtggtgtaaacttgtaccagttttacggtccctctggccagtacacccatgaatttgatggagatgagcagttctacgtggacctggagaggaaggagactgcctggcggtggcctgagttcagcaaatttggaggttttgacccgcagggtgcactgagaaacatggctgtggcaaaacacaacttgaacatcatgattaaacgctacaactctaccgctgctaccaatgaggttcctgaggtcacagtgttttccaagtctcccgtgacactgggtcagcccaacaccctcatttgtcttgtggacaacatctttcctcctgtggtcaacatcacatggctgagcaatgggcagtcagtcacagaaggtgtttctgagaccagcttcctctccaagagtgatcattccttcttcaagatcagttacctcaccttcctcccttctgctgatgagatttatgactgcaaggtggagcactggggcctggaccagcctcttctgaaacactggggtgcatcgccatctacaggagcagaagaat

SEQ ID NO: 288797 - DNA, 645 bp, Artificial Sequence
  derived and/or modified sequence
atgatcctgaacaaggccctgctgctgggcgccctggccctgaccactgtaatgtccccttgtggtggtgaagatatagttgccgatcatgttgcgtcctgtggcgtgaacctttatcagttctacggtccctccggacagtacacacacgagtttgatggggatgaacaattttatgtggacctagaacggaaagagactgcatggagatggcctgaatttagcaagttcggcggctttgatccgcagggtgccctgcgcaatatggcagtggctaaacataacctgaatatcatgatcaagagatataactccacagctgccactaatgaggtccccgaagttaccgtgtttagcaaatctcctgttacccttgggcagcccaatacactgatctgtcttgtggataacatcttcccccccgttgtaaacatcacctggctctcaaacggtcagtcggttactgagggggttagcgagaccagtttcctgagtaaaagcgaccacagctttttcaagatctcatacctcacctttttaccaagtgctgatgagatctacgactgtaaggtggaacattggggccttgaccagccactgctgaagcattggggggcatccccatctaccggtgcagaagagtag

SEQ ID NO: 288798 - DNA, 645 bp, Artificial Sequence
  derived and/or modified sequence
atgatacttaataaagcactgctgctcggggcactggctctcaccaccgtaatgtctccctgtggaggcgaagacatcgtcgccgatcatgtggcctcttgtggagtgaatttgtaccagttttacggcccatccggtcagtatacgcatgaatttgatggtgacgaacagttttatgtcgacttggagagaaaggagaccgcctggagatggcctgagttcagcaagttcggaggattcgacccccaaggagccttgagaaatatggcagtggccaaacataatctcaatataatgattaaaagatacaatagcactgcggcaacaaacgaggtgccagaagtcactgtcttctccaagtcacccgtcacactgggccagccgaatacactgatttgtctggtggataatatattccctccagtcgtcaacatcacgtggctgtcaaatgggcagagcgtcacagagggcgtctcagaaacgagcttcctttcgaagagcgaccattcattttttaaaatttcttatctaaccttccttccatccgccgacgaaatctacgactgcaaagtggaacattggggtctggatcaacctctactcaagcactggggcgcatctccctccaccggcgcagaagagtag

SEQ ID NO: 288799 - DNA, 645 bp, Artificial Sequence
  derived and/or modified sequence
atgatcctgaacaaggccctgctgctgggcgccctggccctgaccaccgtgatgagcccctgcggcggcgaggacatcgtggccgaccacgtggccagctgcggcgtgaacctgtaccagttctacggccccagcggccagtacacccacgagttcgacggcgacgagcagttctacgtggacctggagagaaaggagaccgcctggagatggcccgagttcagcaagttcggcggcttcgacccccagggcgccctgagaaacatggccgtggccaagcacaacctgaacatcatgatcaagagatacaacagcaccgccgccaccaacgaggtgcccgaggtgaccgtgttcagcaagagccccgtgaccctgggccagcccaacaccctgatctgcctggtggacaacatcttcccccccgtggtgaacatcacctggctgagcaacggccagagcgtgaccgagggcgtgagcgagaccagcttcctgagcaagagcgaccacagcttcttcaagatcagctacctgaccttcctgcccagcgccgacgagatctacgactgcaaggtggagcactggggcctggaccagcccctgctgaagcactggggcgccagccccagcaccggcgccgaggagtag

SEQ ID NO: 288800 - DNA, 636 bp, Artificial Sequence
  derived and/or modified sequence
tgagccagaagccaggagcccatcttcagaaccgagggccccatggcccagaaccaggccagcgtgctgaagaaccaggcccccgtgaccagaacccaggcccccatcaccggcaccctgtgccaggacgccagaagcaacagccaccccgtgaagcccagcagactgaacgtgttctgctgcccccactgcagcctgaccttcagcaagaagagctacctgagcagacaccagaaggcccacctgaccgagccccccaactactgcttccactgcagcaagagcttcagcagcttcagcagactggtgagacaccagcagacccactggaagcagaagagctacctgtgccccatctgcgacctgagcttcggcgagaaggagggcctgatggaccactggagaggctacaagggcaaggacctgtgccagagcagccaccacaagtgcagagtgatcctgggccagtggctgggcttcagccacgacgtgcccaccatggccggcgaggagtggaagcacggcggcgaccagagcccccccagaatccacacccccagaagaagaggcctgagagagaaggcctgcaagggcgacaagaccaaggaggccgtgagcatcctgaagcacaagtag

SEQ ID NO: 288801 - DNA, 636 bp, Artificial Sequence
  derived and/or modified sequence
taggcccggtcccaggaacctattttcaggaccgaaggcccaatggcccaaaaccaagcatccgtgctgaaaaaccaagcccccgtgacacggacacaggcacccatcacaggaactctctgccaggatgcccgaagcaattcccatcccgttaagccatcccgccttaatgtgttttgctgccctcactgcagcttaacatttagtaagaaaagttacttaagcaggcatcaaaaagcccacctgaccgagcctccgaattactgctttcactgtagtaagtctttttcaagtttttcacggctggtgcgacaccaacagactcactggaaacagaagagctacctgtgtccgatatgcgatttgtctttcggcgagaaagaaggtctgatggaccattggcggggatacaagggtaaggatctctgccagagctctcatcacaaatgtagggtgattttagggcagtggctgggtttttcacatgatgtgcccaccatggctggagaggaatggaagcacggtggcgaccagtcgcccccgagaatccacactccccgacgcagaggactcagagagaaggcctgtaaaggcgataaaaccaaggaagcagtaagtatcctcaagcataagtag

SEQ ID NO: 288802 - DNA, 636 bp, Artificial Sequence
  derived and/or modified sequence
tgagcccggagccaggagcccatcttcagaacagagggccccatggcccagaaccaggcctctgtgctgaagaaccaggcccctgtgaccaggacccaggcccccatcaccggcaccctgtgccaggatgcccggagcaacagccaccctgtgaagcccagccggctgaatgtgttctgctgcccccactgcagcctgaccttcagcaagaagagctacctgagccgccaccagaaggcccacctgacagagccccccaactactgcttccactgcagcaagagcttcagcagcttcagccggctggtgcgccaccagcagacccactggaagcagaagagctacctgtgccccatctgtgacctgagctttggagagaaggagggcctgatggaccactggaggggctacaagggcaaggacctgtgccagagcagccaccacaagtgcagggtcatcctgggccagtggctgggcttcagccatgatgtgcccaccatggccggggaggagtggaagcacggcggggaccagagccccccacgcatccacaccccaagaagaagaggcctgcgggagaaggcctgcaagggggacaagaccaaggaggccgtgtccatcctgaagcacaagtag

SEQ ID NO: 288803 - DNA, 636 bp, Artificial Sequence
  derived and/or modified sequence
tgagcccggagccaggagcccatcttccggaccgagggccccatggctcagaaccaggcatcagtgctgaaaaaccaggcgcctgtgacccgcacgcaggcgccaattaccggcaccctgtgccaggacgcgcgcagtaattcccaccctgttaagccatctcgcttgaatgtgttctgttgcccccactgtagcctgacattttcaaaaaaatcatatctttctcggcaccagaaggcacacttaaccgagcctcctaactactgcttccactgctcgaaatcttttagttccttctctcgcttggttaggcatcaacagacccactggaaacagaaatcttacctgtgcccaatatgtgatttatctttcggcgagaaagaggggctgatggaccattggcgtggctacaaaggcaaagatttgtgtcagtcctcccaccataagtgtagggtcatcctgggacagtggttgggtttctcacacgatgtccctaccatggcgggtgaggaatggaagcatgggggtgatcagtccccccctcggatacatactccacggcgcaggggactcagggaaaaggcatgtaagggtgataaaaccaaagaggctgtatccattttgaaacataagtag

SEQ ID NO: 288804 - DNA, 636 bp, Artificial Sequence
  derived and/or modified sequence
tgagcaaggagccaggagccgatattcaggacggaaggcccaatggcccagaaccaagcatccgtgctgaagaaccaggcccctgtgactaggacccaagcacctattaccggcaccctgtgccaggacgcgaggagcaattcacatccagtaaaaccatcacggcttaatgtcttctgttgccctcactgttcactcacttttagtaagaaaagttatctgtctagacatcagaaagctcacttgaccgagccccctaattattgtttccattgtagtaaatctttctcctcgttctcaagactggttcggcatcagcagactcactggaagcaaaagtcttatttatgccctatttgcgacctgtccttcggcgaaaaagagggtctcatggaccactggcgtggatacaagggcaaagatctgtgtcaatcttcccaccacaaatgtcgtgtgatcctcgggcaatggttaggatttagtcatgacgtaccaacaatggccggtgaagagtggaagcatgggggtgaccagagtccacctcgtatccacacccctaggcggaggggactgagggaaaaggcgtgtaagggcgataaaacgaaggaggcagtgagcattctgaaacacaagtag

SEQ ID NO: 288805 - DNA, 651 bp, Artificial Sequence
  derived and/or modified sequence
ggccaggtcccaggaacccatatttagaactgagggtcctatggcccagaaccaggcatctgtacttaagaaccaagcacctgtgaccaggacccaggcacccatcactggaaccctctgtcaggatgccagatccaactctcatccagtgaagccctcaagactcaatgtcttctgttgcccccattgttctttgacttttagcaagaaatcctatctctccagacaccagaaggcccacctcacagagccgcccaactactgcttccattgcagcaagtctttcagctcattttccaggctggtcagacaccagcagacccactggaagcagaagagctacctttgccctatctgtgacctctcctttggggagaaagagggccttatggatcactggaggggctataaaggcaaggacctgtgccagagcagccaccataaatgccgggtgatcctgggccagtggcttggcttctctcatgatgtccccactatggctggggaggaatggaagcatggaggtgatcaatctccccccaggatccatacccccaggagaagaggcctaagagagaaggcctgcaaaggagacaaaacaaaggaggcagtgagcatcttgaaacataaataaatggcctttctgactga

SEQ ID NO: 288806 - protein, 93 aa, Artificial Sequence
  derived and/or modified sequence
  misc_feature (1)..(1): Xaa can be any naturally occurring amino acid
XTRLPPGGWSPDPKYQICLCFGEEDPGPTQHPKEQLIMADVQVQLRPGSSSCTLSASTERPDGSSTPGNPDGITHLQCSCLHPKRAASSSCTR

SEQ ID NO: 288807 - DNA, 282 bp, Artificial Sequence
  derived and/or modified sequence
tgaaccagactgccccccggcggctggagccccgaccccaagtaccagatctgcctgtgcttcggcgaggaggaccccggccccacccagcaccccaaggagcagctgatcatggccgacgtgcaggtgcagctgagacccggcagcagcagctgcaccctgagcgccagcaccgagagacccgacggcagcagcacccccggcaaccccgacggcatcacccacctgcagtgcagctgcctgcaccccaagagagccgccagcagcagctgcaccagatag

SEQ ID NO: 288808 - DNA, 282 bp, Artificial Sequence
  derived and/or modified sequence
tagactcgcctgccccccggaggatggtctccagaccccaagtaccaaatctgtctatgcttcggagaggaggaccctggaccgactcagcacccaaaggagcagctcatcatggctgacgtccaggtccagctgcggcctgggtctagtagctgtacgctctctgccagcactgaaaggccagatgggagctcgacccccggaaaccctgatgggattacccaccttcagtgctcgtgcctgcaccccaaacgggccgcctcctccagctgcacccgctag

SEQ ID NO: 288809 - DNA, 282 bp, Artificial Sequence
  derived and/or modified sequence
tgaacacggctgcccccaggcggctggagcccagaccccaagtaccagatctgcctgtgctttggagaggaggaccccggccccacccagcaccccaaggagcagctgatcatggctgatgtgcaggtgcagctgcggcccggcagcagcagctgcaccctgagcgccagcacagagaggccagatggcagcagcaccccaggcaacccagatggcatcacccacctgcagtgcagctgcctgcaccccaagagagctgccagcagcagctgcaccaggtag

SEQ ID NO: 288810 - DNA, 282 bp, Artificial Sequence
  derived and/or modified sequence
tgaacccggctgccccccggcggctggagccccgaccccaagtaccagatctgtctgtgcttcggcgaggaggacccaggtccaacccaacatcctaaagagcagctcatcatggcagatgtgcaggtgcagctccggccaggcagttcatcatgtacactgtctgcgtcgaccgagaggcccgacggaagctcaaccccaggcaacccagacgggattacccacctgcaatgctcttgtctgcacccaaagagggccgccagctcgtcgtgcacacgctag

SEQ ID NO: 288811 - DNA, 282 bp, Artificial Sequence
  derived and/or modified sequence
tgaacacgtctgcccccaggcggttggtcccccgaccctaagtatcagatctgcctatgtttcggagaggaggaccctggcccaactcaacatccgaaggagcagcttattatggcggacgtgcaggtgcaattacggcctggctccagttcctgtactcttagtgcatcaaccgaaaggcctgacggatcatcaacccctggcaatccagatggaattacccacttgcagtgttcctgcctgcatcctaaaagggccgcatcatcgtcttgcactcgctag

SEQ ID NO: 288812 - protein, 441 aa, Artificial Sequence
  derived and/or modified sequence
MEQPQEEAPEVREEEEKEEVAEAEGAPELNGGPQHALPSSSYTDLSRSSSPPSLLDQLQMGCDGASCGSLNMECRVCGDKASGFHYGVHACEGCKGFFRRTIRMKLEYEKCERSCKIQKKNRNKCQYCRFQKCLALGMSHNAIRFGRMPEAEKRKLVAGLTANEGSQYNPQVADLKAFSKHIYNAYLKNFNMTKKKARSILTGKASHTAPFVIHDIETLWQAEKGLVWKQLVNGLPPYKEISVHVFYRCQCTTVETVRELTEFAKSIPSFSSLFLNDQVTLLKYGVHEAIFAMLASIVNKDGLLVANGSGFVTREFLRSLRKPFSDIIEPKFEFAVKFNALELDDSDLALFIAAIILCGDRPGLMNVPRVEAIQDTILRALEFHLQANHPDAQYLFPKLLQKMADLRQLVTEHAQMMQRIKKTETETSLHPLLQEIYKDMY

SEQ ID NO: 288813 - protein, 338 aa, Artificial Sequence [sequence omitted]

SEQ ID NO: 288814 - DNA, 3749 bp, Artificial Sequence
  derived and/or modified sequence
gcggagcgtgtgacgctgcggccgccgcggacctggggattaatgggaaaagttttggcaggagcgggagaattctgcggagcctgcgggacggcggcggtggcgccgtaggcagccgggacagtgttgtacagtgttttgggcatgcacgtgatactcacacagtggcttctgctcaccaacagatgaagacagatgcaccaacgaggctgatgggaaccaccctgtagaggtccatctgcgttcagacccagacgatgccagagctatgactgggcctgcaggtgtggcgccgaggggagatcagccatggagcagccacaggaggaagcccctgaggtccgggaagaggaggagaaagaggaagtggcagaggcagaaggagccccagagctcaatgggggaccacagcatgcacttccttccagcagctacacagacctctcccggagctcctcgccaccctcactgctggaccaactgcagatgggctgtgacggggcctcatgcggcagcctcaacatggagtgccgggtgtgcggggacaaggcatcgggcttccactacggtgttcatgcatgtgaggggtgcaagggcttcttccgtcgtacgatccgcatgaagctggagtacgagaagtgtgagcgcagctgcaagattcagaagaagaaccgcaacaagtgccagtactgccgcttccagaagtgcctggcactgggcatgtcacacaacgctatccgttttggtcggatgccggaggctgagaagaggaagctggtggcagggctgactgcaaacgaggggagccagtacaacccacaggtggccgacctgaaggccttctccaagcacatctacaatgcctacctgaaaaacttcaacatgaccaaaaagaaggcccgcagcatcctcaccggcaaagccagccacacggcgccctttgtgatccacgacatcgagacattgtggcaggcagagaaggggctggtgtggaagcagttggtgaatggcctgcctccctacaaggagatcagcgtgcacgtcttctaccgctgccagtgcaccacagtggagaccgtgcgggagctcactgagttcgccaagagcatccccagcttcagcagcctcttcctcaacgaccaggttacccttctcaagtatggcgtgcacgaggccatcttcgccatgctggcctctatcgtcaacaaggacgggctgctggtagccaacggcagtggctttgtcacccgtgagttcctgcgcagcctccgcaaacccttcagtgatatcattgagcctaagtttgaatttgctgtcaagttcaacgccctggaacttgatgacagtgacctggccctattcattgcggccatcattctgtgtggagaccggccaggcctcatgaacgttccacgggtggaggctatccaggacaccatcctgcgtgccctcgaattccacctgcaggccaaccaccctgatgcccagtacctcttccccaagctgctgcagaagatggctgacctgcggcaactggtcaccgagcacgcccagatgatgcagcggatcaagaagaccgaaaccgagacctcgctgcaccctctgctccaggagatctacaaggacatgtactaacggcggcacccaggcctccctgcagactccaatggggccagcactggaggggcccacccacatgacttttccattgaccagcccttgagcacccggcctggagcagcagagtcccacgatcgccctcagacacatgacacccacggcctctggctccctgtgccctctctcccgcttcctccagccagctctcttcctgtctttgttgtctccctctttctcagttcctctttcttttctaattcctgttgctctgtttcttcctttctgtaggtttctctcttcccttctcccttgccctccctttctctctccaccccccacgtctgtcctcctttcttattctgtgagatgttttgtattatttcaccagcagcatagaacaggacctctgcttttgcacaccttttccccaggagcagaagagagtggggcctgccctctgccccatcattgcacctgcaggcttaggtcctcacttctgtctcctgtcttcagagcaaaagacttgagccatccaaagaaacactaagctctctgggcctgggttccagggaaggctaagcatggcctggactgactgcagccccctatagtcatggggtccctgctgcaaaggacagtgggcaggaggccccaggctgagagccagatgcctccccaagactgtcattgcccctccgatgctgaggccacccactgacccaactgatcctgctccagcagcacacctcagccccactgacacccagtgtccttccatcttcacactggtttgccaggccaatgttgctgatggccccctgcactggccgctggacggcactctcccagcttggaagtaggcagggttccctccaggtgggcccccacctcactgaagaggagcaagtctcaagagaaggaggggggattggtggttggaggaagcagcacacccaattctgcccctaggactcggggtctgagtcctggggtcaggccagggagagctcggggcaggccttccgccagcactcccactgcccccctgcccagtagcagccgcccacattgtgtcagcatccagggccagggcctggcctcacatccccctgctcctttctctagctggctccacgggagttcaggccccactccccctgaagctgcccctccagcacacacacataagcactgaaatcactttacctgcaggctccatgcacctcccttccctccctgaggcaggtgagaacccagagagaggggcctgcaggtgagcaggcagggctgggccaggtctccggggaggcaggggtcctgcaggtcctggtgggtcagcccagcacctgctcccagtgggagcttcccgggataaactgagcctgttcattctgatgtccatttgtcccaatagctctactgccctccccttcccctttactcagcccagctggccacctagaagtctccctgcacagcctctagtgtccggggaccttgtgggaccagtcccacaccgctggtccctgccctcccctgctcccaggttgaggtgcgctcacctcagagcagggccaaagcacagctgggcatgccatgtctgagcggcgcagagccctccaggcctgcaggggcaaggggctggctggagtctcagagcacagaggtaggagaactggggttcaagcccaggcttcctgggtcctgcctggtcctccctcccaaggagccattctgtgtgtgactctgggtggaagtgcccagcccctgcccctacgggcgctgcagcctcccttccatgccccaggatcactctctgctggcaggattcttcccgctccccacctacccagctgatgggggttggggtgcttcctttcaggccaaggctatgaagggacagctgctgggacccacctccccctccccggccacatgccgcgtccctgccccgacccgggtctggtgctgaggatacagctcttctcagtgtctgaacaatctccaaaattgaaatgtatatttttgctaggagccccagcttcctgtgtttttaatataaatagtgtacacagactgacgaaactttaaataaatgggaattaaatatttaagagctgactggaaaa

SEQ ID NO: 288815 - DNA, 1326 bp, Artificial Sequence
  derived and/or modified sequence
atggaacaaccacaggaagaggcccctgaggtgagagaagaagaagagaaggaggaggttgccgaggcagagggtgctcctgagcttaacgggggcccccagcatgcactgccgtccagctcatataccgatctctcaagatccagctcacccccctcgctgctggaccagctccagatggggtgtgacggagcttcatgcggctctctgaatatggaatgtcgcgtgtgtggagataaagctagcggctttcattatggtgtgcatgcctgtgaaggttgcaagggattttttcgcaggacaatccggatgaaactggagtacgaaaaatgtgagcggagctgtaagattcaaaagaagaacaggaacaagtgccagtattgtcggtttcagaaatgtctcgccctgggaatgagtcataatgctattcgctttgggcggatgcccgaggccgagaagcgcaagttggtagccggtctcaccgccaacgaaggctcacaatataacccacaagtggctgacctgaaggctttttccaaacacatctacaacgcctacctgaaaaacttcaacatgacaaaaaagaaggcacgcagcattctgaccggcaaagccagccacactgctccttttgtaatccacgacatcgaaaccctgtggcaggctgaaaaggggttggtctggaaacagcttgtcaatggcctcccgccatacaaagaaatcagtgtccacgttttctacagatgccagtgtacaaccgtggagaccgttcgcgaactgacagaatttgccaagtccatcccctctttcagttcactcttccttaatgatcaggtgaccctgctcaaatacggcgtgcacgaggccatcttcgcaatgctggcctccattgtaaataaggacgggctcctagtggccaacggctcaggcttcgtgacccgcgaatttctccgttctctgcggaagcccttttctgacattattgaacctaagttcgaattcgcggtgaagttcaacgctcttgagctcgacgattctgatctagccctgtttatcgccgcaatcatactgtgtggtgacagacccgggttaatgaatgtccctagagtggaggctattcaggatacgattctccgggccttggagtttcacttgcaggccaaccacccagatgcccaatacctgtttcccaagcttcttcaaaaaatggctgatttaagacagcttgtcacagaacacgcacagatgatgcaacggatcaagaagacagagaccgagacaagccttcaccccctcctgcaggagatctacaaagatatgtactag

SEQ ID NO: 288816 - DNA, 1326 bp, Artificial Sequence
  derived and/or modified sequence
atggagcagcctcaggaagaggcgcctgaggtgcgggaggaagaggagaaagaagaagtggcagaagccgagggggctccagaacttaatggggggccgcagcatgccctgccaagttcctcctacacagatttatcacgatcttcaagtcctccctcacttttagatcagcttcagatgggttgcgacggcgcctcctgtggatcattgaatatggaatgcagagtgtgcggggataaggcctctggcttccactacggagttcacgcctgcgagggttgcaaaggcttcttcaggaggaccatccgcatgaagttagaatacgaaaaatgcgaaagaagctgcaagatccagaagaagaatagaaataagtgccagtattgccgctttcagaagtgcttggccctcgggatgtcacacaatgctattagatttgggcgcatgcccgaagccgagaagcgcaagctggtggcggggctgaccgcaaatgagggcagccagtacaatccccaggttgccgacttaaaagccttttctaaacacatatacaatgcctatcttaagaacttcaatatgaccaagaagaaagcccggagcattctaacaggaaaggcttcccacaccgcccctttcgtgatacacgatatcgaaacgctgtggcaagctgagaaaggcctcgtgtggaagcagcttgttaatgggctcccaccttataaagagatcagtgtgcacgtgttctaccgctgtcagtgcactacagtagagaccgtccgggagctcacagagtttgcaaagagtatcccaagtttttcttcactgtttctgaacgaccaggtgactctgctcaagtatggtgtccacgaagcaatttttgctatgctggccagcatcgtgaacaaggatggtttgctcgtggctaatggatcagggttcgtcacccgagagtttctgcgcagtttacggaagcctttcagtgatattatcgaacctaaatttgagtttgctgtgaagttcaacgctctggaattggatgattcggacctcgcactctttatagcagctattatcctgtgtggcgataggccaggccttatgaatgtcccaagagtcgaagcgatccaagatactatactgagagctcttgagtttcatctccaggctaatcatcctgatgcccaatatctatttccgaagttgcttcagaagatggccgatttaagacagttggtgaccgagcacgcgcagatgatgcaaaggattaagaagactgagaccgaaacatcccttcaccctctgttgcaggagatctataaagatatgtactag

SEQ ID NO: 288817 - DNA, 1326 bp, Artificial Sequence
  derived and/or modified sequence
atggagcagccccaggaggaggcccctgaggtgcgggaggaggaggagaaggaggaggtggccgaggccgagggcgcccctgagctgaatggaggcccccagcacgccctgcccagcagcagctacacagacctgagccgcagcagcagcccccccagcctgctggaccagctgcagatgggctgtgatggagccagctgtggcagcctgaacatggagtgccgggtgtgtggggacaaggccagcggcttccactacggcgtgcacgcctgtgagggctgcaagggcttcttccggaggaccatccgcatgaagctggagtatgagaagtgtgagaggagctgcaagatccagaagaagaacagaaacaagtgccagtactgccgcttccagaagtgcctggccctgggcatgagccacaatgccatccgctttggaaggatgcctgaggccgagaagaggaagctggtggccggcctgacagccaatgaaggcagccagtacaacccccaggtggccgacctgaaggccttcagcaagcacatctacaatgcctacctgaagaacttcaacatgaccaagaagaaggcccggagcatcctgaccgggaaggccagccacacagccccctttgtgattcatgacatcgagaccctgtggcaggccgagaagggcctggtgtggaagcagctggtgaatggcctgcccccctacaaggagatctctgtgcacgtgttctaccgctgccagtgcaccaccgtggagaccgtgcgggagctgacagaatttgccaagagcatccccagcttcagcagcctcttcctgaatgaccaggtgaccctgctgaagtatggagtgcatgaggccatctttgccatgctggccagcatcgtgaacaaggatggcctgctggtggccaatggaagtggctttgtgacccgggagttcctgcggagcctgaggaagcccttcagtgacatcatcgagcccaagtttgaatttgctgtgaagttcaatgccctggagctggatgacagcgacctggccctcttcatcgccgccatcatcctgtgtggggaccggcccggcctgatgaatgtgccccgggtggaggccatccaggacaccatcctgcgggccctggagttccacctgcaggccaaccacccagatgcccagtacctgttccccaagctgctgcagaagatggctgacctgcggcagctggtgacagaacatgcccagatgatgcagaggatcaagaagacagaaacagagaccagcctgcaccccctgctgcaggagatctacaaggacatgtactag

SEQ ID NO: 288818 - DNA, 1326 bp, Artificial Sequence
  derived and/or modified sequence
atggagcagccccaggaggaggcccccgaggtgcgggaggaggaggagaaggaggaggtggctgaggctgaaggggcaccagaactcaacggtggccctcaacatgcgctgcctagctcttcatatacggatctgtctaggtctagcagccccccatccctcctagaccagctgcagatgggctgtgatggggcttcatgcgggtccctgaatatggagtgcagagtatgtggtgacaaggcctctggattccactatggggtccacgcttgtgaaggctgtaaagggttcttcaggcgcaccatccgcatgaaacttgagtacgagaaatgcgagaggtcatgtaagatccaaaaaaagaataggaacaagtgtcagtactgcaggttccagaagtgcctcgccttgggaatgtctcataacgctattcggttcgggaggatgcctgaggcagagaaacgaaagctggtcgcaggacttacggccaacgaaggctcacagtataaccctcaagtcgcagatctaaaggccttttctaagcatatttataatgcctacctgaagaactttaacatgacaaagaaaaaggcgaggtctattctcacgggcaaggcaagtcacaccgcgccctttgtgattcatgatatcgaaaccctgtggcaggccgaaaaaggcctcgtctggaaacagctggtcaatggcctccccccatataaggagattagtgtccacgtattctaccggtgccagtgtactacagtggagactgtcagagaactcaccgagttcgcaaagtccatcccaagtttctccagcttatttctgaatgatcaggtgacactacttaagtacggcgttcacgaagctatctttgcaatgctggcgagcattgtcaataaagacggactcctggtggccaacggctccgggttcgtgaccagggaattcttgagatcattacgaaagcctttctcagacattattgaacctaagttcgagtttgccgtcaaatttaatgcccttgagttggatgattctgatctcgctctctttatagccgcaatcattctgtgcggggataggcccggacttatgaatgttccacgggtggaagccattcaggacactattcttcgggcattggagtttcatcttcaggcaaatcaccccgacgcccagtatttattccctaagttgctccaaaaaatggcggatctccgccagctagttaccgagcacgcgcaaatgatgcaacgaattaagaaaactgaaacagagacgtctctgcatccactcttgcaagagatctataaggacatgtattag

SEQ ID NO: 288819 - DNA, 1326 bp, Artificial Sequence
  derived and/or modified sequence
atggagcagccccaggaggaggcccccgaggtgcgggaggaggaggagaaggaagaggtagcagaagctgagggtgcccctgagctgaacggcggtccacaacacgccttaccctccagctcttacaccgatctctctcggagttcatcgcctccaagtctcctcgatcaacttcagatgggttgtgatggagcctcgtgcggttccctgaacatggagtgcagagtctgtggcgacaaagcatccggattccattatggcgtccacgcctgcgagggatgcaaaggatttttcaggcgaaccatacggatgaaactggagtatgagaagtgcgagcgctcctgtaagatccaaaaaaagaatcgtaataagtgccagtactgccggttccagaagtgtctggctttgggtatgtcccacaatgccatccgcttcggtagaatgcctgaggcagaaaaacgcaaactggtcgcaggattgacagcaaacgagggatcccagtataacccccaggtcgctgacctcaaggctttttcaaaacatatttacaacgcttacctgaaaaacttcaacatgacaaagaaaaaggcaagatctatactaacaggtaaggcctctcataccgccccatttgttatccatgatattgaaactttatggcaggccgaaaagggacttgtgtggaaacagctggttaatgggctccccccctacaaggagatctccgttcatgtgttctatcgctgtcaatgcactactgtggagacagtgcgagaactgaccgagttcgcaaagtccataccatccttcagctcactcttcttgaacgatcaggttacgctcctgaaatatggcgtgcatgaagccatcttcgccatgctggcctccatcgtgaacaaggacgggctgctggtcgccaatggatccggatttgtcacgcgggaattcttgagatcactgcgaaagcccttctccgacatcatagaacccaagtttgaattcgctgttaagttcaatgccctcgagctggacgactccgatctggcactgttcattgcggctatcattctgtgtggcgacaggccagggttgatgaatgttcctcgtgtggaggcaattcaggatactattcttagggcactggaattccatctgcaggcaaatcatcctgatgcacagtatctgtttcccaagctcttgcagaaaatggctgaccttaggcaactggttactgaacatgcccagatgatgcaaagaattaagaaaacagagacggagactagcctgcaccctttattacaggagatctacaaagatatgtattag

SEQ ID NO: 288820 - DNA, 3774 bp, Artificial Sequence
  derived and/or modified sequence
ggcaggagcgggagaattctgcggagcctgcgggacggcggcggtggcgccgtaggcagccgggacagtgttgtacagtgttttgggcatgcacgtgatactcacacagtggcttctgctcaccaacagatgaagacagatgcaccaacgagggtctggaatggtctggagtggtctggaaagcagggtcagatacccctggaaaactgaagcccgtggagcagtgatctctacaggactgcttcaaggctgatgggaaccaccctgtagaggtccatctgcgttcagacccagacgatgccagagctatgactgggcctgcaggtgtggcgccgaggggagatcagccatggagcagccacaggaggaagcccctgaggtccgggaagaggaggagaaagaggaagtggcagaggcagaaggagccccagagctcaatgggggaccacagcatgcacttccttccagcagctacacagacctctcccggagctcctcgccaccctcactgctggaccaactgcagatgggctgtgacggggcctcatgcggcagcctcaacatggagtgccgggtgtgcggggacaaggcatcgggcttccactacggtgttcatgcatgtgaggggtgcaagggcttcttccgtcgtacgatccgcatgaagctggagtacgagaagtgtgagcgcagctgcaagattcagaagaagaaccgcaacaagtgccagtactgccgcttccagaagtgcctggcactgggcatgtcacacaacgctatccgttttggtcggatgccggaggctgagaagaggaagctggtggcagggctgactgcaaacgaggggagccagtacaacccacaggtggccgacctgaaggccttctccaagcacatctacaatgcctacctgaaaaacttcaacatgaccaaaaagaaggcccgcagcatcctcaccggcaaagccagccacacggcgccctttgtgatccacgacatcgagacattgtggcaggcagagaaggggctggtgtggaagcagttggtgaatggcctgcctccctacaaggagatcagcgtgcacgtcttctaccgctgccagtgcaccacagtggagaccgtgcgggagctcactgagttcgccaagagcatccccagcttcagcagcctcttcctcaacgaccaggttacccttctcaagtatggcgtgcacgaggccatcttcgccatgctggcctctatcgtcaacaaggacgggctgctggtagccaacggcagtggctttgtcacccgtgagttcctgcgcagcctccgcaaacccttcagtgatatcattgagcctaagtttgaatttgctgtcaagttcaacgccctggaacttgatgacagtgacctggccctattcattgcggccatcattctgtgtggagaccggccaggcctcatgaacgttccacgggtggaggctatccaggacaccatcctgcgtgccctcgaattccacctgcaggccaaccaccctgatgcccagtacctcttccccaagctgctgcagaagatggctgacctgcggcaactggtcaccgagcacgcccagatgatgcagcggatcaagaagaccgaaaccgagacctcgctgcaccctctgctccaggagatctacaaggacatgtactaacggcggcacccaggcctccctgcagactccaatggggccagcactggaggggcccacccacatgacttttccattgaccagcccttgagcacccggcctggagcagcagagtcccacgatcgccctcagacacatgacacccacggcctctggctccctgtgccctctctcccgcttcctccagccagctctcttcctgtctttgttgtctccctctttctcagttcctctttcttttctaattcctgttgctctgtttcttcctttctgtaggtttctctcttcccttctcccttgccctccctttctctctccaccccccacgtctgtcctcctttcttattctgtgagatgttttgtattatttcaccagcagcatagaacaggacctctgcttttgcacaccttttccccaggagcagaagagagtggggcctgccctctgccccatcattgcacctgcaggcttaggtcctcacttctgtctcctgtcttcagagcaaaagacttgagccatccaaagaaacactaagctctctgggcctgggttccagggaaggctaagcatggcctggactgactgcagccccctatagtcatggggtccctgctgcaaaggacagtgggcaggaggccccaggctgagagccagatgcctccccaagactgtcattgcccctccgatgctgaggccacccactgacccaactgatcctgctccagcagcacacctcagccccactgacacccagtgtccttccatcttcacactggtttgccaggccaatgttgctgatggccccctgcactggccgctggacggcactctcccagcttggaagtaggcagggttccctccaggtgggcccccacctcactgaagaggagcaagtctcaagagaaggaggggggattggtggttggaggaagcagcacacccaattctgcccctaggactcggggtctgagtcctggggtcaggccagggagagctcggggcaggccttccgccagcactcccactgcccccctgcccagtagcagccgcccacattgtgtcagcatccagggccagggcctggcctcacatccccctgctcctttctctagctggctccacgggagttcaggccccactccccctgaagctgcccctccagcacacacacataagcactgaaatcactttacctgcaggctccatgcacctcccttccctccctgaggcaggtgagaacccagagagaggggcctgcaggtgagcaggcagggctgggccaggtctccggggaggcaggggtcctgcaggtcctggtgggtcagcccagcacctgctcccagtgggagcttcccgggataaactgagcctgttcattctgatgtccatttgtcccaatagctctactgccctccccttcccctttactcagcccagctggccacctagaagtctccctgcacagcctctagtgtccggggaccttgtgggaccagtcccacaccgctggtccctgccctcccctgctcccaggttgaggtgcgctcacctcagagcagggccaaagcacagctgggcatgccatgtctgagcggcgcagagccctccaggcctgcaggggcaaggggctggctggagtctcagagcacagaggtaggagaactggggttcaagcccaggcttcctgggtcctgcctggtcctccctcccaaggagccattctgtgtgtgactctgggtggaagtgcccagcccctgcccctacgggcgctgcagcctcccttccatgccccaggatcactctctgctggcaggattcttcccgctccccacctacccagctgatgggggttggggtgcttcctttcaggccaaggctatgaagggacagctgctgggacccacctccccctccccggccacatgccgcgtccctgccccgacccgggtctggtgctgaggatacagctcttctcagtgtctgaacaatctccaaaattgaaatgtatatttttgctaggagccccagcttcctgtgtttttaatataaatagtgtacacagactgacgaaactttaaataaatgggaattaaatatttaa

SEQ ID NO: 288821 - DNA, 3747 bp, Artificial Sequence
  derived and/or modified sequence
gcggagcgtgtgacgctgcggccgccgcggacctggggattaatgggaaaagttttggcaggagcgggagaattctgcggagcctgcgggacggcggcggtggcgccgtaggcagccgggacagtgttgtacagtgttttgggcatgcacgtgatactcacacagtggcttctgctcaccaacagatgaagacagatgcaccaacgaggctgatgggaaccaccctgtagaggtccatctgcgttcagacccagacgatgccagagctatgactgggcctgcaggtgtggcgccgaggggagatcagccatggagcagccacaggaggaagcccctgaggtccgggaagaggaggagaaagaggaagtggcagaggcagaaggagccccagagctcaatgggggaccacagcatgcacttccttccagcagctacacagacctctcccggagctcctcgccaccctcactgctggaccaactgcagatgggctgtgacggggcctcatgcggcagcctcaacatggagtgccgggtgtgcggggacaaggcatcgggcttccactacggtgttcatgcatgtgaggggtgcaagggcttcttccgtcgtacgatccgcatgaagctggagtacgagaagtgtgagcgcagctgcaagattcagaagaagaaccgcaacaagtgccagtactgccgcttccagaagtgcctggcactgggcatgtcacacaacgctatccgttttggtcggatgccggaggctgagaagaggaagctggtggcagggctgactgcaaacgaggggagccagtacaacccacaggtggccgacctgaaggccttctccaagcacatctacaatgcctacctgaaaaacttcaacatgaccaaaaagaaggcccgcagcatcctcaccggcaaagccagccacacggcgccctttgtgatccacgacatcgagacattgtggcaggcagagaaggggctggtgtggaagcagttggtgaatggcctgcctccctacaaggagatcagcgtgcacgtcttctaccgctgccagtgcaccacagtggagaccgtgcgggagctcactgagttcgccaagagcatccccagcttcagcagcctcttcctcaacgaccaggttacccttctcaagtatggcgtgcacgaggccatcttcgccatgctggcctctatcgtcaacaaggacgggctgctggtagccaacggcagtggctttgtcacccgtgagttcctgcgcagcctccgcaaacccttcagtgatatcattgagcctaagtttgaatttgctgtcaagttcaacgccctggaacttgatgacagtgacctggccctattcattgcggccatcattctgtgtggagaccggccaggcctcatgaacgttccacgggtggaggctatccaggacaccatcctgcgtgccctcgaattccacctgcaggccaaccaccctgatgcccagtacctcttccccaagctgctgcagaagatggctgacctgcggcaactggtcaccgagcacgcccagatgatgcagcggatcaagaagaccgaaaccgagacctcgctgcaccctctgctccaggagatctacaaggacatgtactaacggcggcacccaggcctccctgcagactccaatggggccagcactggaggggcccacccacatgacttttccattgaccagcccttgagcacccggcctggagcagcagagtcccacgatcgccctcagacacatgacacccacggcctctggctccctgtgccctctctcccgcttcctccagccagctctcttcctgtctttgttgtctccctctttctcagttcctctttcttttctaattcctgttgctctgtttcttcctttctgtaggtttctctcttcccttctcccttgccctccctttctctctccaccccccacgtctgtcctcctttcttattctgtgagatgttttgtattatttcaccagcagcatagaacaggacctctgcttttgcacaccttttccccaggagcagaagagagtggggcctgccctctgccccatcattgcacctgcaggcttaggtcctcacttctgtctcctgtcttcagagcaaaagacttgagccatccaaagaaacactaagctctctgggcctgggttccagggaaggctaagcatggcctggactgactgcagccccctatagtcatggggtccctgctgcaaaggacagtgggcaggaggccccaggctgagagccagatgcctccccaagactgtcattgcccctccgatgctgaggccacccactgacccaactgatcctgctccagcagcacacctcagccccactgacacccagtgtccttccatcttcacactggtttgccaggccaatgttgctgatggccccctgcactggccgctggacggcactctcccagcttggaagtaggcagggttccctccaggtgggcccccacctcactgaagaggagcaagtctcaagagaaggaggggggattggtggttggaggaagcagcacacccaattctgcccctaggactcggggtctgagtcctggggtcaggccagggagagctcggggcaggccttccgccagcactcccactgcccccctgcccagtagcagccgcccacattgtgtcagcatccagggccagggcctggcctcacatccccctgctcctttctctagctggctccacgggagttcaggccccactccccctgaagctgcccctccagcacacacacataagcactgaaatcactttacctgcaggctccatgcacctcccttccctccctgaggcaggtgagaacccagagagaggggcctgcaggtgagcaggcagggctgggccaggtctccggggaggcaggggtcctgcaggtcctggtgggtcagcccagcacctgctcccagtgggagcttcccgggataaactgagcctgttcattctgatgtccatttgtcccaatagctctactgccctccccttcccctttactcagcccagctggccacctagaagtctccctgcacagcctctagtgtccggggaccttgtgggaccagtcccacaccgctggtccctgccctcccctgctcccaggttgaggtgcgctcacctcagagcagggccaaagcacagctgggcatgccatgtctgagcggcgcagagccctccaggcctgcaggggcaaggggctggctggagtctcagagcacagaggtaggagaactggggttcaagcccaggcttcctgggtcctgcctggtcctccctcccaaggagccattctgtgtgtgactctgggtggaagtgcccagcccctgcccctacgggcgctgcagcctcccttccatgccccaggatcactctctgctggcaggattcttcccgctccccacctacccagctgatgggggttggggtgcttcctttcaggccaaggctatgaagggacagctgctgggacccacctccccctccccggccacatgccgcgtccctgccccgacccgggtctggtgctgaggatacagctcttctcagtgtctgaacaatctccaaaattgaaatgtatatttttgctaggagccccagcttcctgtgtttttaatataaatagtgtacacagactgacgaaactttaaataaatgggaattaaatatttaagagctgactggaa

SEQ ID NO: 288822 - DNA, 1326 bp, Artificial Sequence
  derived and/or modified sequence
atggagcagccacaggaagaagcccctgaggtgcgtgaagaggaagagaaggaagaggtagctgaagcagagggagcccctgagctgaatggcggaccgcagcatgctcttcctagttcctcatataccgatttatctcggtcatcatcgcctccttctctcctggaccagttacagatgggctgcgatggggctagctgcgggtccttgaacatggagtgtcgggtctgtggagacaaggcatcagggtttcactacggagtccacgcctgcgagggctgcaaaggcttcttcagacggaccattcggatgaagcttgagtacgaaaaatgtgagcgcagctgcaagatccagaaaaaaaaccgcaataagtgccagtactgccggttccaaaagtgcctggccctcgggatgtcccataacgcaattcgattcggacgaatgcctgaagcggaaaagcgcaaactcgtagccggtctaaccgccaacgaggggagccaatataatcctcaggtggccgatctgaaggctttcagcaaacacatctataatgcttatctgaaaaactttaacatgacgaagaagaaagccaggtcgatcttgacagggaaggccagccataccgccccattcgtaatccacgacatcgaaaccctgtggcaggctgagaagggcctggtctggaagcagctagtgaacggactgccgccatacaaagagatctctgtgcacgtgttctaccgatgtcagtgtaccacggtagagaccgttcgcgagttaacagagtttgcgaagagcattccttcttttagtagcctgtttttgaacgatcaggtgaccctgttgaagtatggcgtgcatgaagccatctttgccatgttggccagtatagttaacaaggatggacttctggtggctaatggttccggcttcgtcaccagggaattcctcagaagtttgcgcaaaccattcagcgatataattgagccaaagttcgaattcgccgttaagttcaatgctctggagctagatgactctgacctcgccctattcatcgcagctattatcctttgcggcgataggccaggcttgatgaacgtgcccagagtggaagcaattcaggacacaatactgagagctctagaatttcacttgcaggctaatcacccagacgcccaatatctgtttcccaagttgcttcagaagatggccgatcttaggcaacttgtcacagagcatgctcagatgatgcagaggattaagaagacagaaacagaaaccagcctgcaccccttactgcaggagatctacaaagatatgtactag

SEQ ID NO: 288823 - DNA, 1326 bp, Artificial Sequence
  derived and/or modified sequence
atggagcaaccccaggaagaagctccagaagttagggaagaagaggaaaaagaagaagtcgcagaggctgagggggctcctgagcttaatggtggccctcaacatgcgctgccatcgtcctcgtataccgacctgtcccgctcttctagccccccttctctcttggaccagttgcagatgggctgcgacggcgcttcttgcggctcactgaacatggagtgtcgcgtttgtggcgataaggcaagcggttttcactacggagttcatgcatgtgaagggtgtaaaggtttcttccgcagaacgataaggatgaagttagaatacgaaaagtgcgaaaggtcctgtaagatacaaaaaaagaatcgcaacaaatgccaatactgtaggttccagaaatgcttagcactgggtatgtctcataacgccatccggtttggcaggatgccagaagccgagaagcgcaagctagtggccggtctgactgcaaatgagggatcgcagtacaacccacaagtggcagacttaaaagctttttcaaaacatatctacaacgcctacctcaaaaattttaatatgaccaaaaagaaagcaagatcaattctgaccggcaaagcatcccatacagccccttttgttatccacgacattgagacattgtggcaggcagagaaaggccttgtgtggaagcagcttgtgaatggcctaccgccatacaaggaaatcagcgtgcacgtgttttacagatgtcagtgcacgaccgtggaaaccgttagggagcttaccgagtttgctaaaagcatcccaagcttctccagtctgttcctcaatgaccaagtgacactgcttaagtacggcgtacacgaggccatcttcgctatgctggcatccattgtgaataaagatggacttttggtagcaaacggatcgggcttcgtcacgagggagtttctccggagcttacgaaaaccttttagcgacattattgagcctaagtttgaattcgcagtaaagtttaatgcattggaactcgatgactcagacctggccctctttatcgccgctatcatcctctgtggcgacaggccagggctaatgaacgtccccagagtggaggctattcaagatacgattttgcgcgctctggaattccacctccaggccaaccacccagacgcccagtacctttttccaaagctgttacagaaaatggcagacctcaggcagctcgtaactgagcatgcccagatgatgcaaaggatcaagaaaacagagactgagacaagccttcaccctctgctacaggaaatatacaaagacatgtactag

SEQ ID NO: 288824 - DNA, 1326 bp, Artificial Sequence
  derived and/or modified sequence
atggagcagccccaggaggaggcccccgaggtgagagaggaggaggagaaggaggaggtggccgaggccgagggcgcccccgagctgaacggcggcccccagcacgccctgcccagcagcagctacaccgacctgagcagaagcagcagcccccccagcctgctggaccagctgcagatgggctgcgacggcgccagctgcggcagcctgaacatggagtgcagagtgtgcggcgacaaggccagcggcttccactacggcgtgcacgcctgcgagggctgcaagggcttcttcagaagaaccatcagaatgaagctggagtacgagaagtgcgagagaagctgcaagatccagaagaagaacagaaacaagtgccagtactgcagattccagaagtgcctggccctgggcatgagccacaacgccatcagattcggcagaatgcccgaggccgagaagagaaagctggtggccggcctgaccgccaacgagggcagccagtacaacccccaggtggccgacctgaaggccttcagcaagcacatctacaacgcctacctgaagaacttcaacatgaccaagaagaaggccagaagcatcctgaccggcaaggccagccacaccgcccccttcgtgatccacgacatcgagaccctgtggcaggccgagaagggcctggtgtggaagcagctggtgaacggcctgcccccctacaaggagatcagcgtgcacgtgttctacagatgccagtgcaccaccgtggagaccgtgagagagctgaccgagttcgccaagagcatccccagcttcagcagcctgttcctgaacgaccaggtgaccctgctgaagtacggcgtgcacgaggccatcttcgccatgctggccagcatcgtgaacaaggacggcctgctggtggccaacggcagcggcttcgtgaccagagagttcctgagaagcctgagaaagcccttcagcgacatcatcgagcccaagttcgagttcgccgtgaagttcaacgccctggagctggacgacagcgacctggccctgttcatcgccgccatcatcctgtgcggcgacagacccggcctgatgaacgtgcccagagtggaggccatccaggacaccatcctgagagccctggagttccacctgcaggccaaccaccccgacgcccagtacctgttccccaagctgctgcagaagatggccgacctgagacagctggtgaccgagcacgcccagatgatgcagagaatcaagaagaccgagaccgagaccagcctgcaccccctgctgcaggagatctacaaggacatgtactag

SEQ ID NO: 288825 - protein, 1200 aa, Artificial Sequence
  derived and/or modified sequence
MGDQQLYKTNHVAHGSENLFYQQPPLGVHSGLNHNYGNAVTGGGMDAPQASPISPHFPQDTRDGLGLPVGSKNLGQMDTSRQGGWGSHAGPGNHVQLRGNLANSNMMWGAPAQAEPTDGYQYTYSQASEIRTQKLTSGVLHKLDSFTQVFANQNLRIQVNNMAQVLHTQSAVMDGAPDSALRQLLSQKPMEPPAPAIPSRYQQVPQQPHPGFTGGLSKPALQVGQHPTQGHLYYDYQQPLAQVPVQGGQPLQAPQMLSQHMQQMQQHQYYPPQQQQQAGQQRISMQEIQTQPQQIRPSQPQPPPQQQQPQQLQLQQRQGSMQIPQYYQPQPMMQHLQEQQQQQMHLQPPSYHRDPHQYTPEQAHTVQLIPLGSMSQYYYQEPQQPYSHPLYQQSHLSQHQQREDSQLKTYSSDRQAQAMLSSHGDLGPPDTGMGDPASSDLTRVSSTLPHRPLLSPSGIHLNNMGPQHQQLSPSAMWPQMHLPDGRAQPGSPESSGQPKGAFGEQFDAKNKLTCSICLKEFKNLPALNGHMRSHGGMRASPNLKQEEGEKVLPPQPQPPLPPPPPPPPPPQLPPEAESLTPMVMPVSVPVKLLPPKPSSQGFTNSTVAAPSARDKPASSMSDDEMPVLEIPRKHQPSVPKAEEPLKTVQEKKKFRHRPEPLFIPPPPSYNPNPAASYSGATLYQSQLRSPRVLGDHLLLDPTHELPPYTPPPMLSPVRQGSGLFSNVLISGHGPGAHPQLPLTPLTPTPRVLLCRSNSIDGSNVTVTPGPGEQTVDVEPRINIGLRFQAEIPELQDISALAQDTHKATLVWKPWPELENHDLQQRVENLLNLCCSSALPGGGTNSEFALHSLFEAKGDVMVALEMLLLRKPVRLKCHPLANYHYAGSDKWTSLERKLFNKALATYSKDFIFVQKMVKSKTVAQCVEYYYTWKKIMRLGRKHRTRLAEIIDDCVTSEEEEELEEEEEEDPEEDRKSTKEEESEVPKSPEPPPVPVLAPTEGPPLQALGQPSGSFICEMPNCGAVFSSRQALNGHARIHGGTNQVTKARGAIPSGKQKPGGTQSGYCSVKSSPSHSTTSGETDPTTIFPCKECGKVFFKIKSRNAHMKTHRQQEEQQRQKAQKAAFAAEMAATIERTTGPVGAPGLLPLDQLSLIKPIKDVDILDDDVVQQLGGVMEEAEVVDTDLLLDDQDSVLLQGDAEL

SEQ ID NO: 288826 - DNA, 3603 bp, Artificial Sequence
  derived and/or modified sequence
atgggagaccaacagttgtacaagaccaatcacgttgctcatgggagcgagaacttgttttaccagcaaccacccttgggtgtacactccggtctgaaccataactatggaaatgctgtcacaggcggaggtatggatgccccacaagccagccctatctcaccgcatttcccacaagatactagggacggcctcggcctacccgtgggaagtaagaaccttggacaaatggacacctctcggcagggggggtggggctcacatgccggcccgggcaaccacgtgcagctgcgtggcaatctggcgaactcaaatatgatgtggggcgcccctgcccaggccgagcctacggacggttaccagtatacatactcacaggcctcagagatccggacccagaaactcacctccggtgtcctgcacaagttggattcctttacgcaggtgtttgcaaaccaaaacttgcgtatccaggtcaacaacatggctcaggtgttgcatacccagtccgcggttatggatggggcaccggactccgcccttagacagctactctcacaaaagcccatggaacctcctgcacctgccattccgagccggtatcagcaggttccccagcaaccccaccccggatttactgggggtctctccaagccggcgctgcaggtgggccagcaccctactcagggtcacctatattacgattatcagcagcctctggctcaggtgcctgttcaaggaggccagcctcttcaggctcctcagatgctcagccagcatatgcaacagatgcagcagcaccagtactaccccccccagcaacagcagcaggccggccagcagaggatcagcatgcaggagattcagactcagcctcagcagattcggccttctcagccccaacctccgcctcagcagcagcagcctcagcaactccaacttcaacagcggcagggcagcatgcagattccacagtactatcagcctcagcctatgatgcaacatctgcaagagcagcagcagcagcaaatgcatctgcagcccccatcctatcatcgagacccacaccaatacacccctgagcaggcacacaccgtgcaattgattccgctgggatcgatgtctcagtattattaccaagagccccagcagccctattcacacccactataccagcagagccacttgtcacagcaccaacaacgggaggactcccagctcaaaacatactcttccgataggcaggcccaggctatgctgtcatctcacggagatctaggaccacccgataccgggatgggagaccccgcatcaagcgaccttactcgtgtcagttcaactcttcctcacagacctctcctctcccccagcggtatccacttaaataacatgggtcctcagcaccagcagttatccccaagcgcaatgtggccccagatgcaccttccggacggtagagcacagcctggctctccagagagctctggccagccaaaaggagctttcggcgagcagttcgatgctaagaacaagcttacatgttctatttgcctgaaagagttcaaaaatctgcctgcattaaacggccatatgcgctctcatggcgggatgcgggcaagcccaaacctcaagcaggaagaaggagaaaaggtgctgcccccccagccacagccacctctgccccccccgccgccaccaccaccccctccccaacttccacccgaagccgagtcgcttacacccatggtcatgcccgtgagtgtgcccgtgaaactcttgccaccaaagccttctagccagggatttactaattctacagtagccgcacccagtgcgcgggacaaacccgcctcctcaatgtcagatgacgagatgccagtcctggaaatccccaggaagcaccagcccagcgtaccgaaagccgaggagccactcaagaccgtccaagagaaaaaaaaatttaggcatagaccggagcctctgttcattcctccgcctccctcttacaaccccaatcccgcggctagttacagtggtgcaaccctctatcagagtcaactgagaagccccagagtgctcggcgaccatctgttactggacccaactcacgagttgcccccctacactccccccccgatgctcagcccggtgagacaggggagtgggttgttcagtaacgtactcatttccgggcacggccccggtgctcacccccaattgccactgactccccttacacccacaccaagggtgttgctttgtcgatctaatagtatcgacggcagcaacgtcaccgtcaccccaggccccggggaacagacagttgacgtggagcccaggattaacatcggcttgaggtttcaggccgagattccagaactccaggacatctccgctctagcgcaggatacacacaaagctactctggtctggaaaccttggccagagctggagaaccatgacctccagcaacgcgtggagaatctcctcaatttatgttgctcatcagctttgcctgggggaggtacaaactctgagtttgccctgcactcccttttcgaagcaaaaggtgacgtgatggtggctcttgagatgctactgcttcgaaagcctgttcgacttaagtgccaccctcttgcgaactatcattatgccgggagtgacaagtggaccagtctcgagcgcaaactgtttaataaggcgttggctacctattcaaaagacttcattttcgtgcagaaaatggtaaaaagtaagactgtggcacagtgcgttgaatattattacacctggaagaaaattatgagactcggccgaaaacacagaacacggctggcagaaatcatcgatgactgtgtaacaagtgaggaagaggaggagctggaggaggaagaagaagaagacccagaagaagataggaaatctacaaaagaggaggaaagcgaagtgcccaagagcccagagccacctccagtcccggtgctggctccgacagaagggccccccctgcaggccctgggtcagccatccggctcttttatttgcgagatgcccaactgcggagcggttttctcctcgcgccaggccttaaatggccacgcccgtatccatggggggacgaatcaagtaaccaaagctcggggtgccattcccagcgggaaacaaaaacctggcggcactcaatccggctattgctctgtcaagagctcaccctcgcacagtacaacgtccggtgagacagacccaaccactatctttccgtgcaaggagtgcggcaaggtgttctttaaaatcaaaagccgcaacgcacatatgaagacccaccgtcagcaggaggaacagcaaaggcagaaagcgcaaaaagctgccttcgcagccgaaatggctgcgacaatagaacgtaccactgggcctgtgggagcgcccgggctgctgcccttagaccagctgagccttataaaaccaatcaaggacgtggacattctggacgatgacgtagtccagcagctgggtggcgtgatggaggaggcagaagtcgttgatactgacctgcttctggacgatcaggactccgtgctgttacagggcgatgcggagttgtag

SEQ ID NO: 288827 - DNA, 3603 bp, Artificial Sequence
  derived and/or modified sequence
atgggagaccagcagctgtacaagaccaaccacgtggcccacggctctgaaaatctcttctaccagcagccccccctgggcgtgcacagcggcctgaaccacaactatggaaatgctgtgactggaggcggcatggatgccccccaggccagccccatcagcccccacttcccccaggacaccagagatggcctgggcctgcctgtgggcagcaagaacctgggccagatggacaccagccggcagggcggctggggcagccatgctggccctggcaaccacgtgcagctgcggggcaacctggccaacagcaacatgatgtggggcgccccagcccaggccgagcccacagatggctaccagtacacctacagccaggccagcgagatccgcacccagaagctgaccagcggcgtgctgcacaagctggacagcttcacccaggtgtttgccaaccagaacctgcgcatccaggtgaacaacatggcccaggtgctgcacacccagagcgctgtgatggatggagccccagattctgccctgcggcagctgctgagccagaagcccatggagcccccagccccagccatccccagccgctaccagcaggtgccccagcagccccaccctggcttcaccggcggcctgagcaagccagccctgcaggtgggccagcaccccacccagggccacctgtactatgactaccagcagcccctggcccaggtgcctgtgcagggcggccagcccctgcaggccccccagatgctgagccagcacatgcagcagatgcagcagcaccagtactacccaccccagcagcagcagcaggccggccagcagaggatctccatgcaggagatccagacccagccccagcagatccggcccagccagccccagcccccaccccagcagcagcagccccagcagctgcagctgcagcagaggcagggctccatgcagatcccccagtactaccagccccagcccatgatgcagcacctgcaggagcagcagcagcagcagatgcacctgcagccccccagctaccaccgggacccccaccagtacaccccagagcaggcccacacagtgcagctgatccccctgggctccatgagccagtactactaccaggagccccagcagccctacagccaccccctgtaccagcagagccacctgagccagcaccagcagcgggaggacagccagctgaagacctacagcagtgaccggcaggcccaggccatgctgagcagccatggagacctgggccccccagacaccggcatgggagaccctgccagcagtgacctgaccagggtgagcagcaccctgccccaccggcccctgctgagccccagcggcatccacctgaacaacatgggcccccagcaccagcagctgagccccagcgccatgtggccccagatgcacctgcctgatggccgggcccagcccggcagccctgagagcagcggccagcccaagggggccttcggggagcagtttgatgccaagaacaagctgacctgcagcatctgcctgaaggagttcaagaacctgcctgccctgaatggccacatgaggagccacggcggcatgagggccagccccaacctgaagcaggaggagggggagaaggtgctgcccccccagccccagccccccctgcccccacctcctcctcctcctcctccaccccagctgcccccagaggccgagagcctgacccccatggtgatgcctgtgtctgtgcctgtgaagctgctgccccccaagcccagcagccagggcttcaccaacagcacagtggccgcccccagcgcccgggacaagccagccagctccatgtctgatgatgagatgcctgtgctggagatccccaggaagcaccagcccagcgtgcccaaggccgaggagcccctgaagacagtgcaggagaagaagaagttccgccacaggcctgagcccctcttcatccccccaccacccagctacaaccccaacccagctgccagctacagcggggccaccctgtaccagagccagctgcggagcccccgggtgctgggggaccacctgctgctggaccccacccatgagctgcccccctacaccccaccacccatgctgagccctgtgcggcagggcagcggcctcttcagcaatgtgctgatcagcggccacggccctggggcccacccccagctgcccctgacccccctgacccccaccccccgggtgctgctgtgccgcagcaacagcattgatggcagcaatgtgacagtgaccccaggccctggagagcagacagtggatgtggagccccgcatcaacatcggcctgcgcttccaggccgagatccctgagctgcaggacatcagcgccctggcccaggacacccacaaggccaccctggtgtggaagccctggccagagctggagaaccacgacctgcagcagagggtggagaacctgctgaacctgtgctgcagcagcgccctgcccggcggcggcaccaacagcgagtttgccctgcacagcctgtttgaggccaagggagatgtgatggtggccctggagatgctgctgctgaggaagcctgtgcggctgaagtgccaccccctggccaactaccactacgccggcagtgacaagtggaccagcctggagaggaagctgttcaacaaggccctggccacctacagcaaggacttcatctttgtgcagaagatggtgaagagcaagacagtggcccagtgtgtggagtactactacacctggaagaagatcatgaggctgggcaggaagcacaggacccggctggccgagatcattgatgactgtgtgaccagcgaggaggaggaggagctggaggaggaggaggaggaggaccctgaggaggacaggaagagcaccaaggaggaggagagcgaggtgcccaagagccctgagcccccacctgtgcctgtgctggcccccacagagggcccccccctgcaggccctgggccagcccagcggcagcttcatctgtgagatgcccaactgtggggctgtgttcagcagccggcaggccctgaatggacatgcccgcatccatggaggcaccaaccaggtgaccaaggcccggggggccatccccagcggcaagcagaagccaggcggcacccagagcggctactgcagcgtgaagagcagccccagccacagcaccaccagcggggagacagaccccaccaccatcttcccctgcaaggaatgtgggaaggtgttcttcaagatcaagagcagaaatgcccacatgaagacccaccggcagcaggaggagcagcagaggcagaaggcccagaaggccgcctttgctgctgagatggccgccaccatcgagaggaccaccggccctgtgggcgcccctggcctgctgcccctggaccagctgagcctcatcaagcccatcaaggatgtggacatcctggatgatgatgtggtgcagcagctgggcggcgtgatggaggaggccgaggtggtggacacagacctgctgctggatgaccaggacagcgtgctgctgcagggagatgctgagctgtag

SEQ ID NO: 288828 - DNA, 3603 bp, Artificial Sequence
  derived and/or modified sequence
atgggcgaccagcagctgtacaagaccaaccacgtggcccacggctccgagaacctgttttaccaacaaccaccactaggggtgcactctgggctaaaccacaactacggtaacgccgttaccgggggaggaatggatgccccacaggcctcccccatttctcctcacttcccgcaagacacaagagatggcctaggactgcccgtcggctcaaagaatttgggccaaatggacacctcacggcagggtggatggggatctcatgcgggacctgggaaccacgtgcagctgaggggcaatctggcaaactccaacatgatgtggggggcacccgctcaggccgaacccacagacggttatcaatatacctattctcaggcctccgagattcggactcagaagctaacaagtggagtgctccataagctcgactcctttacccaggtctttgccaaccaaaaccttagaatccaggtcaataacatggcgcaagttctgcacacacaatctgccgttatggatggagcccctgatagcgcactgcgccagctcctaagtcaaaagccaatggagccacctgctcctgctattcccagtagataccagcaggttcctcagcagccacaccccggattcaccggaggactcagcaaacctgctctgcaagtgggccagcaccccacccaggggcatttatattacgattaccaacagccactggctcaggtacctgtccagggtgggcagccattacaggctccacaaatgctgtcacaacacatgcaacagatgcagcaacatcagtactatccccctcagcagcaacagcaggctggtcagcagaggatttcaatgcaagaaattcaaacccagcctcaacagatcaggccctcacagccacagcctcctccacaacaacagcaaccgcagcagttgcagttacagcagagacagggcagcatgcagatcccacagtactaccaaccacagcccatgatgcagcatcttcaggagcagcagcaacaacagatgcatctgcagccaccctcctaccatagggatccacatcagtatactcccgagcaggcacataccgtccagttgatccccctggggagcatgtcgcagtactactatcaggagccgcagcagccttattcccatcctctgtatcagcaatcgcacctctcccagcaccagcagcgagaagacagtcaattgaaaacttacagctctgacaggcaggcccaggcaatgctgagcagccatggtgacttagggccacccgacacaggcatgggagaccctgcctcctccgatttgactagggtctctagtactctccctcatcggccactcctttctccttcaggaattcacctgaacaatatgggaccccaacaccagcagctctccccaagcgctatgtggccccagatgcaccttccggacggacgggcacagcctgggtcacccgagagcagcggtcagcctaaaggagctttcggcgagcaatttgacgccaagaataaactgacatgctctatttgcctgaaggagttcaaaaatctacccgccctgaacggtcatatgcggagccacggcgggatgcgtgccagccctaatttgaaacaggaggagggtgagaaggtcttgccaccacagcctcaacctccattgcctcctccccccccgccacctccccccccacagctgcctcccgaagctgaaagcctaacccctatggttatgcccgtgagcgtacccgtgaaactgctgcctccaaaacctagctcccagggatttacaaattccaccgtggcggccccgtcagcccgagataagcccgcttccagcatgtctgacgatgagatgccggtccttgagattcctcggaaacaccagcccagcgttcctaaagcggaggaacctctaaagacagtgcaagaaaagaagaagtttaggcaccgaccggagcccctattcatacctccacctccctcgtataacccaaatccagccgcttcctattctggtgccacactctatcagtctcagctccgttccccaagagtactgggggaccacttgctcctcgatcctactcatgaacttccgccctatactccacccccaatgctgtctcctgtgcggcaagggagtggactattctccaatgttctgatatcaggccacggccctggggcacaccctcaactgcctctaacacctctaacccccacaccgcgggtactgttatgtaggtctaattctatcgatggctcgaatgtgaccgtcacaccaggtcctggagagcagactgtggacgtggaaccccggattaacattggactcagattccaggccgagatccccgagctgcaggacatatctgccctcgctcaagacactcacaaagctaccctggtgtggaaaccctggccggaattggaaaatcacgatctgcagcaacgcgtagaaaatctattaaatctctgttgttctagtgcccttcctggtggcgggacaaatagcgagttcgctttgcatagccttttcgaggcaaagggcgacgtgatggtggctctggaaatgttgcttctgcggaagcccgtgaggctgaagtgtcatcccctggccaattaccactacgccggcagtgataaatggacctctcttgagcggaaactgttcaacaaggccctcgccacctactccaaggacttcattttcgtgcaaaaaatggtgaagagtaaaaccgtggcgcagtgcgtggagtactattatacttggaagaaaattatgcgtctgggccggaagcatcgaactcggcttgctgagatcatcgatgattgtgttactagcgaggaggaggaagagcttgaggaggaagaagaagaagacccagaagaggaccgtaaaagtacgaaggaggaagaaagcgaagtgcctaaatcgccagagccccctccagtccctgttctagctcccacggagggtccccctctacaagccctgggccaacctagcggaagcttcatttgtgaaatgccaaattgtggagcagtttttagctccagacaggctcttaacggacacgctagaattcatggggggacaaaccaggttacgaaggcaagaggagcaatcccttccggcaagcagaaacccggcgggacccagtccggatattgcagcgttaagagcagcccctcacattccactacctcaggcgaaaccgaccccaccacgatctttccctgcaaagaatgtgggaaggtcttcttcaaaataaagtccagaaacgcccatatgaaaacacatagacagcaagaggagcagcagcggcaaaaagcacagaaagcagcatttgctgcagagatggcggccacgatcgaaaggacaactgggcctgtgggagcaccagggcttctgcctctcgaccaactaagtcttatcaaaccaattaaggatgttgacatcctggacgatgatgttgtgcaacagttgggaggagtgatggaagaggcagaggtagttgacacggacctgctgctggatgaccaggacagcgtgttattgcaaggagacgctgagctatag

SEQ ID NO: 288829 - DNA, 3603 bp, Artificial Sequence
  derived and/or modified sequence
atgggtgatcagcagctttataagactaatcacgtggcccacgggtcagaaaatcttttctatcagcagccacccctaggcgtgcacagcggacttaatcacaactacgggaatgcagtcaccggtggaggaatggatgcaccgcaggctagccccatttctccacatttccctcaggatacacgagatggcctgggactccctgtgggctcgaaaaatctgggccagatggacaccagtagacagggcggatggggaagtcatgccggacccggtaaccatgtgcagctacggggtaatctagcgaactccaatatgatgtggggggctccagcacaggcagagccaactgatggctaccaatacacctattcccaagcctcggaaatccggacccagaagttgacctctggggttcttcacaaactggactctttcactcaggtatttgccaatcagaatctacgcatacaggtgaacaacatggcccaagtcttacatacacaaagcgctgtcatggacggcgctccggacagtgctttacgtcagttactgagccagaaaccaatggaaccaccggcacccgcaatcccaagtcgctatcagcaggtgccacaacaacctcaccccggattcaccgggggactgtctaaaccagctctgcaggtcggccagcatcctacccaagggcatctctactatgactatcagcagcctctggcccaagtgcctgtgcaggggggtcaacccttacaggctccccagatgctgagccagcacatgcagcagatgcagcagcaccagtactatccaccccagcagcagcagcaggctggtcagcagaggatatctatgcaggaaatacaaacccaaccacagcaaatcagacccagccagccgcaaccacctcctcagcaacaacagcctcaacaacttcagctgcagcaaaggcaggggagcatgcagataccccaatattaccagccacaaccaatgatgcagcatctgcaagaacaacagcagcagcaaatgcatctgcagcctccgagctatcatcgggatccccaccagtataccccagagcaggcccatacagtgcaactgatccctttgggatctatgtcccagtattattaccaagagccacagcaaccttacagtcatcccctgtatcagcaatcccatctgagtcagcatcaacagcgagaggacagccagctaaagacttacagttcggacagacaggctcaggcgatgctttcctcacacggagatctcggtccacccgatacaggaatgggggatcctgcatcgtcagacctgacaagggtgagcagtactctcccacacaggccactgctgtcgccaagtggtattcatttaaacaacatgggacctcagcaccaacagctttccccttctgccatgtggcctcaaatgcatctgccagatggtcgggctcagcctgggagccccgaatccagcggacagcccaaaggggcatttggcgaacagttcgacgccaaaaacaagctaacctgttcgatttgcctgaaagaattcaagaaccttcctgccctgaatggccatatgaggtcacatggcggtatgagagcatcccccaaccttaagcaagaagaaggtgagaaggtcctgcctccacagccccagcctccactgcctccccctcctcccccacctcctcccccacagctgcctccagaagcggaaagcctcactccaatggtcatgcctgtgagcgtccctgtgaagcttctccctccaaaacccagttctcaagggtttacaaattccaccgtggccgcaccaagcgcccgtgataaacccgctagcagtatgagcgatgatgaaatgcccgtcttggagattccacggaagcatcagcccagcgttccaaaggctgaagagccattgaaaaccgtgcaggagaaaaaaaaatttcgccatcgacctgaacctttattcatcccacccccaccctcttacaatcccaatcctgccgctagctactcaggtgcaacactgtaccagtctcaattgcgctcacctagagtgctgggagatcacctgctgcttgaccccacacatgagctaccaccttataccccccctcccatgctttctccggtcagacagggaagcgggttattttcaaatgtattaatctcaggccacggtcctggagcccatcctcagttaccactaacacctctgaccccaacacctagggtgttactttgccgctcaaattccatcgatggatccaacgttactgtgacccctgggcctggggaacaaactgtggatgtggagccacgcattaatatcggcctgaggtttcaggcagaaatcccagaactccaagacatatcagctctggctcaggacacccataaagcgaccctggtgtggaagccctggccagaacttgagaatcacgatctgcagcagcgcgtcgagaatctattaaacctgtgctgctcctctgcactacctggtgggggaacaaactccgaattcgcgctccactcactgtttgaggccaaaggcgatgtgatggttgcgctggaaatgctattgctccgtaagcccgtacgactgaaatgtcatcctcttgctaactaccattacgctggcagtgacaagtggacgagccttgaaaggaaactgtttaataaagcgctggctacttacagcaaagatttcatattcgtacagaagatggtcaagagcaagacagtagcacaatgtgttgaatactattacacctggaagaaaattatgaggctagggagaaagcaccgtaccagactggccgagattatcgatgattgtgtcacatctgaagaggaagaagaactagaggaagaagaagaagaggatcccgaggaggacaggaagtcaaccaaggaggaagagtctgaggtgccaaagtccccagagcccccaccagtgccagtgctggcccctactgaggggccaccactacaggctctcggacaaccatcaggatctttcatttgcgagatgccaaactgtggagctgtgtttagcagtagacaggccttgaacgggcatgctcgaattcacgggggtaccaatcaggttacaaaggccaggggggcaattcccagcggcaaacagaagccaggaggcactcagtccgggtactgctcagtaaagagcagcccttcacatagcacaactagtggtgagacagaccccacgacgatctttccatgcaaggaatgtggcaaagtgttctttaaaatcaagagccgcaatgcccacatgaagacgcaccgccagcaggaggaacagcagcgacagaaggcacaaaaggcagcatttgcagctgagatggcggcaactatcgagcgcaccaccgggccagtcggggcaccaggcctgctgcctctggatcaacttagcctgataaaacccattaaggatgtggatatcctggatgacgatgtggtgcagcaactaggaggtgttatggaggaggcggaagttgtggatacggatcttctacttgacgaccaggactcagtgctccttcaaggcgacgcagagttatag

SEQ ID NO: 288830 - DNA, 7286 bp, Artificial Sequence
  derived and/or modified sequence
ggcgaggatggggagcaatgcaaagctctgctcgccccccatctcaccccccaagcggatactggtcttctcgtcggattgcccatgcacttgttgcagaaacagccaaggccctggctgtggagaatgctgaaggaagaagacgcagaagcaggacgaccctgaaagattcagcctcttcatcctcaaacaggaccaggcctcctcttcccacctgtccagcagcatgaaagcagcatgattggccgaccgcaggagaagcccccagaaccaggcccccaactcagccatctgcggaggtcaaggtgtgagcgacgtctcctcaccacagtgctgtgtggtctatacctcagccagggagaggatgtgaaaccccccgccctgcacatgagtggtacaggccaacaggaacacctggctccagccacgttcacagacatgtcagccgtggagtagtgctgacacttttctctcagcttctcagggtttcagtccttttgggtttgttttatttaccttttttatggttttgtggctggacgttcacaaccaaggcagacagcatgggtgaccagcaactgtacaagaccaaccatgtggcccatggtagtgagaaccttttctaccaacagccaccacttggcgtccacagcgggctgaaccacaactatgggaatgcagttacagggggcggaatggatgcccctcaggcctcgccaatctccccccacttccctcaagatacacgggatggtctgggcttgcctgttggctccaaaaaccttggccaaatggatacctcgaggcagggagggtggggaagtcatgcagggcctggaaaccatgtccagctacgtggaaacctggccaactcaaacatgatgtggggggcaccagcccaggctgagcccactgatggctaccaatacacctactcccaggccagcgagatccggacccagaagcttaccagcggtgtcttacacaagctggactctttcacccaggtgtttgccaaccaaaacctgcgaattcaggtcaacaatatggcccaggtgctgcacactcagtcagcagtgatggatggagcccctgacagtgctctccgccagctgctgtctcagaagcccatggagcccccagcaccggctatcccttcccgctaccagcaggtgccccagcagcctcaccctggtttcactggtgggctgtccaaaccagctcttcaggtcgggcagcaccctacccaagggcacctgtattatgactaccagcagcctctggctcaggtgccagtgcagggaggacagccactgcaggccccacagatgctgtcacagcacatgcaacagatgcagcagcaccagtattacccaccgcagcaacagcagcaagccgggcaacagcgtatctccatgcaagaaatacagacgcagccgcaacaaattcgcccatcacagccacagccgccgccacagcagcagcagccgcagcagctacagctgcagcagcggcagggttcaatgcagatacctcagtattatcagccccaacccatgatgcagcacttgcaagagcagcagcagcaacagatgcacctgcagcctccttcttatcacagggaccctcaccagtataccccagagcaggcacacactgtccagctgattcccctgggctccatgtcccagtactactaccaggagccccagcagccctacagccaccccctctaccagcagagccacctgtcccagcaccagcagcgtgaggacagtcagctgaagacctactctagtgacagacaggcccaggccatgctgagctcccatggggacctggggcctcctgacacaggaatgggagacccagcgagctcagatctgacccgggtcagcagcaccctcccccatcgccccctcctatcccccagtgggatccacctcaacaacatggggcctcagcatcagcagctgtctcccagtgccatgtggccccagatgcacctacctgatgggagagcccagccagggtcccctgagtcaagtggccaacccaaaggagcgtttggggagcagtttgatgccaagaacaagctgacatgctccatctgcctgaaggagttcaagaacctgcctgccctgaatggccacatgcggtcccacgggggaatgagggcctcccccaacctcaaacaggaggaaggagagaaggtcctgccgcctcagccccagccaccactgccgcctccgcctccgcctccgccgccaccacagctccctcccgaggcagaaagcctcacgcctatggtcatgcccgtgtctgtccctgtcaagcttctcccgcccaagcccagctctcaggggttcaccaacagcaccgttgccgccccctccgccagagacaagccagccagctcgatgtcggacgacgagatgcctgtgctcgaaatccccaggaagcatcagccgagtgtgcccaaagccgaggagcccctcaagaccgtgcaggagaagaaaaagttccggcaccggccggaacctctcttcatcccgccgccgccctcctacaacccgaaccccgctgcctcctactcgggcgccaccctgtaccagagccagctgcgctccccgcgcgtcctcggggaccacctgctcctggaccccacccacgagctgcccccttacacgcccccacccatgctgagcccggtgcgccagggctcggggctcttcagcaatgtcctcatctccggccacggccctggcgcccacccgcagctgcccctgacgcccctgacgcccacaccacgggtgctgctgtgtcgctccaacagcatcgatggcagcaacgtgacggtcaccccagggcctggagagcagactgtagatgttgaaccacgcatcaacattggcttgagattccaagcagaaatccctgaactccaagatatctctgccctggcccaggacacacacaaggccacactggtatggaagccctggccagaactagaaaaccatgacctccagcaaagagtggagaatcttctgaatttgtgctgttccagtgcattgccaggtggagggaccaattctgaatttgctttgcactctctgtttgaggccaaaggtgatgtgatggttgctctggaaatgctgctactgcggaagcctgtcaggttaaaatgtcatcctttagcaaattaccactatgccggttcggacaagtggacctccctagaaagaaaactgtttaacaaagcactagccacttacagcaaagactttatttttgtacagaagatggtgaagtccaagacggtggctcagtgcgtggagtactactacacgtggaaaaagatcatgcggctggggcggaaacaccggacacgcctggcagaaatcatcgacgattgtgtgacaagtgaagaagaagaagagttagaggaggaggaggaggaggacccggaagaagataggaaatccacaaaagaagaagagagtgaggtgccgaagtccccggagccaccacccgtccccgtcctggctcccacggaggggccgcccctgcaggccctgggccagccctcaggctccttcatctgtgaaatgcccaactgtggggctgtgttcagctcccgacaggcactgaatggccatgcccgcatccacgggggcaccaaccaggtgaccaaggcccgaggtgccatcccctctgggaagcagaagcctggtggcacccagagtgggtactgttcggtaaagagctcaccctctcacagcaccaccagcggcgagacagaccccaccaccatcttcccctgcaaggagtgtggcaaagtcttcttcaagatcaaaagccgaaatgcacacatgaaaactcacaggcagcaggaggaacaacagaggcaaaaggctcagaaggcggcttttgcagctgagatggcagccacgattgagaggactacggggcccgtgggggcgccggggctgctgcccctggaccagctgagtctgatcaaacccatcaaggatgtggacatcctcgacgacgacgtcgtccagcagttgggaggtgtcatggaagaggctgaagttgtggacaccgatcttctcttggatgatcaagattcagtcttgcttcagggtgacgcagaactataaagccctgtgtgtcacttagagacagtgaaaacccacggcctccatcttcattaatcaggaaacctggactgcctgcttgttttgtaacccttttaaactacctgttttaaaagtggtcattttattcaggtttagaaaaaaaaatcctatttcttttccttttatttaaaaaaatttgtttttgtggggggttgggggaataaataattggcacaactatctttaagaggtgtttcatctgggctaccttctcatgaaatcattcccagtagggactgaagctgaccttcatgttccattgcattcagatgtcaaccatcccggttgccttttatcccaaagcttgctgtgagtgtgtgtgtgtgagacgcaggcgaccctcttagtactggggtcttggggccaacttttcccatcaagcgttactttgattctgttctgacctcattccatagtttgcagtgagcatggcatctttgcctggagatactatgctaggggcagctttccaggggcaaagcaagccctcgtgttacacggctctcctccagctcacacgacatgtgaggagatgaccaaatgtgaaaacaggtttcccctgtgttgcccgtcatcctttggcccgttcacaggaatggagtactgtataattttaggctttcattcccagcagtgtttactgaggacctggttttctagaacaggtgtgtcctgtcctcttccatgttccctgggggctggtcagctccaagttgtgggtggcagagctgtgtttcagcatgaactgactagagacccatctggaggcaaatattaagttgccaggactgctttcacttcagggtgattgaaggacacatattgaagtacctagaatgccagaaagtgttctattgcccaaaaaacaaatcagaaaagcctattcttttttgcaacgctgttaatgattagtggagttctgaaattactttgtgccacttggaagtactgtgaaaccgcattcactgggattttgctgtaattcacatccgctggactgaagtttaccttgatgttagctataagaaatagttttctaacacatacgatagcaaatacaagacaaatagcattgaaggccaacaaaaatggcttcagatacaccttagctataatgtttgcattcaaacaatgaatgtattcatcacaagtcacttaccaaagcacttctagacttctccaacctccatgactttgctctgcttcctcctgtccctgtcagcagggttgctgtttgtacttgaaggtaataaacctgtaatccttcaaaaatgccatttagccccaggcttctgagctgagtcagactgacccatcccaccgttagggcaaaagtcaggctgggacacagcgccagtacagagaggatcctgcttcatgcaactccccttttggagttaatgcagcgtgatttcctgggccggtgttttcaggcatcgcccaccccaggtatgctggttcccagctccacgtaggtgtgcctatcacgctgggccactttgctgacaacattcatagcttgacatgagagagaatatcagcagaagcatgagagtaggacctgacgtctttgactctgcaaaagcatttagcacacactcatgggggggaactggctgtgagccacagcagccccacacagacagtggtctctgaacttcaggaaagccatggacagaaaaaaaaataaaattcttttccatcattctattttcaaagaggtcttggcgttttcctacatcttttgtttagagggggaaaaaagtttcatttgctgccatttcagaaaggttatgctatcctgttttatccaagcagttgtgagtcaggaactgcctgggcagtgtgcatcaactttgtggccgaaccattacagctgtcatatccttggctgatcgtctctcccagggactactgccctccacttagtgtctgagggtaagcctagaagggtgctgctattgggtctatggaagcttatctatcaaaggagcaaacatccagaaaagtgtttataaagcaaatgtattgcctctgtttagagatttgcccagctgttccagttttaaacattaaaaaataaactcagttgccatggcaaaaatagaatgcacagcttacttataattttccatgcagtatagcataaggatttttgacttgaaacaaccaaagaactcctccttaacgagacagttcaaattcctgaattagtatttcttgactatcaacttaaagaatggacttcctagtacaatgttgcacttatttttttttctgaaataattctgcctgcatgtatgtgttgtgttttagcttctccccttaccccaccccaaagatcttttcttcctaatggttaatgtctcaactcggttactgtttactatcagatggtttttcattagtgaatttagacctctttgagaaagcttgtatataaaaagttaacagatatattttatggaaaaacccatcttattttcaaatatatttaactgctgttatattttattagaggaaggttgtaaatattttctaggagttctattgtaaagaaaagtatttttgaaaaaaattaatgtaataaaaaggaaaacatttttaaatagtggttgtgattgcttcctgttctggcttcgttatgttctattctcagcagatgaattgcatgccttccatatcaggatgtaatttattcaggtttgcactattataagttgacatcataatatctagtgtgcttaactgtattttcccggaatgcaagtcccttggtccatattaaagcactatgtatagcatattcataatttttcttttgtaacgtgtgtatttttaataaggattttatgtaacattttggcaacaagaggaccgtattttctagtgaattttataataacattttgctaaaaatgtttcttcctaggtcagtttttgttaaggtgaaccaaaagtcttattttaccaggggtttaaaaaaagtttgaagcttgaaagcaaagttatatttaaacatcatatgtaacaaataaataaagatgttttatagacttgtcctaaaaaggtgcattcctt

SEQ ID NO: 288831 - DNA, 3603 bp, Artificial Sequence
  derived and/or modified sequence
atgggcgaccagcagctgtacaagaccaaccacgtggcccacggcagcgagaacctgttctaccagcagccccccctgggcgtgcacagcggcctgaaccacaactacggcaacgccgtgaccggcggcggcatggacgccccccaggccagccccatcagcccccacttcccccaggacaccagagacggcctgggcctgcccgtgggcagcaagaacctgggccagatggacaccagcagacagggcggctggggcagccacgccggccccggcaaccacgtgcagctgagaggcaacctggccaacagcaacatgatgtggggcgcccccgcccaggccgagcccaccgacggctaccagtacacctacagccaggccagcgagatcagaacccagaagctgaccagcggcgtgctgcacaagctggacagcttcacccaggtgttcgccaaccagaacctgagaatccaggtgaacaacatggcccaggtgctgcacacccagagcgccgtgatggacggcgcccccgacagcgccctgagacagctgctgagccagaagcccatggagccccccgcccccgccatccccagcagataccagcaggtgccccagcagccccaccccggcttcaccggcggcctgagcaagcccgccctgcaggtgggccagcaccccacccagggccacctgtactacgactaccagcagcccctggcccaggtgcccgtgcagggcggccagcccctgcaggccccccagatgctgagccagcacatgcagcagatgcagcagcaccagtactaccccccccagcagcagcagcaggccggccagcagagaatcagcatgcaggagatccagacccagccccagcagatcagacccagccagccccagccccccccccagcagcagcagccccagcagctgcagctgcagcagagacagggcagcatgcagatcccccagtactaccagccccagcccatgatgcagcacctgcaggagcagcagcagcagcagatgcacctgcagccccccagctaccacagagacccccaccagtacacccccgagcaggcccacaccgtgcagctgatccccctgggcagcatgagccagtactactaccaggagccccagcagccctacagccaccccctgtaccagcagagccacctgagccagcaccagcagagagaggacagccagctgaagacctacagcagcgacagacaggcccaggccatgctgagcagccacggcgacctgggcccccccgacaccggcatgggcgaccccgccagcagcgacctgaccagagtgagcagcaccctgccccacagacccctgctgagccccagcggcatccacctgaacaacatgggcccccagcaccagcagctgagccccagcgccatgtggccccagatgcacctgcccgacggcagagcccagcccggcagccccgagagcagcggccagcccaagggcgccttcggcgagcagttcgacgccaagaacaagctgacctgcagcatctgcctgaaggagttcaagaacctgcccgccctgaacggccacatgagaagccacggcggcatgagagccagccccaacctgaagcaggaggagggcgagaaggtgctgcccccccagccccagccccccctgcccccccccccccccccccccccccccccccagctgccccccgaggccgagagcctgacccccatggtgatgcccgtgagcgtgcccgtgaagctgctgccccccaagcccagcagccagggcttcaccaacagcaccgtggccgcccccagcgccagagacaagcccgccagcagcatgagcgacgacgagatgcccgtgctggagatccccagaaagcaccagcccagcgtgcccaaggccgaggagcccctgaagaccgtgcaggagaagaagaagttcagacacagacccgagcccctgttcatcccccccccccccagctacaaccccaaccccgccgccagctacagcggcgccaccctgtaccagagccagctgagaagccccagagtgctgggcgaccacctgctgctggaccccacccacgagctgcccccctacacccccccccccatgctgagccccgtgagacagggcagcggcctgttcagcaacgtgctgatcagcggccacggccccggcgcccacccccagctgcccctgacccccctgacccccacccccagagtgctgctgtgcagaagcaacagcatcgacggcagcaacgtgaccgtgacccccggccccggcgagcagaccgtggacgtggagcccagaatcaacatcggcctgagattccaggccgagatccccgagctgcaggacatcagcgccctggcccaggacacccacaaggccaccctggtgtggaagccctggcccgagctggagaaccacgacctgcagcagagagtggagaacctgctgaacctgtgctgcagcagcgccctgcccggcggcggcaccaacagcgagttcgccctgcacagcctgttcgaggccaagggcgacgtgatggtggccctggagatgctgctgctgagaaagcccgtgagactgaagtgccaccccctggccaactaccactacgccggcagcgacaagtggaccagcctggagagaaagctgttcaacaaggccctggccacctacagcaaggacttcatcttcgtgcagaagatggtgaagagcaagaccgtggcccagtgcgtggagtactactacacctggaagaagatcatgagactgggcagaaagcacagaaccagactggccgagatcatcgacgactgcgtgaccagcgaggaggaggaggagctggaggaggaggaggaggaggaccccgaggaggacagaaagagcaccaaggaggaggagagcgaggtgcccaagagccccgagcccccccccgtgcccgtgctggcccccaccgagggcccccccctgcaggccctgggccagcccagcggcagcttcatctgcgagatgcccaactgcggcgccgtgttcagcagcagacaggccctgaacggccacgccagaatccacggcggcaccaaccaggtgaccaaggccagaggcgccatccccagcggcaagcagaagcccggcggcacccagagcggctactgcagcgtgaagagcagccccagccacagcaccaccagcggcgagaccgaccccaccaccatcttcccctgcaaggagtgcggcaaggtgttcttcaagatcaagagcagaaacgcccacatgaagacccacagacagcaggaggagcagcagagacagaaggcccagaaggccgccttcgccgccgagatggccgccaccatcgagagaaccaccggccccgtgggcgcccccggcctgctgcccctggaccagctgagcctgatcaagcccatcaaggacgtggacatcctggacgacgacgtggtgcagcagctgggcggcgtgatggaggaggccgaggtggtggacaccgacctgctgctggacgaccaggacagcgtgctgctgcagggcgacgccgagctgtag

SEQ ID NO: 288832 - protein, 1129 aa, Artificial Sequence
  derived and/or modified sequence
MGDQQLYKTNHVAHGSENLFYQQPPLGVHSGLNHNYGNAVTGGGMDAPQASPISPHFPQDTRDGLGLPVGSKNLGQMDTSRQGGWGSHAGPGNHVQLRGNLANSNMMWGAPAQAEPTDGYQYTYSQASEIRTQKLTSGVLHKLDSFTQVFANQNLRIQVNNMAQVLHTQSAVMDGAPDSALRQLLSQKPMEPPAPAIPSRYQQVPQQPHPGFTGGLSKPALQVGQHPTQGHLYYDYQQPLAQVPVQGGQPLQAPQMLSQHMQQMQQHQYYPPQQQQQAGQQRISMQEIQTQPQQIRPSQPQPPPQQQQPQQLQLQQRQGSMQIPQYYQPQPMMQHLQEQQQQQMHLQPPSYHRDPHQYTPEQAHTVQLIPLGSMSQYYYQEPQQPYSHPLYQQSHLSQHQQREDSQLKTYSSDRQAQAMLSSHGDLGPPDTGMGDPASSDLTRVSSTLPHRPLLSPSGIHLNNMGPQHQQLSPSAMWPQMHLPDGRAQPGSPESSGQPKGAFGEQFDAKNKLTCSICLKEFKNLPALNGHMRSHGGMRASPNLKQEIPRKHQPSVPKAEEPLKTVQEKKKFRHRPEPLFIPPPPSYNPNPAASYSGATLYQSQLRSPRVLGDHLLLDPTHELPPYTPPPMLSPVRQGSGLFSNVLISGHGPGAHPQLPLTPLTPTPRVLLCRSNSIDGSNVTVTPGPGEQTVDVEPRINIGLRFQAEIPELQDISALAQDTHKATLVWKPWPELENHDLQQRVENLLNLCCSSALPGGGTNSEFALHSLFEAKGDVMVALEMLLLRKPVRLKCHPLANYHYAGSDKWTSLERKLFNKALATYSKDFIFVQKMVKSKTVAQCVEYYYTWKKIMRLGRKHRTRLAEIIDDCVTSEEEEELEEEEEEDPEEDRKSTKEEESEVPKSPEPPPVPVLAPTEGPPLQALGQPSGSFICEMPNCGADCRCHVTPFLPQVFSSRQALNGHARIHGGTNQVTKARGAIPSGKQKPGGTQSGYCSVKSSPSHSTTSGETDPTTIFPCKECGKVFFKIKSRNAHMKTHRQQEEQQRQKAQKAAFAAEMAATIERTTGPVGAPGLLPLDQLSLIKPIKDVDILDDDVVQQLGGVMEEAEVVDTDLLLDDQDSVLLQGDAEL

SEQ ID NO: 288833 - DNA, 3962 bp, Artificial Sequence
  derived and/or modified sequence
ctctgctcgccccccatctcaccccccaagcggatactggtcttctcgtcggattgcccatgcacttgttgcagaaacagccaaggccctggctgtggagaatgctgaaggaagaagacgcagaagcaggacgaccctgaaagattcagcctcttcatcctcaaacaggtcgcttctcgggagttcttggtgttggaatattttacagcaaagcagtcgaccaggcctcctcttcccacctgtccagcagcatgaaagcagcatgattggccgaccgcaggagaagcccccagaaccaggcccccaactcagccatctgcggaggtcaaggtgtgagcgacgtctcctcaccacagtgctgtgtggtctatacctcagccagggagaggatgtgaaaccccccgccctgcacatgagtggtacaggccaacaggaacacctggctccagccacgttcacagacatgtcagccgtggagtagtgctgacacttttctctcagcttctcagggtttcagtccttttgggtttggtttatttaccttttttatggttttgtggctggacgttcacaaccaaggcagacagcatgggtgaccagcaactgtacaagaccaaccatgtggcccatggtagtgagaaccttttctaccaacagccaccacttggcgtccacagcgggctgagcccactgatggctaccaatacacctactcccaggccagcgagatccggacccagaagcttaccagcggtgtcttacacaagctggactctttcacccaggtgtttgccaaccaaaacctgcgaattcaggtcaacaatatggcccaggtgctgcacactcagtcagcagtgatggatggagcccctgacagtgctctccgccagctgctgtctcagaagcccatggagcccccagcaccggctatcccttcccgctaccagcaggtgccccagcagcctcaccctggtttcactggtgggctgtccaaaccagctcttcaggtcgggcagcaccctacccaagggcacctgtattatgactaccagcagcctctggctcaggtgccagtgcagggaggacagccactgcaggccccacagatgctgtcacagcacatgcaacagatgcagcagcaccagtattacccaccgcagcaacagcagcaagccgggcaacagcgtatctccatgcaagaaatacagacgcagccgcaacaaattcgcccatcacagccacagccgccgccacagcagcagcagccgcagcagctacagctgcagcagcggcagggttcaatgcagatacctcagtattatcagccccaacccatgatgcagcacttgcaagagcagcagcagcaacagatgcacctgcagcctccttcttatcacagggaccctcaccagtataccccagagcaggcacacactgtccagctgattcccctgggctccatgtcccagtactactaccaggagccccagcagccctacagccaccccctttaccagcagagccacctgtcccagcaccagcagcgtgaggacagtcagctgaagacctactctagtgacagacaggcccaggccatgctgagctcccatggggacctggggcctcctgacacaggaatgggagacccagcgagctcagatctgacccgggtcagcagcaccctcccccatcgccccctcctatcccccagtgggatccacctcaacaacatggggcctcagcatcagcagctgtctcccagtgccatgtggccccagatgcacctacctgatgggagagcccagccagggtcccctgagtcaagtggccaacccaaaggagcgtttggggagcagtttgatgccaagaacaagctgacatgctccatctgcctgaaggagttcaagaacctgcctgccctgaatggccacatgcggtcccacgggggaatgagggcctcccccaacctcaaacaggaaatccccaggaagcatcagccgagtgtgcccaaagccgaggagcccctcaagaccgtgcaggagaagaaaaagttccggcaccggtcggaacctctcttcatcccgccgccgccctcctacaacccgaaccccgctgcctcctactcgggcgccaccctgtaccagagccagctgcgctccccgcgcgtcctcggggaccacctgctcctggaccccacccacgagctgcccccttacacgcccccacccatgctgagcccggtgcgccagggctcggggctcttcagcaatgtcctcatctccggccacggccctggcgcccacccgcagctgcccctgacgcccctgacgcccacaccacgggtgctgctgtgtcgctccaacagcatcgatggcagcaacgtgacggtcaccccagggcctggagagcagactgtagatgttgaaccacgcatcaacattggcttgagattccaagcagaaatccctgaactccaagatatctctgccctggcccaggacacacacaaggccacactggtatggaagccctggccagaactagaaaaccatgacctccagcaaagagtggagaatcttctgaatttgtgctgttccagtgcattgccaggtggagggaccaattctgaatttgctttgcactctctgtttgaggccaaaggtgatgtgatggttgctctggaaatgctgctactgcggaagcctgtcaggttaaaatgtcatcctttagcaaattaccactatgccggttcggacaagtggacctccctagaaagaaaactgtttaacaaagcactagccacttacagcaaagactttatttttgtacagaagatggtgaagtccaagacggtggctcagtgcgtggagtactactacacgtggaaaaagatcatgcggctggggcggaaacaccggacacgcctggcagaaatcatcgacgattgtgtgacaagtgaagaagaagaagagttagaggaggaggaggaggaggacccggaagaagataggaaatccacaaaagaagaagagagtgaggtgccgaagtccccggagccaccacccgtccccgtcctggctcccacggaggggccgcccctgcaggccctgggccagccctcaggctccttcatctgtgaaatgcccaactgtggggctgactgtagatgtcatgtcactccctttcttccccaggtgttcagctcccgacaggcactgaatggccatgcccgcatccacgggggcaccaaccaggtgaccaaggcccgaggtgccatcccctctgggaagcagaagcctggtggcacccagagtgggtactgttcggtaaagagctcaccctctcacagcaccaccagcggcgagacagaccccaccaccatcttcccctgcaaggagtgtggcaaagtcttcttcaagatcaaaagccgaaatgcacacatgaaaactcacaggcagcaggaggaacaacagaggcaaaaggctcagaaggcggcttttgcagctgagatggcagccacgattgagaggactacggggcccgtgggggcgccggggctgctgcccctggaccagctgagtctgatcaaacccatcaaggatgtggacatcctcgacgacgacgtcgtccagcagttgggaggtgtcatggaagaggctgaagttgtggacaccgatcttctcttggatgatcaagattcagtcttgcttcagggtgacgcagaactataaagccctgtgtgtcacttagagacagtgaaaacccacggcctccatcttcattaatcaggaaacctggactgcctgcttgttttgtaacccttttaaactacctgttttaaaagtggtcattttattcaggtttagaaaaaaaaatcctatttcttttccttttatttaaaaaaatttgtttttgtggggggttggggggaataaataattggcacaactaaaaaaaaaaaa

SEQ ID NO: 288834 - DNA, 3390 bp, Artificial Sequence
  derived and/or modified sequence
atgggggatcaacagctgtataagaccaaccatgtggcccacggcagcgaaaaccttttctaccagcaaccacccctgggggtccactctgggctgaatcacaactacgggaatgccgttaccggggggggtatggacgcgccacaggcttctccaataagccctcatttcccccaggacacacgcgacgggttaggactccctgtgggaagtaaaaacctgggacagatggacacaagtcggcagggcggatggggttcacacgcagggccgggtaatcatgtccagttgcgagggaatctcgccaattccaacatgatgtggggggcccctgcccaggctgaacccacggatggatatcagtatacgtactcccaagccagcgaaatcaggacccagaagctgacgagcggggttttacataaactcgactcctttacgcaggtgttcgctaaccagaaccttcggatccaggtgaataacatggcacaggtgctgcacacacaatctgctgtgatggacggggcacctgattctgccctgcgccagctcctgtctcagaagccgatggaacccccagcgccagcgattcctagccgttaccagcaggtgccccaacagccccatccaggctttacaggcgggctctcaaaacctgcactacaggtgggccaacaccctactcaaggacacctctattacgactatcagcagccacttgcacaagtgcccgtacaaggtggccaaccccttcaggcccctcagatgctgagccagcacatgcagcaaatgcagcagcaccagtattacccccctcagcaacagcagcaggctggccaacaacggatcagcatgcaagaaatccagacccaaccccagcagattcggcccagtcagccacagccgcccccacagcagcagcagccccagcaactgcaattacagcagcgtcagggcagtatgcaaattccacagtattatcagcctcagcctatgatgcagcatctgcaagagcagcaacagcagcagatgcacctacaacccccatcttaccatcgcgaccctcaccaatatacacctgaacaggcacataccgtgcagctgattcctctgggctccatgtcccaatactattaccaagagccgcagcagccttattcacaccccctgtatcagcagagccatctgagtcagcaccagcagagagaggacagtcagttgaagacatactcttctgatcggcaagcgcaagctatgcttagttcacatggtgatcttggtccccccgatactggtatgggggaccccgctagctccgatctaacccgcgtgtcaagtactctcccccaccgaccactattatctccgagcggcattcacctgaataacatgggaccccagcaccagcaactgtccccttctgcgatgtggccacagatgcaccttcctgacgggcgggcgcagccaggaagccctgaaagcagcggccagccaaaaggagcctttggtgagcaatttgacgccaaaaataaactgacctgctctatatgcctgaaagaattcaagaatctgcctgctctgaatggtcatatgcgctcacatggcggaatgagggctagcccaaacttaaaacaagagataccacggaagcatcagcccagcgtgcctaaggccgaagaacccctcaagaccgtgcaggaaaaaaaaaagttcagacatcgcccagagcccttgttcatccctccccccccatcatacaaccccaaccccgctgcgtcgtacagcggggctacattataccagtcccagttgcgttcccctagagtattgggcgaccacctgcttctcgaccccacacacgagttgcctccttatactcccccccccatgctttctccagtgcgacagggaagtggcctgttcagcaatgtcctaatctctgggcatgggcccggggcccacccacagcttccccttacccccctgactccaactcctagagtactgctgtgcagatccaacagtatagacggctctaatgttacggttacaccggggcctggcgagcagacagtagatgtagaacctaggatcaatatcggactgagatttcaagccgaaatccccgaactgcaggacatctcagccctggctcaggacacccacaaggccacacttgtgtggaagccgtggcctgagttggagaaccacgatttacagcagagagttgaaaatctcctgaatctttgctgtagtagtgcccttccaggcggaggaacaaatagcgaatttgctctacactccctcttcgaggccaagggcgacgttatggtcgccctcgaaatgctgcttctacgtaaacccgttaggctgaagtgccatcctcttgctaactatcattatgccggcagcgataagtggactagcctcgagagaaaactgtttaataaggcgctggccacttattctaaggattttatctttgttcagaaaatggtgaagagtaagaccgtcgcacagtgtgtggaatactactacacttggaagaaaatcatgaggctcggccggaagcaccgcactcggctggcagagatcatagatgactgcgtgacctcagaagaggaggaggaattagaggaagaagaagaggaggaccccgaggaagaccggaaatccactaaggaggaggaaagtgaagttccgaagagtccggagccaccgcccgttccggtgctcgcccccacagaagggcctccactgcaagctcttggacaacctagtggatcattcatttgcgagatgcccaactgtggtgctgactgcaggtgccacgtgacacccttcctgcctcaggtgtttagtagtcgacaagctctgaatggccatgcaaggattcatggtggaacaaaccaagtaactaaagctcgtggtgctattccctcaggtaagcagaagcccggcggcacacaaagtggttattgcagcgtcaaatcgtcacccagtcactctacaaccagcggggaaactgaccctacaaccattttcccctgcaaagaatgcggaaaagtgttctttaagattaagagtcggaacgcccacatgaagacacacagacagcaagaagagcagcagagacagaaagcacaaaaggccgcattcgcagccgaaatggcggccaccatcgaacgcacgactggacctgtaggcgcaccaggtcttttacccttggaccagctgtccctcatcaagcctatcaaggacgtcgacattttggacgacgacgtggtgcagcaattggggggagtgatggaggaggccgaggtggtggacactgatctgcttctagacgatcaggactccgtcctgctgcaaggggacgcagagttgtag

SEQ ID NO: 288835 - DNA, 3390 bp, Artificial Sequence
  derived and/or modified sequence
atgggagaccagcagctgtacaagaccaaccacgtggcccacggctctgaaaatctcttctaccagcagccccccctgggcgtgcacagcggcctgaaccacaactatggaaatgctgtgactggaggcggcatggatgccccccaggccagccccatcagcccccacttcccccaggacaccagagatggcctgggcctgcctgtgggcagcaagaacctgggccagatggacaccagccggcagggcggctggggcagccatgctggccctggcaaccacgtgcagctgcggggcaacctggccaacagcaacatgatgtggggcgccccagcccaggccgagcccacagatggctaccagtacacctacagccaggccagcgagatccgcacccagaagctgaccagcggcgtgctgcacaagctggacagcttcacccaggtgtttgccaaccagaacctgcgcatccaggtgaacaacatggcccaggtgctgcacacccagagcgctgtgatggatggagccccagattctgccctgcggcagctgctgagccagaagcccatggagcccccagccccagccatccccagccgctaccagcaggtgccccagcagccccaccctggcttcaccggcggcctgagcaagccagccctgcaggtgggccagcaccccacccagggccacctgtactatgactaccagcagcccctggcccaggtgcctgtgcagggcggccagcccctgcaggccccccagatgctgagccagcacatgcagcagatgcagcagcaccagtactacccaccccagcagcagcagcaggccggccagcagaggatctccatgcaggagatccagacccagccccagcagatccggcccagccagccccagcccccaccccagcagcagcagccccagcagctgcagctgcagcagaggcagggctccatgcagatcccccagtactaccagccccagcccatgatgcagcacctgcaggagcagcagcagcagcagatgcacctgcagccccccagctaccaccgggacccccaccagtacaccccagagcaggcccacacagtgcagctgatccccctgggctccatgagccagtactactaccaggagccccagcagccctacagccaccccctgtaccagcagagccacctgagccagcaccagcagcgggaggacagccagctgaagacctacagcagtgaccggcaggcccaggccatgctgagcagccatggagacctgggccccccagacaccggcatgggagaccctgccagcagtgacctgaccagggtgagcagcaccctgccccaccggcccctgctgagccccagcggcatccacctgaacaacatgggcccccagcaccagcagctgagccccagcgccatgtggccccagatgcacctgcctgatggccgggcccagcccggcagccctgagagcagcggccagcccaagggggccttcggggagcagtttgatgccaagaacaagctgacctgcagcatctgcctgaaggagttcaagaacctgcctgccctgaatggccacatgaggagccacggcggcatgagggccagccccaacctgaagcaggagatccccaggaagcaccagcccagcgtgcccaaggccgaggagcccctgaagacagtgcaggagaagaagaagttccgccacaggcctgagcccctcttcatccccccacctccttcctacaaccccaacccagctgccagctacagcggggccaccctgtaccagagccagctgcggagcccccgggtgctgggggaccacctgctgctggaccccacccatgagctgcccccctacaccccaccacccatgctgagccctgtgcggcagggcagcggcctcttcagcaatgtgctgatcagcggccacggccctggggcccacccccagctgcccctgacccccctgacccccaccccccgggtgctgctgtgccgcagcaacagcattgatggcagcaatgtgacagtgaccccaggccctggagagcagacagtggatgtggagccccgcatcaacatcggcctgcgcttccaggccgagatccctgagctgcaggacatcagcgccctggcccaggacacccacaaggccaccctggtgtggaagccctggccagagctggagaaccacgacctgcagcagagggtggagaacctgctgaacctgtgctgcagcagcgccctgcccggcggcggcaccaacagcgagtttgccctgcacagcctgtttgaggccaagggagatgtgatggtggccctggagatgctgctgctgaggaagcctgtgcggctgaagtgccaccccctggccaactaccactacgccggcagtgacaagtggaccagcctggagaggaagctgttcaacaaggccctggccacctacagcaaggacttcatctttgtgcagaagatggtgaagagcaagacagtggcccagtgtgtggagtactactacacctggaagaagatcatgaggctgggcaggaagcacaggacccggctggccgagatcattgatgactgtgtgaccagcgaggaggaggaggagctggaggaggaggaggaggaggaccctgaggaggacaggaagagcaccaaggaggaggagagcgaggtgcccaagagccctgagcccccacctgtgcctgtgctggcccccacagagggcccccccctgcaggccctgggccagcccagcggcagcttcatctgtgagatgcccaactgtggggctgactgccgctgccacgtgacccccttcctgccccaggtgttcagcagccggcaggccctgaatggccacgcccgcatccacggcggcaccaaccaggtgaccaaggcccggggggccatccccagcggcaagcagaagccaggcggcacccagagcggctactgcagcgtgaagagcagccccagccacagcaccaccagcggggagacagaccccaccaccatcttcccctgcaaggaatgtgggaaggtgttcttcaagatcaagagcagaaatgcccacatgaagacccaccggcagcaggaggagcagcagaggcagaaggcccagaaggccgcctttgctgctgagatggccgccaccattgaaagaaccactggacctgtgggcgcccctggcctgctgcccctggaccagctgagcctcatcaagcccatcaaggatgtggacatcctggatgatgatgtggtgcagcagctgggcggcgtgatggaggaggccgaggtggtggacacagacctgctgctggatgaccaggacagcgtgctgctgcagggagatgctgagctgtag

SEQ ID NO: 288836 - DNA, 3390 bp, Artificial Sequence
  derived and/or modified sequence
atgggcgaccagcagctgtacaagaccaaccacgtggcccacggctccgagaacctattttaccagcaaccaccactcggggtccattccgggctgaatcacaattacggcaatgcagtcaccggaggcggtatggacgccccgcaggctagccccatctccccccacttcccccaggatacacgagacgggctcgggttgcccgtgggttctaagaacctcgggcaaatggacacatccagacagggcggttggggctcccacgcaggcccggggaatcacgtccagctgagaggaaatcttgctaattccaacatgatgtggggtgcccctgcacaggccgagcccacagatgggtaccagtacacgtactcacaggcctcagaaataaggacccagaagctcacctctggcgtgctgcataagttggattcattcacccaagtgtttgccaatcaaaatctgaggattcaggtcaacaacatggcccaagtattacatacccaatctgctgtgatggatggcgctcctgacagtgcccttcgacagctgttgagccaaaaacctatggagcctccggcccctgccatcccgagcaggtatcaacaagtgccccagcaaccgcatccaggtttcaccgggggactttcgaaacccgccctgcaagtgggccagcaccctacacagggccacctgtactacgactaccagcagcctttggcacaagttccagtccagggcggacagcccctgcaggcgccccagatgctatctcagcacatgcagcagatgcagcaacaccagtactacccgcctcagcaacagcagcaggcgggccaacagcggattagcatgcaggagatccagacacaaccacaacagatacggccaagccaacctcagccccctcctcaacaacaacagccacagcagcttcaactgcagcagcggcagggatccatgcaaatccctcagtattaccagccccagccgatgatgcagcatttacaggaacagcagcagcagcagatgcacctgcagcccccttcctaccacagggacccgcaccagtacacgcctgaacaggcgcacaccgtgcagctgataccgcttggatctatgagccagtattattaccaggagccccagcagccatatagtcacccactttaccaacagtcccacttgagtcagcaccaacaacgggaagattcccagttaaagacatacagtagtgatcgtcaggcccaggccatgctcagcagccacggggatctcggacccccagataccggcatgggcgaccctgcttcatctgacctgacccgcgtatccagtaccctgccacaccggcctctcctttccccctctggaatccatttgaataatatggggccccagcaccaacagctcagccctagtgctatgtggcctcaaatgcacttaccagatgggagagcacaacccgggtctccggaatcaagcgggcagcctaagggagctttcggagaacagtttgacgccaagaacaagctgacttgttccatctgcctgaaggaattcaaaaacctgcccgccctcaatggccatatgcgcagtcatggaggaatgcgagcatctcctaatctcaagcaggagatcccccgcaaacatcagccatccgttccaaaggcagaagagcctctgaaaacagttcaggagaagaaaaagtttcggcatcggcctgagccattgtttatacctcctccacctagttataaccccaaccctgccgctagctacagtggtgctacactctaccagagccagcttcgaagcccccgggtcttgggtgatcacctcttgctggatccaacccacgaactgcctccatacactcctcctcctatgctttcccccgtgagacagggcagtgggctgttctctaacgtgctgatctctggccacggtcctggagctcatcctcagctaccactcacacctctaacccccacgccccgagttctcctgtgccggagcaattccatagatggctcgaacgttacggtcaccccaggcccaggtgagcagactgttgatgttgagcccagaattaatatcgggctgagattccaggcagagatcccggaactacaagacatctctgctttggcgcaggatacacataaggccacccttgtttggaaaccctggcccgagctggagaatcatgatcttcagcagcgagtggagaacttgctgaatctgtgttgttcttctgcgctaccaggcggcggcactaactccgagtttgcactccacagcctttttgaggcgaagggtgacgtgatggtcgctcttgaaatgcttctgctgcggaagcctgtgcggctcaagtgccatccactggccaattatcactatgccgggagcgacaagtggacctcgctagagcggaaattgttcaataaagctctggccacttatagcaaggactttatattcgtacagaagatggtgaagagtaagacagtggcccagtgtgtggaatattattacacttggaaaaaaatcatgaggctgggacgcaagcatcgcactaggctggcagaaattatagacgactgcgtaacatccgaagaggaagaggagcttgaggaggaggaggaggaagatccagaagaagatcggaaaagcacaaaggaagaagagagtgaagtgccaaaaagtcccgaaccgcctccagtgccagtgttggccccaaccgaaggacctcctcttcaggctcttggacagccatccggctccttcatctgtgaaatgccgaattgtggggcggattgtagatgccacgtgactcccttcttaccacaggtgttctccagtagacaggctctgaacggccacgctcgcatccacgggggcactaatcaggtgacaaaggccaggggtgccataccttccggcaagcagaaaccaggtggcacgcagtctggctactgcagtgtgaagtcatcaccaagccatagtacaaccagcggggagaccgatccaacaactatcttcccgtgtaaggagtgtggtaaagtgttctttaagatcaaaagcaggaacgcccatatgaagacccaccggcagcaggaggaacagcagaggcagaaggcacagaaggcagcctttgcagctgagatggctgcgaccatcgaacggacaactggacccgtcggggcccccggactgctgccactcgatcagctgtcactgattaagcccatcaaagacgtcgacatcttggacgacgacgtggtgcagcagctgggaggggtgatggaggaagctgaggtagtggatactgacctgctattagatgaccaagactctgtacttcttcagggggatgccgagctgtag

SEQ ID NO: 288837 - DNA, 3390 bp, Artificial Sequence
  derived and/or modified sequence
atgggggaccagcaactctacaaaactaaccatgtggcccacggatccgagaatctgttttaccagcagccacctctgggagtccactcaggattgaaccacaactacgggaacgccgtgaccgggggaggtatggatgctccccaggcttcgccgatttcccctcacttccctcaggacacgagggatggtctgggactccctgttggaagcaagaacctggggcagatggacacttctcgccagggaggatggggttcccacgctggacccggaaatcatgtgcagctgcggggtaacctcgcgaactctaatatgatgtggggggcacccgctcaggctgagcccactgacgggtaccagtacacatactctcaggcaagcgaaatccggacacaaaagctgacatctggggtcttgcataaactggattcatttacccaggtatttgccaatcagaacctccgcatccaggtaaataacatggctcaggtccttcatacacagagcgcggtgatggatggggctccagattcagctttgagacaacttctgagccaaaagcccatggaaccgcctgcccctgccataccctctcggtaccagcaggtcccccagcagcctcatcccggatttaccggtggtctctccaagccagccctccaggtgggtcaacacccaacacagggacacctgtattacgactaccaacagccactagcacaggttcccgtacaagggggacagccactgcaggctccgcagatgttatctcagcacatgcagcagatgcaacagcaccaatattacccccctcaacagcaacagcaagccggacagcagcgtatctccatgcaagaaattcagacacagccacaacaaattagacccagccagccacagccaccaccgcaacagcagcagcctcagcagctgcagctacagcagcgacaggggtcaatgcagatccctcagtactaccagccccaacccatgatgcagcaccttcaggagcaacagcagcagcagatgcacctacagcccccatcctaccaccgggacccgcatcagtatacacctgagcaagcgcacactgtacagcttatacccctgggcagcatgagtcagtactattaccaggagcctcagcagccttacagtcacccgctttatcagcagagccacctgagccaacaccagcagcgcgaagattctcagctgaaaacatatagttcggataggcaggcccaggccatgctcagctcccatggcgatctagggccacctgatacaggcatgggcgatcctgctagtagcgatctgacccgcgtgagttcgacactgccccacaggcctcttttgagcccgtctggcatccacctaaacaacatgggccctcagcatcaacagctgtccccctccgccatgtggccccagatgcacttgccagacggaagagcacagcctgggagcccagagtcaagtggacagccgaagggcgcatttggagagcaatttgatgcaaagaataaactaacttgctctatatgcttgaaggaattcaaaaacctcccagcgctaaacggacacatgcgcagccacggcggaatgcgcgcttcccctaatcttaaacaggaaataccaagaaagcaccaaccatctgtgcccaaagccgaggagccattaaagaccgtgcaagaaaagaagaagttccggcaccggccagaaccattgttcatacccccaccccctagttacaatcccaaccccgcagcttcttacagcggcgcaacgctctatcagtctcagctgcgctccccacgagtgcttggagatcatctcctgctggaccccacgcacgaattacctccgtacactcccccacccatgctttccccagttcggcaggggtcaggactctttagcaatgtacttatatcaggccatggaccaggagcccacccccagctgccattgacacccttgactcctactccacgggtcttgctgtgtaggagtaattccattgatggatctaatgtgactgtaacccccggacccggtgagcaaaccgtcgatgttgaaccccgaataaacatcgggctgcggtttcaggcggagattccggagctccaagacataagcgctctcgcgcaggatactcataaagctacccttgtgtggaagccctggccagaattagaaaaccacgacctgcagcagcgggtggagaacttacttaacttgtgctgttcatcagctctgcctggtgggggaacaaatagcgagtttgcccttcatagtctgttcgaggcaaaaggagacgtgatggtggccctggaaatgctcctcctgcggaagccggtaaggctcaagtgccacccactggccaattatcactacgcaggctccgataagtggactagcctcgaacggaaactgtttaacaaggccctggcgacgtatagtaaagatttcattttcgtgcagaagatggtgaagagtaaaactgtggcacagtgtgtcgagtattactacacgtggaagaaaatcatgaggctgggacgaaagcacaggaccaggcttgccgaaattatcgacgattgcgtgacaagtgaagaagaggaggaactggaggaggaagaggaggaagatcccgaggaggacaggaagtccacaaaggaagaggaatcggaagtgccgaagtcacctgaaccaccccctgtccccgtactggcacccacagagggaccccctctacaagcgctgggccaacccagtggttccttcatttgtgagatgccgaactgcggcgctgattgtcggtgccacgttactccttttcttccacaggttttcagtagcagacaggccctcaatggtcatgcccgaatccatgggggtacaaaccaagtgactaaggctagaggggctatccctagcgggaagcagaagccaggaggcactcagtccgggtactgtagtgtgaagtcgtcccccagccattcaaccacgagcggggaaacggaccctaccactattttcccatgtaaagaatgcgggaaagtcttttttaagattaagtctcgaaatgcccacatgaaaacccaccgacagcaggaagagcagcagagacaaaaagcccagaaggcggcatttgcagctgaaatggccgcaactatagagcgaaccaccgggcctgtcggtgccccaggcctgctgcccctggaccagctgtctctgatcaaaccaattaaggatgtggatatcctcgacgatgacgtggtacaacaactcggtggcgtgatggaagaggctgaagtcgtggacacagaccttctccttgatgaccaagacagcgtactcctgcagggggatgcagaactgtag

SEQ ID NO: 288838 - DNA, 7373 bp, Artificial Sequence
  derived and/or modified sequence
ggagggggcgaggatggggagcaatgcaaagctctgctcgccccccatctcaccccccaagcggatactggtcttctcgtcggattgcccatgcacttgttgcagaaacagccaaggccctggctgtggagaatgctgaaggaagaagacgcagaagcaggacgaccctgaaagattcagcctcttcatcctcaaacaggaccaggcctcctcttcccacctgtccagcagcatgaaagcagcatgattggccgaccgcaggagaagcccccagaaccaggcccccaactcagccatctgcggaggtcaaggtgtgagcgacgtctcctcaccacagtgctgtgtggtctatacctcagccagggagaggatgtgaaaccccccgccctgcacatgagtggtacaggccaacaggaacacctggctccagccacgttcacagacatgtcagccgtggagtagtgctgacacttttctctcagcttctcagggtttcagtccttttgggtttgttttatttaccttttttatggttttgtggctggacgttcacaaccaaggcagacagcatgggtgaccagcaactgtacaagaccaaccatgtggcccatggtagtgagaaccttttctaccaacagccaccacttggcgtccacagcgggctgaaccacaactatgggaatgcagttacagggggcggaatggatgcccctcaggcctcgccaatctccccccacttccctcaagatacacgggatggtctgggcttgcctgttggctccaaaaaccttggccaaatggatacctcgaggcagggagggtggggaagtcatgcagggcctggaaaccatgtccagctacgtggaaacctggccaactcaaacatgatgtggggggcaccagcccaggctgagcccactgatggctaccaatacacctactcccaggccagcgagatccggacccagaagcttaccagcggtgtcttacacaagctggactctttcacccaggtgtttgccaaccaaaacctgcgaattcaggtcaacaatatggcccaggtgctgcacactcagtcagcagtgatggatggagcccctgacagtgctctccgccagctgctgtctcagaagcccatggagcccccagcaccggctatcccttcccgctaccagcaggtgccccagcagcctcaccctggtttcactggtgggctgtccaaaccagctcttcaggtcgggcagcaccctacccaagggcacctgtattatgactaccagcagcctctggctcaggtgccagtgcagggaggacagccactgcaggccccacagatgctgtcacagcacatgcaacagatgcagcagcaccagtattacccaccgcagcaacagcagcaagccgggcaacagcgtatctccatgcaagaaatacagacgcagccgcaacaaattcgcccatcacagccacagccgccgccacagcagcagcagccgcagcagctacagctgcagcagcggcagggttcaatgcagatacctcagtattatcagccccaacccatgatgcagcacttgcaagagcagcagcagcaacagatgcacctgcagcctccttcttatcacagggaccctcaccagtataccccagagcaggcacacactgtccagctgattcccctgggctccatgtcccagtactactaccaggagccccagcagccctacagccaccccctctaccagcagagccacctgtcccagcaccagcagcgtgaggacagtcagctgaagacctactctagtgacagacaggcccaggccatgctgagctcccatggggacctggggcctcctgacacaggaatgggagacccagcgagctcagatctgacccgggtcagcagcaccctcccccatcgccccctcctatcccccagtgggatccacctcaacaacatggggcctcagcatcagcagctgtctcccagtgccatgtggccccagatgcacctacctgatgggagagcccagccagggtcccctgagtcaagtggccaacccaaaggagcgtttggggagcagtttgatgccaagaacaagctgacatgctccatctgcctgaaggagttcaagaacctgcctgccctgaatggccacatgcggtcccacgggggaatgagggcctcccccaacctcaaacaggaaatccccaggaagcatcagccgagtgtgcccaaagccgaggagcccctcaagaccgtgcaggagaagaaaaagttccggcaccggccggaacctctcttcatcccgccgccgccctcctacaacccgaaccccgctgcctcctactcgggcgccaccctgtaccagagccagctgcgctccccgcgcgtcctcggggaccacctgctcctggaccccacccacgagctgcccccttacacgcccccacccatgctgagcccggtgcgccagggctcggggctcttcagcaatgtcctcatctccggccacggccctggcgcccacccgcagctgcccctgacgcccctgacgcccacaccacgggtgctgctgtgtcgctccaacagcatcgatggcagcaacgtgacggtcaccccagggcctggagagcagactgtagatgttgaaccacgcatcaacattggcttgagattccaagcagaaatccctgaactccaagatatctctgccctggcccaggacacacacaaggccacactggtatggaagccctggccagaactagaaaaccatgacctccagcaaagagtggagaatcttctgaatttgtgctgttccagtgcattgccaggtggagggaccaattctgaatttgctttgcactctctgtttgaggccaaaggtgatgtgatggttgctctggaaatgctgctactgcggaagcctgtcaggttaaaatgtcatcctttagcaaattaccactatgccggttcggacaagtggacctccctagaaagaaaactgtttaacaaagcactagccacttacagcaaagactttatttttgtacagaagatggtgaagtccaagacggtggctcagtgcgtggagtactactacacgtggaaaaagatcatgcggctggggcggaaacaccggacacgcctggcagaaatcatcgacgattgtgtgacaagtgaagaagaagaagagttagaggaggaggaggaggaggacccggaagaagataggaaatccacaaaagaagaagagagtgaggtgccgaagtccccggagccaccacccgtccccgtcctggctcccacggaggggccgcccctgcaggccctgggccagccctcaggctccttcatctgtgaaatgcccaactgtggggctgactgtagatgtcatgtcactccctttcttccccaggtgttcagctcccgacaggcactgaatggccatgcccgcatccacgggggcaccaaccaggtgaccaaggcccgaggtgccatcccctctgggaagcagaagcctggtggcacccagagtgggtactgttcggtaaagagctcaccctctcacagcaccaccagcggcgagacagaccccaccaccatcttcccctgcaaggagtgtggcaaagtcttcttcaagatcaaaagccgaaatgcacacatgaaaactcacaggcagcaggaggaacaacagaggcaaaaggctcagaaggcggcttttgcagctgagatggcagccacgattgagaggactacggggcccgtgggggcgccggggctgctgcccctggaccagctgagtctgatcaaacccatcaaggatgtggacatcctcgacgacgacgtcgtccagcagttgggaggtgtcatggaagaggctgaagttgtggacaccgatcttctcttggatgatcaagattcagtcttgcttcagggtgacgcagaactataaagccctgtgtgtcacttagagacagtgaaaacccacggcctccatcttcattaatcaggaaacctggactgcctgcttgttttgtaacccttttaaactacctgttttaaaagtggtcattttattcaggtttagaaaaaaaaatcctatttcttttccttttatttaaaaaaatttgtttttgtggggggttgggggaataaataattggcacaactatctttaagaggtgtttcatctgggctaccttctcatgaaatcattcccagtagggactgaagctgaccttcatgttccattgcattcagatgtcaaccatcccggttgccttttatcccaaagcttgctgtgagtgtgtgtgtgtgagacgcaggcgaccctcttagtactggggtcttggggccaacttttcccatcaagcgttactttgattctgttctgacctcattccatagtttgcagtgagcatggcatctttgcctggagatactatgctaggggcagctttccaggggcaaagcaagccctcgtgttacacggctctcctccagctcacacgacatgtgaggagatgaccaaatgtgaaaacaggtttcccctgtgttgcccgtcatcctttggcccgttcacaggaatggagtactgtataattttaggctttcattcccagcagtgtttactgaggacctggttttctagaacaggtgtgtcctgtcctcttccatgttccctgggggctggtcagctccaagttgtgggtggcagagctgtgtttcagcatgaactgactagagacccatctggaggcaaatattaagttgccaggactgctttcacttcagggtgattgaaggacacatattgaagtacctagaatgccagaaagtgttctattgcccaaaaaacaaatcagaaaagcctattcttttttgcaacgctgttaatgattagtggagttctgaaattactttgtgccacttggaagtactgtgaaaccgcattcactgggattttgctgtaattcacatccgctggactgaagtttaccttgatgttagctataagaaatagttttctaacacatacgatagcaaatacaagacaaatagcattgaaggccaacaaaaatggcttcagatacaccttagctataatgtttgcattcaaacaatgaatgtattcatcacaagtcacttaccaaagcacttctagacttctccaacctccatgactttgctctgcttcctcctgtccctgtcagcagggttgctgtttgtacttgaaggtaataaacctgtaatccttcaaaaatgccatttagccccaggcttctgagctgagtcagactgacccatcccaccgttagggcaaaagtcaggctgggacacagcgccagtacagagaggatcctgcttcatgcaactccccttttggagttaatgcagcgtgatttcctgggccggtgttttcaggcatcgcccaccccaggtatgctggttcccagctccacgtaggtgtgcctatcacgctgggccactttgctgacaacattcatagcttgacatgagagagaatatcagcagaagcatgagagtaggacctgacgtctttgactctgcaaaagcatttagcacacactcatgggggggaactggctgtgagccacagcagccccacacagacagtggtctctgaacttcaggaaagccatggacagaaaaaaaaataaaattcttttccatcattctattttcaaagaggtcttggcgttttcctacatcttttgtttagagggggaaaaaagtttcatttgctgccatttcagaaaggttatgctatcctgttttatccaagcagttgtgagtcaggaactgcctgggcagtgtgcatcaactttgtggccgaaccattacagctgtcatatccttggctgatcgtctctcccagggactactgccctccacttagtgtctgagggtaagcctagaagggtgctgctattgggtctatggaagcttatctatcaaaggagcaaacatccagaaaagtgtttataaagcaaatgtattgcctctgtttagagatttgcccagctgttccagttttaaacattaaaaaataaactcagttgccatggcaaaaatagaatgcacagcttacttataattttccatgcagtatagcataaggatttttgacttgaaacaaccaaagaactcctccttaacgagacagttcaaattcctgaattagtatttcttgactatcaacttaaagaatggacttcctagtacaatgttgcacttatttttttttctgaaataattctgcctgcatgtatgtgttgtgttttagcttctccccttaccccaccccaaagatcttttcttcctaatggttaatgtctcaactcggttactgtttactatcagatggtttttcattagtgaatttagacctctttgagaaagcttgtatataaaaagttaacagatatattttatggaaaaacccatcttattttcaaatatatttaactgctgttatattttattagaggaaggttgtaaatattttctaggagttctattgtaaagaaaagtatttttgaaaaaaattaatgtaataaaaaggaaaacatttttaaatagtggttgtgattgcttcctgttctggcttcgttatgttctattctcagcagatgaattgcatgccttccatatcaggatgtaatttattcaggtttgcactattataagttgacatcataatatctagtgtgcttaactgtattttcccggaatgcaagtcccttggtccatattaaagcactatgtatagcatattcataatttttcttttgtaacgtgtgtatttttaataaggattttatgtaacattttggcaacaagaggaccgtattttctagtgaattttataataacattttgctaaaaatgtttcttcctaggtcagtttttgttaaggtgaaccaaaagtcttattttaccaggggtttaaaaaaagtttgaagcttgaaagcaaagttatatttaaacatcatatgtaacaaataaataaagatgttttatagacttgtcctaaaaaggtgcattccttaaaaaaaaaaaaaagaaaaaaaaaggaaactggggcattctaggttgtttcccctccaagtgataagctttttttttttcttaattatcacaatgcttcttcaaaaagggaaccagggaaattttatttaacacattctaatcattagcctctcagaaagttattacagttcctatagatgggcattcatcaaatggagatgtaaccaaacagacactgtcatatttatttgtgaaaacctgattcaatattgcatcagctgctctgaaaataaaatattaatcttttgcgttt

SEQ ID NO: 288839 - DNA, 3390 bp, Artificial Sequence
  derived and/or modified sequence
atgggcgaccagcagctgtacaagaccaaccacgtggcccacggcagcgagaacctgttctaccagcagccccccctgggcgtgcacagcggcctgaaccacaactacggcaacgccgtgaccggcggcggcatggacgccccccaggccagccccatcagcccccacttcccccaggacaccagagacggcctgggcctgcccgtgggcagcaagaacctgggccagatggacaccagcagacagggcggctggggcagccacgccggccccggcaaccacgtgcagctgagaggcaacctggccaacagcaacatgatgtggggcgcccccgcccaggccgagcccaccgacggctaccagtacacctacagccaggccagcgagatcagaacccagaagctgaccagcggcgtgctgcacaagctggacagcttcacccaggtgttcgccaaccagaacctgagaatccaggtgaacaacatggcccaggtgctgcacacccagagcgccgtgatggacggcgcccccgacagcgccctgagacagctgctgagccagaagcccatggagccccccgcccccgccatccccagcagataccagcaggtgccccagcagccccaccccggcttcaccggcggcctgagcaagcccgccctgcaggtgggccagcaccccacccagggccacctgtactacgactaccagcagcccctggcccaggtgcccgtgcagggcggccagcccctgcaggccccccagatgctgagccagcacatgcagcagatgcagcagcaccagtactaccccccccagcagcagcagcaggccggccagcagagaatcagcatgcaggagatccagacccagccccagcagatcagacccagccagccccagccccccccccagcagcagcagccccagcagctgcagctgcagcagagacagggcagcatgcagatcccccagtactaccagccccagcccatgatgcagcacctgcaggagcagcagcagcagcagatgcacctgcagccccccagctaccacagagacccccaccagtacacccccgagcaggcccacaccgtgcagctgatccccctgggcagcatgagccagtactactaccaggagccccagcagccctacagccaccccctgtaccagcagagccacctgagccagcaccagcagagagaggacagccagctgaagacctacagcagcgacagacaggcccaggccatgctgagcagccacggcgacctgggcccccccgacaccggcatgggcgaccccgccagcagcgacctgaccagagtgagcagcaccctgccccacagacccctgctgagccccagcggcatccacctgaacaacatgggcccccagcaccagcagctgagccccagcgccatgtggccccagatgcacctgcccgacggcagagcccagcccggcagccccgagagcagcggccagcccaagggcgccttcggcgagcagttcgacgccaagaacaagctgacctgcagcatctgcctgaaggagttcaagaacctgcccgccctgaacggccacatgagaagccacggcggcatgagagccagccccaacctgaagcaggagatccccagaaagcaccagcccagcgtgcccaaggccgaggagcccctgaagaccgtgcaggagaagaagaagttcagacacagacccgagcccctgttcatcccccccccccccagctacaaccccaaccccgccgccagctacagcggcgccaccctgtaccagagccagctgagaagccccagagtgctgggcgaccacctgctgctggaccccacccacgagctgcccccctacacccccccccccatgctgagccccgtgagacagggcagcggcctgttcagcaacgtgctgatcagcggccacggccccggcgcccacccccagctgcccctgacccccctgacccccacccccagagtgctgctgtgcagaagcaacagcatcgacggcagcaacgtgaccgtgacccccggccccggcgagcagaccgtggacgtggagcccagaatcaacatcggcctgagattccaggccgagatccccgagctgcaggacatcagcgccctggcccaggacacccacaaggccaccctggtgtggaagccctggcccgagctggagaaccacgacctgcagcagagagtggagaacctgctgaacctgtgctgcagcagcgccctgcccggcggcggcaccaacagcgagttcgccctgcacagcctgttcgaggccaagggcgacgtgatggtggccctggagatgctgctgctgagaaagcccgtgagactgaagtgccaccccctggccaactaccactacgccggcagcgacaagtggaccagcctggagagaaagctgttcaacaaggccctggccacctacagcaaggacttcatcttcgtgcagaagatggtgaagagcaagaccgtggcccagtgcgtggagtactactacacctggaagaagatcatgagactgggcagaaagcacagaaccagactggccgagatcatcgacgactgcgtgaccagcgaggaggaggaggagctggaggaggaggaggaggaggaccccgaggaggacagaaagagcaccaaggaggaggagagcgaggtgcccaagagccccgagcccccccccgtgcccgtgctggcccccaccgagggcccccccctgcaggccctgggccagcccagcggcagcttcatctgcgagatgcccaactgcggcgccgactgcagatgccacgtgacccccttcctgccccaggtgttcagcagcagacaggccctgaacggccacgccagaatccacggcggcaccaaccaggtgaccaaggccagaggcgccatccccagcggcaagcagaagcccggcggcacccagagcggctactgcagcgtgaagagcagccccagccacagcaccaccagcggcgagaccgaccccaccaccatcttcccctgcaaggagtgcggcaaggtgttcttcaagatcaagagcagaaacgcccacatgaagacccacagacagcaggaggagcagcagagacagaaggcccagaaggccgccttcgccgccgagatggccgccaccatcgagagaaccaccggccccgtgggcgcccccggcctgctgcccctggaccagctgagcctgatcaagcccatcaaggacgtggacatcctggacgacgacgtggtgcagcagctgggcggcgtgatggaggaggccgaggtggtggacaccgacctgctgctggacgaccaggacagcgtgctgctgcagggcgacgccgagctgtag

SEQ ID NO: 288840 - protein, 1742 aa, Artificial Sequence
  derived and/or modified sequence
MTSSSPAGLEGSDLSSINTMMSAVMSVGKVTENGGSPQGIKSPSKPPGPNRIGRRNQETKEEKSSYNCPLCEKICTTQHQLTMHIRQHNTDTGGADHSCSICGKSLSSASSLDRHMLVHSGERPYKCTVCGQSFTTNGNMHRHMKIHEKDPNSATATAPPSPLKRRRLSSKRKLSHDAESEREDPAPAKKMVEDGQSGDLEKKADEVFHCPVCFKEFVCKYGLETHMETHSDNPLRCDICCVTFRTHRGLLRHNALVHKQLPRDAMGRPFIQNNPSIPAGFHDLGFTDFSCRKFPRISQAWCETNLRRCISEQHRFVCDTCDKAFPMLCSLALHKQTHVAADQGQEKPQATPLPGDALDQKGFLALLGLQHTKDVRPAPAEEPLPDDNQAIQLQTLKCQLPQDPGCTNLLSLSPFEAASLGGSLTVLPATKDSIKHLSLQPFQKGFIIQPDSSIVVKPISGESAIELADIQQILKMAASAPPQISLPPFSKAPAAPLQAIFKHMPPLKPKPLVTPRTVVATSTPPPLINAQQASPGCISPSLPPPPLKLLKGSVEAASNAHLLQSKSGTQPHAATRLSLQQPRAELPGQPEMKTQLEQDSIIEALLPLSMEAKIKQEITEGELKAFMTAPGGKKTPAMRKVLYPCRFCNQVFAFSGVLRAHVRSHLGISPYQCNICDYIAADKAALIRHLRTHSGERPYICKICHYPFTVKANCERHLRKKHLKATRKDIEKNIEYVSSSAAELVDAFCAPDTVCRLCGEDLKHYRALRIHMRTHCGRGLGGGHKGRKPFECKECSAAFAAKRNCIHHILKQHLHVPEQDIESYVLAADGLGPAEAPAAEASGRGEDSGCAALGDCKPLTAFLEPQNGFLHRGPTQPPPPHVSIKLEPASSFAVDFNEPLDFSQKGLALVQVKQENISFLSPSSLVPYDCSMEPIDLSIPKNFRKGDKDLATPSEAKKPEEEAGSSEQPSPCPAPGPSLPVTLGPSGILESPMAPAPAATPEPPAQPLQGPVQLAVPIYSSALVSSPPLVGSSALLSGTALLRPLRPKPPLLLPKPPVTEELPPLASIAQIISSVSSAPTLLKTKVADPGPASTGSNTTASDSLGGSVPKAATTATPAATTSPKESSEPPAPASSPEAASPTEQGPAGTSKKRGRKRGMRSRPRANSGGVDLDSSGEFASIEKMLATTDTNKFSPFLQTAEDNTQDEVAGAPADHHGPSDEEQGSPPEDKLLRAKRNSYTNCLQKITCPHCPRVFPWASSLQRHMLTHTGQKPFPCQKCDAFFSTKSNCERHQLRKHGVTTCSLRRNGLIPQSKESDVGSHDSTDSQSDAETAAAAGEVLDLTSRDREQPSEGATELRQVAGDAPVEQATAETASPVHREEHGRGESHEPEEEHGTEESTGDADGAEEDASSNQSLDLDFATKLMDFKLAEGDGEAGAGGAASQEQKLACDTCGKSFKFLGTLSRHRKAHGRQEPKDEKGDGASTAEEGPQPAPEQEEKPPETPAEVVESAPGAGEAPAEKLAEETEGPSDGESAAEKRSSEKSDDDKKPKTDSPKSVASKADKRKKVCSVCNKRFWSLQDLTRHMRSHTGERPYKCQTCERTFTLKHSLVRHQRIHQKARHAKHHGKDSDKEERGEEDSENESTHSGNNAVSENEAELAPNASNHMAVTRSRKEGLASATKDCSHREEKVTAGWPSEPGQGDLNPESPAALGQDLLEPRSKRPAHPILATADGASQLVGME

SEQ ID NO: 288841 - protein, 778 aa, Artificial Sequence
  derived and/or modified sequence
MTSSSPAGLEGSDLSSINTMMSAVMSVGKVTENGGSPQGIKSPSKPPGPNRIGRRNQETKEEKSSYNCPLCEKICTTQHQLTMHIRQHNTDTGGADHSCSICGKSLSSASSLDRHMLVHSGERPYKCTVCGQSFTTNGNMHRHMKIHEKDPNSATATAPPSPLKRRRLSSKRKLSHDAESEREDPAPAKKMVEDGQSGDLEKKADEVFHCPVCFKEFVCKYGLETHMETHSDNPLRCDICCVTFRTHRGLLRHNALVHKQLPRDAMGRPFIQNNPSIPAGFHDLGFTDFSCRKFPRISQAWCETNLRRCISEQHRFVCDTCDKAFPMLCSLALHKQTHVAADQGQEKPQATPLPGDALDQKGFLALLGLQHTKDVRPAPAEEPLPDDNQAIQLQTLKCQLPQDPGCTNLLSLSPFEAASLGGSLTVLPATKDSIKHLSLQPFQKGFIIQPDSSIVVKPISGESAIELADIQQILKMAASAPPQISLPPFSKAPAAPLQAIFKHMPPLKPKPLVTPRTVVATSTPPPLINAQQASPGCISPSLPPPPLKLLKGSVEAASNAHLLQSKSGTQPHAATRLSLQQPRAELPGQPEMKTQLEQDSIIEALLPLSMEAKIKQEITEGELKAFMTAPGGKKTPAMRKVLYPCRFCNQVFAFSGVLRAHVRSHLGISPYQCNICDYIAADKAALIRHLRTHSGERPYICKICHYPFTVKANCERHLRKKHLKATRKDIEKNIEYVSSSAAELVDAFCAPDTVCRLCGEDLKHYRALRIHMRTHCGR

SEQ ID NO: 288842 - protein, 62 aa, Artificial Sequence
  derived and/or modified sequence
MTSSSPAGLEGSDLSSINTMMSAVMSVGKVTENGGSPQGIKSPSKPPGPNRIGRRNQVSVHT

SEQ ID NO: 288843 - DNA, 5229 bp, Artificial Sequence
  derived and/or modified sequence
atgacatcgtccagccccgcgggtctggagggatctgatcttagttctatcaataccatgatgagcgctgtgatgagcgtggggaaagtgactgagaacggcggttctcctcagggcattaaatcaccttccaaaccacctggcccaaacagaattggtagacgcaaccaagaaacaaaagaggaaaagagtagctataattgtccactttgcgaaaaaatctgcaccacgcaacaccagctgaccatgcacatcaggcagcacaataccgacaccggcggggcggatcactcctgctccatttgcggcaagtccctgagctctgcctcgagtctggatagacacatgttggtacacagtggggagcgcccgtacaaatgtacagtatgcggacagtccttcactactaatggcaatatgcatcgacacatgaagattcacgaaaaagaccccaactccgctacagccaccgcacctccatctccacttaagcgtcggcggctgagctcgaagaggaaactgtcacacgatgcggagtctgagcgtgaggatccagcaccggcaaagaagatggtggaagatggccagagtggcgacctagagaagaaggctgatgaagtgttccactgtcctgtgtgtttcaaagaatttgtgtgcaaatacgggttggaaacacacatggagacccacagcgataatcccctgagatgcgacatttgctgtgtgacgttccgtacgcatagggggcttctgcgccacaatgctctcgtgcacaagcaactgccacgcgatgcaatgggccgcccattcatccagaacaacccaagcatcccggccgggttccacgacctcggttttactgacttttcgtgtaggaagtttccccggatctcccaggcatggtgcgaaaccaacctgagacggtgcatttctgagcaacacagattcgtgtgcgatacctgtgataaagcctttccaatgctctgttcccttgccttgcacaaacagacacatgtagccgccgatcaaggccaggagaaacctcaggctacaccactgcctggcgacgcactcgaccagaaagggttcttggcgctgctcggacttcagcacaccaaagacgttaggcccgccccagcggaggaaccactgcctgatgacaatcaggctatccagctgcaaaccctgaaatgccaattgccgcaagacccaggatgcacgaacctactgtccctttcacctttcgaggccgcgtcgctgggcggatcacttacggtcctccctgctaccaaggactctataaagcatctgtctctacagcccttccaaaaagggtttatcatacaacccgactcttctattgtggtaaaacctatcagcggggaatccgccattgagctcgcagacattcagcagatcctgaagatggctgcaagcgctccaccacagatctcgctgccacctttttcgaaggcccctgccgcccccctgcaagccattttcaaacacatgccaccccttaaacctaaacctctggtgactccccgaactgtggtggccacctcaactcctcctccactgatcaacgcccagcaagcctcccctggctgtatctcaccgagtcttccaccccctcccctaaagctgctgaagggcagtgtggaggcagcctctaatgcccaccttctccagtctaaatcaggcactcagccacatgctgcgactcgcttgagtctgcagcagccgcgggctgagctaccaggccaacccgagatgaaaacgcagttagaacaggacagcattatcgaggccctactcccactgtcaatggaggctaaaatcaaacaggagatcaccgaaggcgaacttaaggccttcatgaccgcccccggaggcaaaaaaacacccgcgatgcggaaggtgctgtacccttgtaggttttgtaatcaggtttttgctttctcaggcgtgttacgggctcacgttaggagtcatctgggcatcagcccgtatcaatgtaacatatgtgattacattgcagcagacaaggctgctctgatcagacatctccgcacccattctggtgagcgcccttacatctgcaagatatgtcactatccctttacggtgaaggccaattgtgaacgacacctgcgcaagaaacatctgaaagcaacacgcaaagacatcgagaagaatatcgaatatgtgtcttcttcagcagccgaactggtggatgccttctgtgccccggacactgtgtgtagactttgtggtgaggacctgaagcactatagggcccttaggattcatatgcgaacgcactgtggccggggactgggggggggacataaaggcaggaagccctttgagtgcaaagagtgtagtgccgctttcgccgctaagcggaattgcatccaccatattcttaagcagcacctgcacgtgccagagcaggatattgaaagctacgtgctggccgccgatggcctgggacccgcagaagcaccagctgcggaggcctctggcaggggtgaggactctggctgcgctgccctgggagattgtaagccactgactgcctttctcgaaccacagaatgggtttttgcacagaggcccgacacagcccccgccacctcacgtcagcattaaactcgaacccgccagttcttttgccgtggattttaatgagcccctggacttttcccagaaaggtctggctcttgtgcaggtgaaacaggaaaatatcagtttccttagtccctccagcctcgtgccttatgactgctccatggaaccgatcgatttgtcaataccaaagaatttcaggaaaggggacaaagatcttgccacgccttcagaagccaagaaacctgaagaagaggccggctcttccgagcagccctcaccatgtcctgctccgggcccttctctgccagtgaccctggggccatcaggtatcttggagagtcctatggcccctgctcccgcagcaacccctgaaccacctgcccagcccctgcagggtcccgtccagctcgctgtcccgatttatagcagcgcactcgtcagtagccctcctctggtcggcagttctgccctcctgtccggcacagccttgctccgaccactgaggcccaagcccccactgctgcttccaaaaccgcccgtgactgaagaattgccccctctggcatctatcgcgcaaattatttcttccgtctcttcggcccctacactccttaaaactaaggtagccgaccccggcccagcgtcaactgggtctaatacaactgcttccgactctctggggggatctgtccccaaggccgcgacaaccgcgacaccagccgccacaacttctcctaaagagagctccgaacccccagctcctgcctcaagccccgaagccgcttccccgacagagcaaggaccagcagggaccagcaagaagagagggcgtaaaagagggatgaggtctaggccccgggcaaactccggcggagtcgatttagacagtagcggcgaattcgcttccatagaaaagatgctcgcaaccaccgatactaacaagttctcccctttcttgcagactgccgaggacaatacccaggatgaggtggccggcgcccctgcagatcaccacggcccttccgacgaagagcagggctctccccccgaggataagctgttgcgagcaaagaggaatagttatactaactgcttacagaagatcacttgtccacactgtcccagagtatttccttgggcctcttccctgcagcggcacatgctgacacatacaggccagaaaccgtttccctgtcagaaatgtgacgcattcttcagcacgaaatctaattgtgagcggcatcagttgcgtaaacacggagttaccacctgcagtctaaggaggaatggcctgattccccagtcgaaggagtcagatgttggcagccacgatagcactgattcacagagcgacgccgaaactgctgcagcagccggagaagtgctagatctgaccagtcgggatcgggagcaaccaagcgaaggcgctactgagctcagacaggtagccggtgatgcccctgttgagcaggccactgccgagacagcctctcccgttcaccgcgaagaacacgggcggggagagagccacgaacctgaagaagaacacggaaccgaggagtccacaggcgacgccgacggcgctgaagaagacgcctcttctaaccaatccttagacctagattttgccactaaactgatggattttaaactggcggagggcgatggcgaggccggcgcgggtggagctgctagccaggaacaaaagcttgcctgtgatacatgtggcaagagcttcaaattcctcggcacactgtcccgacaccgcaaagctcatgggcggcaggagcccaaagatgaaaagggtgatggtgccagcaccgccgaggagggaccacaaccagcccccgaacaggaagagaagcctcccgagaccccagcagaggtggtagaaagtgccccaggagcgggcgaggcccctgccgagaagctagcagaggaaacggaggggcccagcgatggggagagcgctgccgagaagcggagctcggagaagagcgacgatgacaaaaaacccaaaacagactcccctaaatcagtcgcttctaaagctgacaagaggaagaaagtctgttctgtgtgtaataagagattttggagtctccaggatctgacaagacacatgcggtcccacaccggggagcgtccatataaatgtcaaacctgtgagcgaacattcaccctgaagcatagcctggttcggcaccagcggattcatcagaaggctcgccacgccaagcaccatgggaaagatagcgataaagaagagagaggggaggaagatagcgagaatgagagcacacacagtggaaacaatgccgtttccgagaacgaagcagagttagccccaaacgcctcaaatcacatggctgttacacgctcacgcaaggaaggactagcgtccgcgaccaaggattgctctcatcgcgaagaaaaagtgaccgctgggtggccatctgagcctggccagggggacctgaaccccgaaagtcccgccgctctgggtcaggatctcctcgaacctaggtcaaaacgacctgcacaccccatcctcgcaactgcggacggagcatcccagctcgtcggaatggagtag

SEQ ID NO: 288844 - DNA, 5229 bp, Artificial Sequence
  derived and/or modified sequence
atgaccagcagcagccctgctggcctggagggcagtgacctgagcagcatcaacaccatgatgtctgctgtgatgtctgtgggcaaggtgacagaaaatggaggcagcccccagggcatcaagagccccagcaagcccccaggccccaaccgcatcggcagaagaaaccaggagaccaaggaggagaagagcagctacaactgccccctgtgtgagaagatctgcaccacccagcaccagctgaccatgcacatccggcagcacaacacagacaccggcggcgctgaccacagctgcagcatctgtgggaagagcctgagcagcgccagcagcctggacagacacatgctggtgcacagcggggagcggccctacaagtgcaccgtgtgtggccagagcttcaccaccaatggaaacatgcaccgccacatgaagatccacgagaaggaccccaacagcgccacagccacagccccacccagccccctgaagagaagaaggctgagcagcaagaggaagctgagccatgatgctgagagcgagagagaagatcctgccccagccaagaagatggtggaggatggccagagcggggacctggagaagaaggcagatgaggtgttccactgccctgtgtgcttcaaggagtttgtgtgcaagtatggcctggagacccacatggagacccacagcgacaaccccctgcgctgtgacatctgctgcgtgaccttccgcacccaccggggcctgctgcggcacaatgccctggtgcacaagcagctgcccagagatgccatgggccggcccttcatccagaacaaccccagcatcccagctggcttccatgacctgggcttcacagacttcagctgcaggaagttcccccgcatcagccaggcctggtgtgagaccaacctgcggcgctgcatcagcgagcagcacagatttgtgtgtgacacctgtgacaaggccttccccatgctgtgcagcctggccctgcacaagcagacccacgtggccgctgaccagggccaggagaagccccaggccacccccctgcctggagatgccctggaccagaagggcttcctggccctgctgggcctgcagcacaccaaggatgtgcggcctgccccagctgaggagcccctgcctgatgacaaccaggccatccagctgcagaccctgaagtgccagctgccccaggaccccggctgcaccaacctgctgagcctgagcccctttgaagctgccagcctgggcggcagcctgactgtgctgcctgccaccaaggacagcatcaagcacctgagcctgcagcccttccagaagggcttcatcatccagcctgacagcagcatcgtggtgaagcccatcagcggggagagcgccatcgagctggccgacatccagcagatcctgaagatggccgccagcgccccaccccagatcagcctgccccccttcagcaaggccccagctgcccccctgcaggccatcttcaagcacatgccacccctgaagcccaagcccctggtgacccccaggacagtggtggccaccagcaccccacctcctctcatcaatgcccagcaggccagccctggctgcatcagccccagcctgcccccaccacccctgaagctgctgaagggctctgtggaggccgccagcaatgcccacctgctgcagagcaagagcggcacccagccccatgctgccacccggctgagcctgcagcagcccagggctgagctgcccggccagcctgagatgaagacccagctggagcaggacagcatcatcgaggccctgctgcccctgtccatggaggccaagatcaagcaggagatcacagaaggagagctgaaggccttcatgacagcccctgggggcaagaagaccccagccatgaggaaggtgctgtacccctgccgcttctgcaaccaggtgtttgccttctctggagtgctgcgggcccacgtgcgcagccacctgggcatcagcccctaccagtgcaacatctgtgactacatcgctgctgacaaggccgccctgatccgccacctgcggacccacagcggggagcggccctacatctgcaagatctgccactaccccttcaccgtgaaggccaactgtgagcggcacctgaggaagaagcacctgaaggccaccaggaaggacatcgagaagaacatcgagtatgtgagcagcagcgctgctgagctggtggatgccttctgtgccccagacacagtgtgccgcctgtgtggggaggacctgaagcactaccgggccctgcgcatccacatgaggacccactgcggccggggcctgggcggcggccacaagggcaggaagccctttgagtgcaaggagtgcagcgctgcctttgctgccaagaggaactgcatccaccacatcctgaagcagcacctgcacgtgcctgagcaggacatcgagagctatgtgctggccgcagatggcctgggccctgctgaggccccagctgctgaggccagcggccgcggggaggacagcggctgtgccgccctgggggactgcaagcccctgacagccttcctggagccccagaatggcttcctgcaccggggccccacccagcccccacctcctcatgtgtccatcaagctggagcccgccagcagctttgctgtggacttcaatgagcccctggacttcagccagaagggcctggccctggtgcaggtgaagcaggagaacatctccttcctgagccccagcagcctggtgccctatgactgcagcatggagcccatcgacctgagcatccccaagaacttcagaaaaggagacaaggacctggccacccccagcgaggccaagaagccagaggaggaggccggcagcagcgagcagcccagcccctgcccagcccctggccccagcctgcctgtgaccctgggccccagcggcatcctggagagccccatggccccagccccagctgccaccccagagcccccagcccagcccctgcagggccctgtgcagctggccgtgcccatctacagcagcgccctggtgagcagcccccccctggtgggcagcagcgccctgctgtctggaacagccctgctgcggcccctgcggcccaagccacccctgctgctgcccaagccccctgtgacagaggagctgccccccctggccagcatcgcccagatcatcagctctgtgtcctctgcccccaccctgctgaagaccaaggtggccgaccccggccctgccagcacaggcagcaacaccacagccagtgacagcctgggcggctctgtgcccaaggccgccaccacagccaccccagctgccaccaccagccccaaggagagcagcgagcccccagccccagccagcagccctgaggccgccagccccacagagcagggccctgctggcaccagcaagaagaggggcaggaagaggggcatgaggagccggccccgggccaacagcggaggagtggacctggacagcagtggagaatttgccagcattgagaagatgctggccaccacagacaccaacaagttcagccccttcctgcagacagctgaggacaacacccaggatgaggtggccggggccccagctgaccaccacggccccagtgatgaggagcagggcagccccccagaggacaagctgctgcgggccaagaggaacagctacaccaactgcctgcagaagatcacctgcccccactgccccagggtcttcccctgggccagcagcctgcagaggcacatgctgacccacacaggccagaagcccttcccctgccagaagtgtgatgccttcttcagcaccaagagcaactgtgagcggcaccagctgaggaagcatggagtgaccacctgcagcctgcggagaaatggcctcatcccccagagcaaggagagtgatgtgggcagccatgacagcacagacagccagagtgatgctgagacagctgctgctgctggggaggtgctggacctgaccagccgggaccgggagcagcccagcgagggcgccacagagctgcggcaggtggccggagatgcccctgtggagcaggccacagctgagacagccagccctgtgcaccgggaggagcacggccgcggggagagccatgagcctgaggaggagcacggcacagaggagagcactggagatgctgatggagctgaggaggatgccagcagcaaccagagcctggacctggactttgccaccaagctgatggacttcaagctggccgagggagatggagaggccggggccggcggggccgccagccaggagcagaagctggcctgtgacacctgtgggaagagcttcaagttcctgggcaccctgagccgccacaggaaggcccacggccggcaggagcccaaggatgagaagggagatggagccagcacagctgaggagggcccccagcctgcccctgagcaggaggagaagcccccagagaccccagctgaggtggtggagagcgcccctggggccggggaggccccagctgagaagctggccgaggagacagagggccccagtgatggagagagcgctgctgagaagaggagcagcgagaagagtgatgatgacaagaagcccaagacagacagccccaagtctgtggccagcaaggctgacaagaggaagaaggtgtgcagcgtgtgcaacaagcgcttctggagcctgcaggacctgaccaggcacatgaggagccacactggagagcggccctacaagtgccagacctgtgagaggaccttcaccctgaagcacagcctggtgcgccaccagaggatccaccagaaggcccggcatgccaagcaccacggcaaggacagcgacaaggaggagcggggggaggaggacagtgaaaatgaaagcacccacagcggcaacaatgctgtgtctgaaaatgaagctgagctggccccaaatgccagcaaccacatggctgtgaccaggagcaggaaggagggcctggccagcgccaccaaggactgcagccaccgggaggagaaggtgacagctggctggcccagcgagcccggccagggcgacctgaaccctgagagccctgctgccctgggccaggacctgctggagcccaggagcaagaggcctgcccaccccatcctggccacagcagatggagccagccagctggtgggcatggagtag

SEQ ID NO: 288845 - DNA, 5229 bp, Artificial Sequence
  derived and/or modified sequence
atgaccagcagcagccccgccggcctggagggcagcgacctgagctccataaataccatgatgagtgcagtgatgtccgtcggtaaagtgactgaaaacgggggatctcctcaaggcatcaagagcccaagcaagcctcccggtccaaacaggattgggcgcagaaatcaagagacaaaggaggagaaatccagctacaattgccctctttgtgagaagatttgtacaacccagcaccagcttaccatgcacatcaggcagcacaacaccgatacagggggtgctgatcattcttgttcaatctgcggaaaatcgttaagtagtgcctcctccctggacagacatatgctcgttcattctggagagaggccatataagtgtaccgtgtgtggacaaagctttaccactaatgggaacatgcacaggcatatgaagatccatgagaaagatcctaatagcgccaccgcaacggcgccaccttctccattgaaaagacgccgtctttcaagcaagcggaagctttcccatgatgccgagtccgagagagaggaccctgcccctgctaaaaagatggtagaggacgggcagagtggagacttagagaaaaaggccgacgaagtattccattgccccgtctgtttcaaagaattcgtatgcaagtatgggctggagacacacatggagacacattcagacaatccactacggtgtgatatttgctgcgtaacttttcgtactcacaggggccttttacgccataatgccttggttcataagcagctgccacgtgacgccatgggtcggccctttattcaaaataacccctcaatcccggctgggtttcatgacctgggttttactgattttagctgcaggaaatttccacgaatttcgcaggcttggtgtgaaaccaacctcagaaggtgtattagcgagcaacaccgatttgtgtgcgatacttgcgataaagctttcccaatgctgtgctcattagccctccacaaacagacacatgtggcagctgaccaaggacaggagaaacctcaggcgacacccctgccgggtgacgcactcgaccagaaaggctttctcgccctgctcggcctccagcacacaaaagatgtgcgccctgcacctgccgaggaacctctccctgacgacaatcaagctattcaactccagacgctcaaatgccagttgcctcaagaccccggctgtactaacctgcttagcctgagcccatttgaggccgcatctcttggaggctcactgaccgtgctgccagctacaaaagattctatcaaacatctgagtctgcagccctttcagaagggattcattatccagcccgacagtagcattgttgttaagcccataagcggtgagagtgcgattgagcttgctgatatacagcaaatcctgaaaatggccgcctcagccccaccgcagattagtctgcctccattcagtaaagctcctgcagcacctctgcaagctatctttaaacacatgccccccttaaagccaaaacctctggtgactccacgtaccgtagtcgctacctcaaccccacctccactgatcaatgcacagcaggcttctcctgggtgcatttcaccttcactgccgcccccaccactgaaactcctgaagggctccgtggaggccgcttcaaacgctcatcttctgcagtctaagtctggcacgcaaccacacgcggccaccagattgtcgttgcagcagcccagggctgagttgcctggccaacccgagatgaaaacccagttagaacaggactccattattgaagcacttctgccactcagcatggaagccaagataaagcaggaaattaccgagggggaattaaaagccttcatgactgcacctggcgggaagaagacacctgcaatgaggaaagtgttgtatccgtgtcgattttgtaatcaggtcttcgccttctccggcgtgctaagggcccacgtgcggagccatctgggaatctctccttaccaatgcaacatttgcgactacattgctgctgataaagccgccctcattagacacctaagaactcactccggagagaggccatatatttgtaaaatatgccattacccattcaccgtgaaggccaactgcgagcgacacctgcgaaaaaaacaccttaaagccacacggaaagacatcgaaaaaaacattgaatatgtctcttcctctgccgctgaactggtcgatgctttttgtgcgcccgatactgtatgtcgtctttgcggcgaagacttaaaacattatagggctctgagaatacatatgcgcacacactgcggaaggggcctcggagggggacacaaagggagaaaaccctttgagtgcaaggagtgttcagccgcgtttgctgccaagaggaattgcattcaccatatacttaaacaacacctgcacgtgccggaacaggacatcgagagttatgtgcttgctgcagatggattagggcctgccgaagcccctgccgccgaggctagcggtagaggtgaggacagcgggtgtgcggctctaggcgattgtaaacccttgactgctttcctggaaccccagaatgggtttttgcatcgcggcccaacccagccccctccccctcacgtctctattaagttagaaccagcctcaagctttgccgtggacttcaacgagccactcgattttagccagaaaggactcgccctagttcaggttaaacaagaaaacataagttttctgtcgccctctagtctcgttccatacgactgctccatggaaccaattgatctgtctattcccaaaaattttcgtaaaggagacaaggacctcgcaactccatcagaagcaaagaagcccgaagaggaggctgggtcttctgaacagccatctccttgtccagctccaggcccctccctgccagtgactctcggcccatctggcatcctcgaaagtcccatggcccccgccccggctgcgacacctgaacctcctgctcaaccacttcagggccccgtacagctcgctgttcccatttactctagcgccttggtaagcagccccccactggttggctcgagcgcccttctttcggggacggcacttcttcgacccctgcgccccaaacctccccttctgttgcccaaacccccggtgactgaggagctgcctccattggcgagtattgcccaaatcatcagctcggtatcatctgcaccaacgcttttgaaaacgaaagtcgctgaccctggacccgcctctaccgggtccaacactaccgccagcgacagtctaggcgggagcgtaccaaaggctgcgaccaccgccactccagcagccactacaagcccaaaagagtccagcgaaccccctgcacctgctagttctcccgaggcagcatcccctacagaacagggaccagcagggacttcaaaaaaacgagggcgaaaacggggaatgcggtcccggcccagagcaaattcggggggagtggatctggatagctctggagagttcgcatccatcgagaaaatgctggctacgactgacacaaataaatttagcccctttctgcagaccgcagaggataacactcaggatgaagttgctggtgctcccgcggaccatcacgggccctccgatgaggaacaggggtcgcctcctgaggataaactgctgagagccaagagaaatagttatacaaattgcttgcagaaaattacttgcccacattgtcctagggtcttcccttgggcaagctccttgcaaagacatatgctcacccatacaggccagaaaccttttccatgccagaagtgcgatgctttcttttcaactaagtccaactgtgaaaggcaccaactgcgaaaacacggcgtgacaacatgtagcctgcgacgtaacggcctcatcccccaatcaaaggaaagcgatgtgggaagtcatgattcgacagattcccaatctgatgccgaaaccgctgcggcagcaggggaagtgctggatcttacctccagagaccgagagcagccatccgaaggtgctaccgagcttcgtcaagtcgctggggatgctccggtcgaacaggcaacagcggagaccgcctctcccgtccacagggaagaacacggtcgcggtgaatcacacgagcccgaggaagagcatgggacagaagagagcaccggagacgcagacggcgccgaagaagacgcctcctctaatcagtctctcgatctggattttgctactaaacttatggatttcaaactcgcagaaggagacggagaggccggggccggaggcgccgcttcacaagaacagaagcttgcttgcgacacgtgcggcaaaagttttaaatttctgggtaccctgagccgacatcgcaaggcccatggacgtcaagagcccaaggacgaaaagggggatggcgcctcaaccgccgaggagggcccccaaccggccccggagcaggaagaaaagccacctgagacacctgcagaagtggtcgaatcagcacccggggccggcgaagcccctgcagaaaaactcgctgaagagacagaaggcccttctgatggggaatccgctgctgaaaagcgctcgtctgagaagtcggatgatgacaaaaaacccaaaactgactcaccaaagagtgttgcctcaaaggctgacaagaggaaaaaggtctgctcagtgtgtaataagcggttctggtccttgcaggatctaaccagacacatgcgcagccacacaggagaaagaccgtataagtgtcagacctgtgaaaggacattcaccctgaaacactcactcgttcgacaccagagaattcatcagaaagcccgccacgcgaagcatcacggcaaagactccgacaaagaggagcgaggggaagaggacagtgagaacgagtcaactcatagcgggaacaacgctgtgtcagagaatgaggctgagctcgcccctaatgcaagtaaccatatggcagttactagatcccggaaggaagggcttgcatcggccaccaaggactgcagtcaccgggaagaaaaagtcaccgcaggctggccatccgagcctggtcagggggatctaaatcccgagtcaccggcagctctcggacaggacctcctcgagcccagatctaagcgtcccgcccacccaatactggccacagccgatggagcatcccagctcgtcggtatggaatag

SEQ ID NO: 288846 - DNA, 5228 bp, Artificial Sequence
  derived and/or modified sequence
atgaccagctcaagcccggctggactggagggttccgatctgagttcaatcaacaccatgatgtcagccgtgatgtcagtcggcaaagtgacagaaaacggagggtcaccccagggcatcaaaagtccatccaagccccctggccctaaccgtatagggcgacgcaatcaggaaaccaaggaggagaaatcctcttataactgcccactctgcgagaagatttgcaccactcagcatcagctcacaatgcatatccgccagcacaatacagacactggtggagcagatcacagttgcagcatatgtggtaaatcattaagcagcgcctctagtctggatcgccatatgcttgtccactctggcgaaagaccttacaagtgtacggtctgcgggcaatcttttaccacaaatggtaacatgcaccgacatatgaaaatacatgaaaaggacccaaattccgccacagccacagctcccccttcacctctcaaaaggagacgcctgagcagtaagcggaagctctctcatgacgctgaatcagaacgagaggatccagctccggctaagaagatggttgaagatggacagtcaggagatctagagaaaaaggctgatgaagtattccattgccctgtttgctttaaggagtttgtatgtaaatacggactggaaacacatatggagacacatagcgataatccactgcgctgcgatatatgttgtgtcacatttcgaacacacaggggcttgttgagacataatgccttggtgcataaacagcttcctcgggatgcgatgggtagaccgttcatccaaaataacccttccatcccagcaggttttcacgatctcggattcaccgacttttcatgtcgtaagttcccacgcatcagtcaggcttggtgcgagacaaatctgcgtagatgcatcagcgagcagcatagatttgtgtgtgacacttgcgataaggcgttccctatgctgtgctcactcgccctgcacaagcaaacccacgtcgcagcggaccagggccaagagaaaccacaggcaacaccgttgcccggtgatgccctcgaccagaaaggcttccttgccctgctgggtttgcaacatacaaaggatgtgcgccctgctcccgcagaagaacccctgcccgacgacaaccaggcaatacaactgcaaacactcaaatgtcagttgccgcaggatcctggatgcacaaatctcctctctctgagcccctttgaggccgcttccctagggggaagtctcacagtcctgccagcaaccaaggattctattaaacatttgtccttgcagccgtttcagaagggattcatcattcagcctgattcatcaatcgtggttaagccaatcagcggtgaatctgcaattgagctagcagacatacaacagatactgaagatggctgcgtccgcccctccccagatctcactgccgcctttctctaaggcgcctgcagcacctctgcaagccattttcaaacatatgcccccactcaaacctaagcctttggtgacgcctagaactgtggttgctaccagtacccctccgcctctaatcaatgcccagcaagcgagcccaggatgcataagtccttccctaccccctcccccacttaagctgctgaaggggagtgtggaggccgctagtaacgcacatctgctgcagagcaagagcggaacacagccacacgcagccacaaggcttagtctccaacagccacgtgcagagctgcccggtcagcccgagatgaagacccagcttgagcaagatagcataatcgaagccctgcttcccctgtcaatggaagccaaaataaaacaggagatcacagaaggtgaattgaaggcctttatgacagcacccggtggaaagaagaccccagccatgagaaaggtattatatccgtgtaggttctgtaatcaggtgttcgcattctcaggggtgcttagagctcacgtgaggtctcacctagggatctcaccttatcagtgtaatatttgtgattacattgccgcagataaggctgcgctgatacgccacctgagaacccactctggtgagcgtccctatatctgtaagatctgtcattaccccttcacagtgaaagcaaactgtgaaagacacctcaggaaaaagcatctgaaggcaacgagaaaggatatcgaaaagaacattgaatatgtgtcaagttctgcggctgaacttgtcgacgcattctgtgccccagacaccgtttgtcgcctatgcggagaggacctaaagcactatagggcacttcggattcacatgagaacccattgcgggagaggcctgggagggggacacaagggcaggaagccgttcgaatgtaaagagtgtagcgccgcttttgctgccaagcggaactgcattcatcacatattgaaacaacacctgcacgtgccagagcaggatattgagagctatgtgctcgccgctgacggcctcggcccagctgaagctcctgccgcagaggcttctggaagaggtgaggattccggttgtgccgcactgggggattgcaaacccctcaccgctttcctggagccacagaatgggttcctgcacagaggcccaactcagccccctcccccacacgtatctatcaagttagagcctgcctcctcattcgccgtggacttcaatgagcccttggactttagccagaaaggactggcattagtccaggtgaaacaggaaaacatcagttttttaagtcctagctccctagtgccctacgactgcagcatggagcctatcgatcttagtattccaaagaacttccggaagggtgacaaggacttggcgactccatccgaagcgaagaagcccgaggaggaggccggaagctccgaacaacccagcccttgtccagcccctgggcctagcctcccggtgacccttgggccaagcggtattctcgaaagtcccatggctcctgctcccgcagcaacaccggaacccccagcccagcccctgcaggggcctgtgcagctcgcagtgcccatctattcctcagcgctcgtgagctcgccgccactggtcggctccagcgcgttgttaagcgggaccgcattgctgcgtccactgaggccaaagcctccattactactgcctaaacccccagtgaccgaggagctgccccctttggcaagcattgctcagattatatcctcggtgagtagtgcccctactctgttgaagaccaaggttgcagaccccggacccgctagcactgggtctaatacgactgcgagcgattcactgggaggctctgttccgaaagcggctactacagctacccccgcagcaactacctctcccaaggagagcagtgagccaccagcccctgcatccagcccagaggcagcaagccccaccgaacaaggacctgcaggcacctccaaaaagcggggacgcaagcgaggtatgagatcccgccctcgggcaaactcaggtggggttgacctggattccagtggcgagtttgcctcaattgaaaagatgctggcaacaactgatactaataagttttctccatttttgcagacagcagaagataacacgcaagatgaggtcgcaggcgcacccgctgatcaccacgggccatccgacgaggagcagggtagtcccccagaggataagctgctcagggcgaaaaggaatagttataccaactgcctccagaagatcacctgcccccactgccctcgagtcttcccttgggccagttcacttcagcgacacatgttaactcacactggccaaaaacccttcccatgccagaaatgcgacgcgttcttcagtacgaagtctaactgtgagcgccaccagctccgcaagcacggagttacaacctgttcactgcgacgaaacggcctgatcccacagtccaaagaaagtgacgtgggctcccacgactcgactgactcacagtctgacgcagaaaccgccgctgcagctggcgaagtcctggatttgacatcccgggatagggagcagccttccgaaggggcaactgagctgcgacaggttgccggtgacgcgccagtcgagcaggctactgcggagaccgcttccccggtgcacagggaagaacatggccgtggagaatcacatgagcctgaagaagagcatggtactgaggagagcaccggagatgccgacggcgcagaggaggacgcgagctccaatcagagccttgatctggacttcgcaacgaagctgatggattttaaactcgctgagggagacggcgaagcaggagccggaggcgctgccagccaagagcaaaagttagcttgcgacacctgcggtaagtcttttaagttcctgggcacgctgagcagacaccggaaggcacatggcaggcaggagcctaaggacgaaaagggcgacggcgcatcaacagctgaagaaggtccccaacctgctcctgagcaggaagaaaagccgccagaaacaccggctgaggtggtggaaagtgcaccaggtgcaggggaggctcctgccgaaaaacttgctgaggagaccgagggcccaagcgacggagaatctgccgctgaaaaaagatcgagtgaaaagtctgacgacgataaaaagcctaaaacagacagtccaaaatcagttgccagtaaagctgacaagcgcaagaaagtgtgttctgtgtgcaataagcggttttggtctttgcaagatttaacgaggcacatgcggtctcacactggggaacgtccttataagtgccagacgtgcgagcggacgttcaccttgaaacatagtctggttaggcaccagcgcatacaccaaaaggcccgacacgcaaagcatcacgggaaagactccgacaaggaggagagaggtgaggaagactccgaaaacgagtctacacactctggtaacaatgccgtaagcgagaacgaagccgaactcgctcctaacgcctcaaatcatatggcagtgactaggagcaggaaggaagggctggcctcagccacaaaggattgttcccaccgggaggagaaggtgacagccggatggccaagcgagcccggacagggagatctgaatcccgaatcacctgcggcacttggccaggacctgctggagcctcgatcaaaacgacctgcacatccgattctagccaccgcagacggtgcatcacagctggtcggaatggagta

SEQ ID NO: 288847 - DNA, 8778 bp, Artificial Sequence
  derived and/or modified sequence
gaagctgggcggggggccgagacgggggccgggacgacggctggggcgccggggtcgccagctcctcgcccacctccctccctgtgggagaagaggaggaggggaagtgactgcggagttgatgaactttgcacatccagaaacgccattttgattccttttccggaacaagtttgcatctctcctcggtctctccctgaagcccaccggtccccaacgcatcatgccagggagccaagcgtcctgcccggccgttgctccgactgtgtgttccaggagtggtggctctgaggtgtgaccctgcccacgtttgggcccagccaggttcagccccccaataaggagggcagcttgataacacaaagaaaacagtgtcaacgagtactaccaagagaagaagacaagaggtcaacacagactcattttctactccgtgtgaatgatagctacagcaggggaaagtttcatagtctatcagtgggtcagaaaatggagttttatagcagaggcttcttagaagcttaaacccctgtcccaatgacgtcaagttcgcccgctggcttggaaggttcagacctatcttccatcaacaccatgatgtcggcggtcatgagtgtagggaaggtcacagagaatggcgggagcccccaggggatcaagtccccctcgaagcctccaggaccaaatcggattggcagaaggaaccaggaaacgaaagaggagaagtcttcctataactgccccctgtgtgagaagatttgcactacccagcaccagctgaccatgcacattcgccagcacaacacagacactggaggagccgaccactcatgcagcatctgcggaaagtcactgagctcggccagctccctcgatcgccacatgctggtgcactctggcgagaggccttacaagtgcactgtgtgtggccagtcatttaccaccaatgggaacatgcacagacatatgaagatccatgagaaggaccctaacagtgccacagccacagcccctccatctcctctgaaacgtaggcgattgtcctccaagaggaaactgagtcacgatgccgagtcagagagagaagacccagcaccagctaaaaagatggtagaagacgggcagtcaggtgacttggagaagaaagctgatgaagtctttcactgcccagtatgtttcaaggagtttgtttgcaagtatggactggagacccacatggagacccattcagataacccactaagatgtgacatttgttgtgtcacctttcgaacacatcgaggactgctgcgtcacaacgcgcttgtccacaaacaacttcccagggatgcaatgggcagacctttcatacagaacaacccttcaattcctgctggcttccacgacttaggattcacggacttctcctgtaggaagtttcctcgcatttctcaggcctggtgcgaaacaaacctgcggaggtgcatcagcgagcaacaccgttttgtctgcgacacctgtgacaaggcgttccccatgctctgctcactggctctgcacaagcagacccatgtggcggcagaccagggtcaagaaaagccgcaggccacgcccctgcctggtgacgccctggaccagaagggcttcctggccttgcttggcctgcagcacaccaaagacgtcaggcctgcccccgccgaggagcccctgccggatgacaaccaggcaattcagctccagacactcaagtgtcagctacctcaggaccccggctgcaccaacctgctgagcctgtcacctttcgaagctgcttccctaggcggttctctcacagttctccccgcgaccaaggacagcataaagcacctgtccctgcagcccttccagaagggcttcatcatccagcctgacagcagcattgtggtcaagcccatctctggcgagtcggccatcgagctggcagacatccagcaaattctgaagatggcagcctcggctccccctcagatcagtcttccgcccttctccaaggcccctgccgccccactgcaggcgatcttcaagcacatgccccctctgaagccaaagcccctggtcacaccacggacggtggtggccacctccacgcccccgcctctcatcaacgcccagcaggcttccccgggctgtatcagccccagcctgccgccaccgcccctgaagctcctcaaaggctcagtggaggcggcctccaacgcccacctgctgcagtccaagtccgggacccagccccacgcggccacgcggctctccctgcagcagccgcgggcggagctgccgggccagcctgagatgaagacgcagctggagcaggacagcatcatcgaggccctgctgccgctgagcatggaggccaagatcaagcaggagatcacagagggggaactcaaggccttcatgacagcgcccggcggcaagaagacgcccgccatgcgcaaggtgctctacccctgccgcttctgcaaccaggtgtttgccttctcgggggtcttgcgtgcccacgtgcgctcccacctgggcatctcgccataccagtgcaacatctgcgactacatcgccgccgacaaggccgcgctcatccgccacctgcgcacgcacagtggggagcggccctacatttgcaagatctgccactaccccttcactgtcaaagccaactgcgagcggcacctgcgcaagaagcacctcaaggccacccgcaaggatatcgagaagaacatcgagtatgtgagtagcagcgcggccgagctggtggacgccttctgcgccccggacaccgtgtgccggctgtgcggcgaggacctcaagcactatcgtgccctgcgcatccacatgcgcacgcactgcggccgcggcctgggcgggggccacaagggccgcaagcccttcgagtgcaaggagtgcagcgccgcgttcgcggccaagcgcaactgcatccaccacatcctcaagcagcacctgcacgtgcccgagcaggacatcgagagctacgtgctggccgccgacggcctgggccccgcagaggcgccggccgctgaggcgtcggggcgcggggaggacagtggctgcgctgcccttggtgactgcaagcccctcactgccttcctggaaccccagaacggctttcttcacaggggccccacccagcctccacctccccatgtctcgatcaagttggagcccgccagtagctttgcggtggacttcaatgagcccctggacttctcgcagaagggcctggccctggtccaagtgaagcaggaaaacatctcctttctgagcccttcttccctggtcccctatgactgctccatggagcccatcgacctgtccatccccaagaacttcaggaaaggggacaaggatttggccactcccagcgaagccaagaagcctgaggaggaggcggggagcagcgagcagccctctccctgcccagcacccggcccttctcttcctgtaactttggggcccagcggaatcctggaaagccccatggcccctgctccggcggccaccccggaacccccagcacagcccctgcagggccctgttcagctggcggtcccaatctactcctcagccctggtcagcagccctccactcgtgggcagctcagccctcctgagtggcacagccttgctgcgtccactgcggcccaagcccccgctgcttttgccaaagccccccgtgacagaagagctgcccccgctggcctccattgcccagatcatctcatctgtatcctcggcccccaccctgctgaaaaccaaggtggcggacccagggcccgcaagcactggcagtaacaccacggcttcagacagcttaggaggttctgtccccaaagccgccaccaccgccacccccgctgccaccaccagcccaaaagagtctagtgagcctcccgctccagccagcagcccagaggctgcctctcccaccgagcagggcccagcgggcacgtcgaagaagaggggccggaaaagggggatgaggagccgaccccgcgccaacagcggcggggtggacctggactccagcggggagtttgccagcatcgagaagatgctggccaccacagacaccaacaagttcagtccgtttctgcagacagcggaggacaacactcaggatgaggtggccggagcccctgccgaccaccatgggcccagtgatgaagagcagggcagtcccccagaagacaagctgctgagggccaagcggaactcgtacaccaactgcctgcagaagatcacctgtccccactgtccccgggttttcccttgggccagctccctacagaggcacatgctcacacacactggtcagaaacccttcccttgtcaaaaatgcgatgccttcttttctaccaaatctaactgtgaacgccaccagttgcgcaaacacggagttaccacctgttccctgagaagaaacgggcttatcccccagtcaaaagagagtgatgttggatcccatgatagcacagacagtcagtcggatgcggagactgcagccgccgcgggcgaagtgctagacctcacctcacgggacagagagcagccgtcggagggcgccactgagctccgccaggtcgcaggggatgcgcctgtggagcaggccacggcggaaacggcctcgccggtgcaccgggaagagcacgggcgtggggagagccatgagccggaggaggagcatggcactgaggagagcactggggacgccgacggcgcggaagaggacgcgtcgagcaaccagagcctggacctggacttcgccaccaagctcatggacttcaagctggcggagggcgacggcgaggcaggcgccgggggcgcggcctcgcaggagcagaagctcgcctgcgacacctgtgggaagagcttcaagttcctgggcaccctgagccgccaccggaaggcgcacggccgccaggagcccaaggacgagaagggagatggcgccagcactgcagaggaggggccccagcccgcccctgaacaggaggagaagccccccgagaccccggcagaggtggtggagtcggccccgggtgccggggaggccccggcggaaaagctcgcggaggagacggagggcccctccgacggggagagcgcggccgagaaaaggtcctcagagaagagcgacgatgacaagaaaccaaagacagactcccccaaaagcgtggccagcaaggcagacaagaggaagaaggtctgcagcgtgtgcaacaagcggttctggtcgctgcaggacctgacccggcacatgcgctcccacacaggggaaaggccatacaaatgtcagacctgcgagcgaaccttcaccttgaagcacagcctggttcgccaccagcggatccaccagaaagccaggcatgccaaacaccacgggaaggacagcgacaaggaagagcggggtgaggaggacagcgagaatgagtccacccacagcggcaacaacgccgtctcagagaacgaggctgagctggctcccaatgccagcaaccacatggctgtcacccggagccggaaggagggcttggccagtgccaccaaggactgcagccacagggaggagaaggtcacggcagggtggccgtctgagcctggccagggtgaccttaacccagagagcccggcggccctggggcaggacctgctggagccgcgcagcaagaggcctgcccacccaatcctggccacagctgatggcgcctcccagctcgtggggatggagtgacagcctcagtccccctcagcacagacaaaagccagcagagcaaagcgtctatacttcatggggtttcctcagtgccctttggctgttgaggagtgagagagagagagagagagagagagagagagagagagagagacaagcaggagcgtggctgctcgctcagtgccatagccttaccgcagcctgcgcgggaggccacagcccgtgccgattccagtgccttaactacttaccggatccctccatattatcatgggtgttgtatttttccaaaatgacttcttaaacaaaacaaatattataatgaattgtctggagaggacctcttcatttgagcattagcgttattttgtattggtgtgtgtgagcttgttcttgtgaatctgtgatagcaccgtttgttctgtgagctggaaacagaaggaaaaaacatacccttgggtacccatagccaataactggaagaaaatgatgtgaatttcatgtaaatgaccagaggaaagatggataagatgataatttcttaaatagacattttccttttttctttgtgcttcatggtggagctgtcatctggtccttggtattacaggatgtggttgatgaaggtttccaatatggtttcaggccaaaaccagggaagattctagcttcagcctcatgtccatttccagtctgtcagcattagacatggtcactgttcaagtttcaagacatccattcttaactatagagaagagttactcccctggcgtcttaacctatggaaaacatgcacggataggatatatttgattgcctcctcttccctttcagtatatgtattattaatattattattattattattattattagttcatcagtttgctgttctctgcagtgagcagaatcaaatgggcaatatttgtcctgggagacctgtgccgcacccaggtccccgtgttaacgtgtgcctgcggttgtggttggcaccctcgggtggtagctcttctactgtaatgagacaagcctttcttctgtcactgcagaatttagaaggggccgtgagcagtcttcccaagcatggtccaggagcagctcagagagggtggagtgaggatgcatgcatccagggaacaggcatcaagaagccagggccgtgcctggagcactgcagagatgactttggagaaagcaaagcagtgacccagtgaccaggcacattactcgtgagcgaggtattcccagtcttcctgctaagcctaatccaagccttacccagctgtgctactgtcatttgcaaagcaaggaaatactactactggtaataaaactacacatgcaagatgtcagataagaaataggtttatatttaccttcctgcgatgtggggttggtgcttgaagataaatgtgctgtttctagtttcttaaatagcccacacccctggatgcaaaaaggcagggttatttttacccatgagcatcctgtgcaggcaatagacttccctcactgtctccgcctgcagggaggagaatgtaccccactgcacctgagctcctggtccctcagccaagacctcaggggtccccagccagcctgctgctggggacccctgtgcttgctgcagtgtatggagcctcttgccttcccctggggaggcacccctgtaccccagcttccttcccctggccttttctggccccagtgctcctcctttacatagacttgttcacacagaaacgtgcacgcccccttttctccgccacttcaccagtttctgaaatccaacctcccagacttcacaggaagatagatattcttgagataatgaaaagtgatatcttcgcatacgaaaggaaaaaaggttgaggtatatatgatttttaactgtattaggggtgtatgaaccagtttaaaaacgaggttttatttactgtagagatgaatgcaaatcagaaccaatgatcccttggcctacttagttaaaaccagttcatacatcccttagggtttttattattattattattattattacagttgttattgttgtttttgttgttattattatttggggtttcttgtgttttttctttgcgactctccacactaaacttgcaatattgtggggagaagctgtgactaaactctacgctgcggtgagatgtagcagtaatcagctcccagcgacgtgtgtagctggggctgccgctcgcaataatcactattgatttaaagctttacttagccttgatctgtaccctcgtagtcaataaggtcttgccacattttattagtgaggtggagaaacgtattatttgtttgttgtttttgcccttcccccaccccccaatattaaactgtgaaatttgtgatttgtttaaactctgggtgaatcatagcttagtttgcatgtccagctaatttgtttctatacattttgtttgattctctttctccttctctcagggcttttacaaaaaaatatatatatatggatcttctgaaaagttttttgaggtgcaagttttttctcttttttttttttttttttttttctcattgattaatggacatgatgctgagattcaatcactacatgaaacacctggctgtgaaaacaaaacaacccagagggctgtgttccaagcagcgctggggaagctacgtaacagtcggatgccagttttggaagattcaccatgcgttctgaccctctgttcgtctctttcctctcctctttcttcaagaaggaaattgatcctagtgatttcagcccatgcattaaacaggaaacaataataaatttgtagaattcatatttttctaaagggaacttaaaaactgctgctacatgttatgtacaaaactggtttatgccacatgaacagagaatcacaagtttggttttggtactttttgttcctctttgtattcagttgtatagaacttccaaattcagaatgagaagaaagctgttctgtatcaaaccatttaagcaataaatgttatattttaaaagctgca

SEQ ID NO: 288848 - DNA, 5229 bp, Artificial Sequence
  derived and/or modified sequence
atgaccagcagcagccccgccggcctggagggcagcgacctgagcagcatcaacaccatgatgagcgccgtgatgagcgtgggcaaggtgaccgagaacggcggcagcccccagggcatcaagagccccagcaagccccccggccccaacagaatcggcagaagaaaccaggagaccaaggaggagaagagcagctacaactgccccctgtgcgagaagatctgcaccacccagcaccagctgaccatgcacatcagacagcacaacaccgacaccggcggcgccgaccacagctgcagcatctgcggcaagagcctgagcagcgccagcagcctggacagacacatgctggtgcacagcggcgagagaccctacaagtgcaccgtgtgcggccagagcttcaccaccaacggcaacatgcacagacacatgaagatccacgagaaggaccccaacagcgccaccgccaccgccccccccagccccctgaagagaagaagactgagcagcaagagaaagctgagccacgacgccgagagcgagagagaggaccccgcccccgccaagaagatggtggaggacggccagagcggcgacctggagaagaaggccgacgaggtgttccactgccccgtgtgcttcaaggagttcgtgtgcaagtacggcctggagacccacatggagacccacagcgacaaccccctgagatgcgacatctgctgcgtgaccttcagaacccacagaggcctgctgagacacaacgccctggtgcacaagcagctgcccagagacgccatgggcagacccttcatccagaacaaccccagcatccccgccggcttccacgacctgggcttcaccgacttcagctgcagaaagttccccagaatcagccaggcctggtgcgagaccaacctgagaagatgcatcagcgagcagcacagattcgtgtgcgacacctgcgacaaggccttccccatgctgtgcagcctggccctgcacaagcagacccacgtggccgccgaccagggccaggagaagccccaggccacccccctgcccggcgacgccctggaccagaagggcttcctggccctgctgggcctgcagcacaccaaggacgtgagacccgcccccgccgaggagcccctgcccgacgacaaccaggccatccagctgcagaccctgaagtgccagctgccccaggaccccggctgcaccaacctgctgagcctgagccccttcgaggccgccagcctgggcggcagcctgaccgtgctgcccgccaccaaggacagcatcaagcacctgagcctgcagcccttccagaagggcttcatcatccagcccgacagcagcatcgtggtgaagcccatcagcggcgagagcgccatcgagctggccgacatccagcagatcctgaagatggccgccagcgcccccccccagatcagcctgccccccttcagcaaggcccccgccgcccccctgcaggccatcttcaagcacatgccccccctgaagcccaagcccctggtgacccccagaaccgtggtggccaccagcacccccccccccctgatcaacgcccagcaggccagccccggctgcatcagccccagcctgccccccccccccctgaagctgctgaagggcagcgtggaggccgccagcaacgcccacctgctgcagagcaagagcggcacccagccccacgccgccaccagactgagcctgcagcagcccagagccgagctgcccggccagcccgagatgaagacccagctggagcaggacagcatcatcgaggccctgctgcccctgagcatggaggccaagatcaagcaggagatcaccgagggcgagctgaaggccttcatgaccgcccccggcggcaagaagacccccgccatgagaaaggtgctgtacccctgcagattctgcaaccaggtgttcgccttcagcggcgtgctgagagcccacgtgagaagccacctgggcatcagcccctaccagtgcaacatctgcgactacatcgccgccgacaaggccgccctgatcagacacctgagaacccacagcggcgagagaccctacatctgcaagatctgccactaccccttcaccgtgaaggccaactgcgagagacacctgagaaagaagcacctgaaggccaccagaaaggacatcgagaagaacatcgagtacgtgagcagcagcgccgccgagctggtggacgccttctgcgcccccgacaccgtgtgcagactgtgcggcgaggacctgaagcactacagagccctgagaatccacatgagaacccactgcggcagaggcctgggcggcggccacaagggcagaaagcccttcgagtgcaaggagtgcagcgccgccttcgccgccaagagaaactgcatccaccacatcctgaagcagcacctgcacgtgcccgagcaggacatcgagagctacgtgctggccgccgacggcctgggccccgccgaggcccccgccgccgaggccagcggcagaggcgaggacagcggctgcgccgccctgggcgactgcaagcccctgaccgccttcctggagccccagaacggcttcctgcacagaggccccacccagcccccccccccccacgtgagcatcaagctggagcccgccagcagcttcgccgtggacttcaacgagcccctggacttcagccagaagggcctggccctggtgcaggtgaagcaggagaacatcagcttcctgagccccagcagcctggtgccctacgactgcagcatggagcccatcgacctgagcatccccaagaacttcagaaagggcgacaaggacctggccacccccagcgaggccaagaagcccgaggaggaggccggcagcagcgagcagcccagcccctgccccgcccccggccccagcctgcccgtgaccctgggccccagcggcatcctggagagccccatggcccccgcccccgccgccacccccgagccccccgcccagcccctgcagggccccgtgcagctggccgtgcccatctacagcagcgccctggtgagcagcccccccctggtgggcagcagcgccctgctgagcggcaccgccctgctgagacccctgagacccaagccccccctgctgctgcccaagccccccgtgaccgaggagctgccccccctggccagcatcgcccagatcatcagcagcgtgagcagcgcccccaccctgctgaagaccaaggtggccgaccccggccccgccagcaccggcagcaacaccaccgccagcgacagcctgggcggcagcgtgcccaaggccgccaccaccgccacccccgccgccaccaccagccccaaggagagcagcgagccccccgcccccgccagcagccccgaggccgccagccccaccgagcagggccccgccggcaccagcaagaagagaggcagaaagagaggcatgagaagcagacccagagccaacagcggcggcgtggacctggacagcagcggcgagttcgccagcatcgagaagatgctggccaccaccgacaccaacaagttcagccccttcctgcagaccgccgaggacaacacccaggacgaggtggccggcgcccccgccgaccaccacggccccagcgacgaggagcagggcagcccccccgaggacaagctgctgagagccaagagaaacagctacaccaactgcctgcagaagatcacctgcccccactgccccagagtgttcccctgggccagcagcctgcagagacacatgctgacccacaccggccagaagcccttcccctgccagaagtgcgacgccttcttcagcaccaagagcaactgcgagagacaccagctgagaaagcacggcgtgaccacctgcagcctgagaagaaacggcctgatcccccagagcaaggagagcgacgtgggcagccacgacagcaccgacagccagagcgacgccgagaccgccgccgccgccggcgaggtgctggacctgaccagcagagacagagagcagcccagcgagggcgccaccgagctgagacaggtggccggcgacgcccccgtggagcaggccaccgccgagaccgccagccccgtgcacagagaggagcacggcagaggcgagagccacgagcccgaggaggagcacggcaccgaggagagcaccggcgacgccgacggcgccgaggaggacgccagcagcaaccagagcctggacctggacttcgccaccaagctgatggacttcaagctggccgagggcgacggcgaggccggcgccggcggcgccgccagccaggagcagaagctggcctgcgacacctgcggcaagagcttcaagttcctgggcaccctgagcagacacagaaaggcccacggcagacaggagcccaaggacgagaagggcgacggcgccagcaccgccgaggagggcccccagcccgcccccgagcaggaggagaagccccccgagacccccgccgaggtggtggagagcgcccccggcgccggcgaggcccccgccgagaagctggccgaggagaccgagggccccagcgacggcgagagcgccgccgagaagagaagcagcgagaagagcgacgacgacaagaagcccaagaccgacagccccaagagcgtggccagcaaggccgacaagagaaagaaggtgtgcagcgtgtgcaacaagagattctggagcctgcaggacctgaccagacacatgagaagccacaccggcgagagaccctacaagtgccagacctgcgagagaaccttcaccctgaagcacagcctggtgagacaccagagaatccaccagaaggccagacacgccaagcaccacggcaaggacagcgacaaggaggagagaggcgaggaggacagcgagaacgagagcacccacagcggcaacaacgccgtgagcgagaacgaggccgagctggcccccaacgccagcaaccacatggccgtgaccagaagcagaaaggagggcctggccagcgccaccaaggactgcagccacagagaggagaaggtgaccgccggctggcccagcgagcccggccagggcgacctgaaccccgagagccccgccgccctgggccaggacctgctggagcccagaagcaagagacccgcccaccccatcctggccaccgccgacggcgccagccagctggtgggcatggagtag

SEQ ID NO: 288849 - DNA, 693 bp, Artificial Sequence
  derived and/or modified sequence
atgatggagaccgagagactggtgctgcccccccccgaccccctggacctgcccctgagagccgtggagctgggctgcaccggccactgggagctgctgaacctgcccggcgcccccgagagcagcctgccccacggcctgcccccctgcgcccccgacctgcagcaggaggccgagcagctgttcctgagcagccccgcctggctgcccctgcacggcgtggagcacagcgccagaaagtggcagagaaagaccgacccctggagcctgctggccgtgctgggcgcccccgtgcccagcgacctgcaggcccagagacaccccaccaccggccagatcctgggctacaaggaggtgctgctggagaacaccaacctgagcgccaccaccagcctgagcctgagaagaccccccggccccgccagccagagcctgtggggcaaccccacccagtaccccttctggcccggcggcatggacgagcccaccatcaccgacctgaacaccagagaggaggccgaggaggagatcgacttcgagaaggacctgctgaccatcccccccggcttcaagaagggcatggacttcgcccccaagggcagcgtgcacagctgcatccaccccagaggccccagagccagcatcagcggcgccgtgggccacccctgcggcagacacctgccctgctggtag

SEQ ID NO: 288850 - DNA, 693 bp, Artificial Sequence
  derived and/or modified sequence
atgatggaaacggagagactcgtacttccaccacctgaccctcttgatctgccactgcgcgctgttgaactggggtgtactggccactgggaactattgaacttgcccggggccccagaatccagcctgccccacggattacccccctgcgcccccgatctgcaacaagaggctgagcagctgttcctctctagccccgcttggctgcctctgcacggggtggaacattctgccaggaaatggcaacgcaagactgatccttggtccttgcttgcagttctgggcgctcctgtcccgagcgatctccaggctcaaagacacccaacaaccgggcaaattctcggatataaagaagttttgctggagaacactaatctgagtgcaacaacctcgttgtctctgcggcggccacccggtccagcatcccaatccctgtggggaaaccctacacaataccccttctggccaggcggcatggacgagcccaccataacagacctaaacactcgggaagaggctgaggaggagattgatttcgaaaaggatttgctcaccatccctcccgggttcaagaaaggtatggacttcgcgcccaaggggagcgtacatagctgtatccacccacggggcccacgagctagcatttcgggagcggtgggccacccatgcgggagacatttaccctgctggtag

SEQ ID NO: 288851 - DNA, 693 bp, Artificial Sequence
  derived and/or modified sequence
atgatggaaaccgaacgactggtcctgccaccgcctgatcctctcgatttgcctcttcgggcagtcgagttaggatgcactgggcactgggagctcctgaacctcccaggtgccccagaaagcagcctcccacacggtttgcccccctgcgcacctgaccttcaacaagaggccgaacaactcttcctaagtagtccagcatggctgcctctgcatggcgtagaacattcagccagaaagtggcaacggaaaacagacccttggtccctgctcgccgtcctgggggcccccgtgccaagtgaccttcaagcgcagcgacatccaactaccggccagattctgggatacaaggaagtacttttagagaacactaatctaagtgccacaacctccttgtccctgaggcggcccccaggccccgcctcacagagtctttggggcaacccaacccagtatccgttctggcctggcggcatggacgagccgaccattaccgatctaaacaccagggaggaggctgaagaagagattgattttgagaaggacctgttgactatccctcccggttttaagaagggtatggattttgcccccaagggttctgtgcacagttgcattcaccctagggggccccgcgcatcgatttctggagctgttggccacccttgtgggaggcacctcccctgctggtag

SEQ ID NO: 288852 - DNA, 693 bp, Artificial Sequence
  derived and/or modified sequence
atgatggagacggagcgcctcgtgctgccacctccagacccattggatctccccctccgggccgtggagctgggatgtacggggcactgggaactgctcaacctaccaggcgcacccgagagctccctccctcacgggctgcccccttgcgcccctgatttgcagcaagaggccgaacaactcttcctctcgagcccagcgtggctcccactgcacggcgtagaacattccgcgagaaagtggcagcgaaaaacagatccttggagcctgctagcggtgctcggtgctcctgttccctccgacctgcaagcacagaggcatccgaccactgggcagatcctcgggtacaaagaggtgttactagagaacaccaacctgtcagctacaacgagccttagcctgcgcaggccaccaggcccggccagtcaatctctatgggggaacccgacccagtaccctttctggccaggtggcatggacgagcctaccatcactgacctgaacactcgcgaggaagctgaggaggaaatcgattttgagaaggacctcctgacaattcctccggggtttaaaaaggggatggacttcgcccccaaaggctcagtccacagctgtatccaccctaggggtcctagagcaagcatctcgggggccgtggggcacccctgcggacggcatctcccatgctggtag

SEQ ID NO: 288853 - DNA, 693 bp, Artificial Sequence
  derived and/or modified sequence
atgatggaaactgaacggctggttcttcctccacctgatccattggacctgcctctgcgcgcggttgaactggggtgcaccggtcactgggaattgttaaacctgccaggcgcgccggaatcctccttaccacacggcctgcctccatgcgctccggatctgcagcaggaagcagagcagttgttcctatcttccccagcttggttgccccttcacggggtagagcatagtgctcgaaagtggcagcggaaaaccgacccctggtctctgctcgccgtcctgggggctccagtgccatccgatctgcaggcacaacggcaccctactacaggtcagatcctgggctacaaggaagtgctgttggaaaacaccaacctatctgcaacgactagcttatctctccggcggccacctgggcccgctagccaaagtttatggggtaaccccactcaatatcctttctggcccggaggaatggatgagccaactataacggatttgaatactcgtgaagaggccgaagaggaaattgacttcgagaaggaccttcttacgattccgcctgggttcaagaagggcatggattttgcccccaaagggagcgtccacagctgtatccatccacgaggcccccgggcatccataagcggagcggtgggtcacccttgtggtcgtcacctgccatgctggtag

SEQ ID NO: 288854 - DNA, 693 bp, Artificial Sequence
  derived and/or modified sequence
atgatggaaaccgagaggttagttctcccaccacccgaccccctggatctgccattgcgggccgtcgagttgggctgcacgggccactgggagctcctgaacttgccgggcgcccctgaaagctccttgccccacgggctaccaccgtgtgctcctgatcttcagcaggaggccgagcagctgttcctcagctccccggcatggctgccattacatggagtggaacactcagctcggaaatggcaaaggaagaccgacccctggagtttgctggccgtgcttggagcccctgtgccgtcagacttgcaggcccagcggcacccaacaaccggacagatcctgggctacaaagaagtactgcttgaaaatactaacctctccgcaacaacaagcttatccttgcggagacctcctggccccgcctcccagtctctatggggaaaccctactcaatacccattttggccagggggtatggacgaacctaccataacagacttaaacacacgcgaggaagcggaggaggagatcgacttcgaaaaagatctgctaactatcccacccgggttcaaaaaaggcatggatttcgcacccaagggcagcgtacacagctgcattcaccctcggggaccccgcgctagcatcagtggcgccgtgggccacccctgcggccgccatctcccctgctggtag

SEQ ID NO: 288855 - DNA, 693 bp, Artificial Sequence
  derived and/or modified sequence
atgatggagacagagcggctggtgctgcccccaccagaccccctggacctgcccctgcgggctgtggagctgggctgcaccggccactgggagctgctgaacctgcccggggcccctgagagcagcctgccccacggcctgcccccctgtgccccagacctgcagcaggaggccgagcagctgttcctgagcagccctgcctggctgcccctgcacggcgtggagcacagcgccaggaagtggcagaggaagacagacccctggagcctgctggccgtgctgggcgcccctgtgcccagcgacctgcaggcccagaggcaccccaccaccggccagatcctgggctacaaggaggtgctgctggagaacaccaacctgagcgccaccaccagcctgagcctgcggcggcccccaggccctgccagccagagcctgtggggcaaccccacccagtaccccttctggccaggcggcatggatgagcccaccatcacagacctgaacacccgggaggaggccgaggaggagattgactttgagaaggacctgctgaccatccccccaggcttcaagaagggcatggactttgcccccaagggctctgtgcacagctgcatccacccccggggcccccgggccagcatcagcggggctgtgggccacccctgtggccgccacctgccctgctggtag

SEQ ID NO: 288856 - DNA, 693 bp, Artificial Sequence
  derived and/or modified sequence
atgatggagaccgagcggctggtgctgcccccccccgaccccctggatttaccactacgggccgtggagctggggtgtaccgggcactgggagctgctgaacctacccggagcccccgaatcatcattgcctcacggtctgcccccatgcgcaccagacctccagcaggaagctgaacaactgtttctcagctcacctgcttggctacctctccacggtgtcgaacactcagcccgtaaatggcagcgaaagaccgatccctggtctctgctcgccgttttgggagcgccagtgcccagcgacctacaggcccagaggcatccgacaactggccaaattctaggatacaaagaggtcctgctcgaaaataccaacctaagtgcaactaccagtctgtccctccgaagacctccaggtcctgcatcccaatctttgtgggggaacccaactcaataccctttctggccagggggcatggacgagcccactattacagatcttaacactagggaagaggcggaggaggagattgatttcgaaaaagacttacttaccatacctcctggattcaagaaaggcatggacttcgcacctaaaggcagcgtgcactcctgcatacaccccagaggcccaagggcatccatctccggggcagtgggacacccctgtggccggcacctgccgtgctggtag

SEQ ID NO: 288857 - DNA, 693 bp, Artificial Sequence
  derived and/or modified sequence
atgatggagaccgagcggctggtgctgcccccccccgaccccctggacctgcctttacgcgcggtggagctgggctgcacgggtcactgggagctgttgaacctgcctggcgctccagagtcgtcactgcctcacggactgcctccctgcgcccccgatttgcaacaggaagcagagcaactgtttctgagttcacccgcatggctgccattgcatggcgtggagcactctgcgcgaaagtggcagcgaaagacagacccatggagtctgctagctgtgctcggcgcgcccgtaccctccgatcttcaggcacagagacatcctacgacaggccagatcctggggtataaggaggtgctgctggagaacacaaacctaagtgcgacaacctcactttcgctccggcggccaccgggtcccgcatctcagagcttgtggggaaacccaacacagtatcctttctggcccgggggcatggatgagcccactattactgacctgaatacccgggaggaggcagaagaggagatagatttcgaaaaggatttactgacaatccctccgggcttcaagaaaggcatggacttcgcccctaaagggtcagtgcacagttgtattcacccgcggggacccagagcttccatcagcggggccgtgggacatccctgcggccgccacctgccctgttggtag

SEQ ID NO: 288858 - DNA, 693 bp, Artificial Sequence
  derived and/or modified sequence
atgatggagaccgagcggctggtgctgcccccccccgaccccctggacctgccattgcgcgcagtggaacttggctgtacaggacactgggaactacttaacttaccaggcgcacccgagagctccctaccccacgggcttcctccatgtgccccagatctgcagcaggaggccgagcagctgtttctttcaagtcctgcttggctgccactccacggcgttgaacactcagcccgcaagtggcaaaggaagacagacccttggagtttgctcgccgtcctaggtgcccccgtgccatcggatctgcaggcccagcggcacccaacaaccggccagatactcgggtataaagaagttctactggagaacacaaacctttcagccacaacttcactatccctgaggcgcccccccggcccagcaagccagagcttgtgggggaatcctacacagtatcctttttggcccggcgggatggatgagcctactatcacagacctcaacacccgagaggaggctgaggaggagatcgattttgaaaaagatctgctcacgattccaccaggctttaagaaagggatggatttcgcccccaagggttccgttcacagttgtatccaccccaggggaccacgggctagcattagcggggccgttggccacccctgcggacgccacctgccctgctggtag

SEQ ID NO: 288859 - DNA, 693 bp, Artificial Sequence
  derived and/or modified sequence
atgatggagaccgagcggctggtgctgcccccccccgaccccctggaccttccactgcgggctgtggagctgggatgcaccggccactgggaactgcttaatctccccggagccccagagtcctctctccctcatggcctacccccatgcgctcctgacctccaacaggaggccgaacagttgttcttgtcttcccccgcatggttgcccttgcatggcgttgaacacagcgcaagaaagtggcaacggaagacggacccatggtccttgctcgcagtgctcggtgcccccgtcccaagcgatctgcaggcccaacggcacccaactacaggccaaattctcggatacaaagaggttcttttagaaaataccaacttgtcagcaacgacaagcttaagcttgagaaggccacccggacccgcgagtcagtctctatggggtaatcctacacagtatccattctggcctggcggaatggacgagcccacaatcactgacctgaatactagagaggaggccgaagaagagatcgacttcgagaaggacctcctgacaattccacctggtttcaagaaagggatggactttgcgccgaaaggatctgtacattcatgcattcacccaaggggacctcgtgcatctattagcggagccgttgggcacccatgcggtcgacacctgccatgttggtag

SEQ ID NO: 288860 - DNA, 693 bp, Artificial Sequence
  derived and/or modified sequence
atgatggagaccgagcggctggtgctgcccccccccgaccccctggacctccccttgcgggctgtcgaactcggctgcactggccattgggagctccttaatttaccaggcgcccctgaatctagtcttccccacggattgcctccatgcgcccccgatttacaacaagaggccgagcagctgttcctcagttcccccgcttggttgcctttacacggggtagagcactcagcccgtaagtggcagcggaagacagatccctggagcttgctcgctgtgctcggcgccccggtgccctctgatctccaggcccagaggcacccaactacaggacaaattctcggctataaggaagtgttgctggaaaacacgaatctaagtgctaccacttcgctttccttgcgtcgacctcctggaccagcatctcagtccttgtggggtaatcccactcaataccctttttggcctggtggtatggacgagccaacaataacagacctgaatacccgagaggaggccgaggaggaaatcgattttgagaaggacctcctgacaatccctcctgggtttaaaaaaggcatggactttgcgcctaagggcagcgtgcattcctgtatccacccaagaggaccgcgtgctagtataagtggagcagtggggcatccttgcggcaggcatctgccatgctggtag

SEQ ID NO: 288861 - DNA, 693 bp, Artificial Sequence
  derived and/or modified sequence
atgatggagactgagaggctggtgctccctcctcctgaccctttggatctgcctctgagggccgtggagctggggtgcaccgggcactgggagttgctgaacctgcccggagctcctgagtcttcgcttccacatggcttgcccccttgcgccccagacttgcagcaggaggccgaacaattatttctgtctagtcctgcatggctgcccctgcacggcgttgaacattccgcaagaaagtggcaaaggaagacagatccctggtcactgctggccgtccttggtgctccagtgccctccgacctgcaggcacagagacacccgaccacagggcagatccttggctacaaggaggtgctgttagagaacactaacctatctgccactacttccctcagcctgaggaggcctccaggaccagcatctcaaagcctatggggaaaccccacacagtaccccttttggcctggtggcatggatgagcccactatcacggacctgaacacccgtgaagaggctgaggaggaaattgactttgagaaagatttgctgactataccacccggtttcaaaaagggaatggatttcgctcccaagggttctgtccatagttgtatacatcctcggggacctagggcttctatttctggagccgtaggccatccgtgcggtagacacctgccctgctggtag

SEQ ID NO: 288862 - DNA, 693 bp, Artificial Sequence
  derived and/or modified sequence
atgatggagaccgagagactggtgttgcctccgccagatccactggacctgccactgagagcggtggaactggggtgtacaggtcactgggaactactgaatttgccaggagctccagagtccagcctgccacacgggctgccgccatgcgcacctgatctgcagcaagaggctgagcagcttttcctgagctcacccgcttggctacctctccatggggtagaacacagtgcccgaaaatggcagcggaaaacagatccttggtctctgctggcagtactgggggctcctgtacccagtgatctccaggcccagaggcacccaaccaccgggcagatattagggtataaggaggttctcctggaaaacaccaatctgagcgccacgacctcgctcagtctccgtcggccaccgggaccagctagccagtcgctttggggcaatcctacgcaatacccattctggcccggtggtatggacgaaccaaccatcaccgacctgaacacacgcgaagaggccgaagaggaaattgattttgagaaggacttattgacaattcctcctggctttaagaaggggatggactttgcacctaagggcagtgttcattcttgcatccatccgcgaggtcctcgagccagcatcagcggagcagttggacatccgtgtggcagacacctcccttgttggtag

SEQ ID NO: 288863 - DNA, 693 bp, Artificial Sequence
  derived and/or modified sequence
atgatggagacagagcgccttgtgctgccccctcccgacccactcgatttacccctcagagccgtggagctgggctgtactggacattgggaacttctcaatcttcctggagcgccagaaagctcattgcctcatgggcttcctccatgcgctcccgatctgcagcaagaagcagagcaactgttcctgagcagccctgcctggctcccactgcatggcgtggaacacagcgccaggaagtggcagcgcaaaactgacccttggtctctcctggctgtgctgggcgcacctgttccatctgacctgcaggcacagaggcatcccactacagggcagatactcgggtacaaggaggttctgctcgagaacactaatttaagcgctacgacctccctctctctgcgacggccacctggtcccgcatctcaaagtctgtggggaaacccaacacagtacccattctggccagggggaatggacgagcctacaataaccgatcttaatacaagggaggaggcagaggaggagattgactttgaaaaagacctgctcacaatccctccgggatttaagaagggcatggactttgcgccaaagggaagcgtgcactcttgcatccacccgcgaggacctagagcctccatcagcggagcagttgggcatccctgtggacgtcacttaccctgctggtag

SEQ ID NO: 288864 - DNA, 693 bp, Artificial Sequence
  derived and/or modified sequence
atgatggagacggagcgcttagtgcttccaccaccggatcccctggacctgccacttagagctgtggagctcggttgcaccggccactgggagctgcttaacttacccggtgcaccagaaagcagtttaccacacggtctgccaccctgtgccccagacttacagcaggaggcagagcagctgtttctgagttctccggcttggctccccctgcatggcgtagaacattcagcccgtaagtggcaacgcaaaacggatccctggagcttgctcgccgttctgggggcacccgtaccatctgaccttcaggcccagcggcatcctacgaccggccagatcctcgggtacaaggaagtgttactagagaacacaaacctgtctgccacaacctctttatccctacggaggccaccgggacccgcttcgcaatcactgtgggggaatccaacgcaataccccttctggcccggaggcatggatgagccgactatcacagacctgaacacacgggaagaggccgaagaggagatcgatttcgagaaagaccttttgacaattccccctggctttaaaaaggggatggattttgccccaaagggatcggttcatagctgcattcacccaagaggccctagagcctccatctctggagccgtcggacatccttgcgggaggcatctcccatgctggtag

SEQ ID NO: 288865 - DNA, 693 bp, Artificial Sequence
  derived and/or modified sequence
atgatggagactgagcgattggtcctgccgccaccagacccactggatttgcctttaagagccgtcgagctgggatgtacggggcattgggagctcctcaacctgcctggagctcccgaaagttctctcccccacgggctgcctccttgtgccccagatctccagcaggaggctgagcagcttttcttatctagccccgcttggcttcccctccacggggtcgagcactctgcaaggaaatggcaacggaaaacagacccatggagtctgctggctgtccttggggcaccagtgcccagtgacctgcaggcacagcgccaccccaccacaggacaaatccttggatacaaggaggtgcttctggagaatactaatctaagtgctaccacatctctaagccttcggagacccccagggccagcgagtcagagcttgtggggcaaccctacccagtatcccttttggcctggaggaatggacgagcctactatcacggatcttaacacacgcgaagaggccgaggaggagatcgatttcgagaaagacctgctaacaatccccccaggcttcaagaaaggaatggatttcgccccaaaaggctccgttcatagctgcattcaccctagggggccaagggcctcgatttctggcgctgtaggccacccctgtgggagacatctgccttgttggtag

SEQ ID NO: 288866 - DNA, 1157 bp, Artificial Sequence
  derived and/or modified sequence
acttccgggctgccaggcagctgctgtggctccaggatgatggagacagagcgacttgtgctaccccctccagatcccctggacctaccccttcgggccgtggagctcggatgcacggggcactgggagctgctgaacttgcctggagctccagagagtagccttccccatggcctccctccttgtgccccagatctgcagcaagaagcagaacagttgtttctgtcatccccagcctggctgcctctgcatggtgtggagcactcagcccgaaaatggcagaggaagacggatccctggtctcttttggctgtcctgggagccccagtcccatccgacctacaggcccaaagacacccaaccacaggccagatactgggttacaaagaggtcttgctggagaacacaaatctctcggctacaacctccttgtctcttcgccggcctccagggccagcctcccagtccttatggggaaatccaactcagtatcccttctggccaggggggatggatgaacccaccataacagatctgaacacacgggaggaggctgaggaggagatagactttgagaaagatcttcttactattccacctggtttcaagaaaggcatggactttgcaccaaaaggaagcgtccacagctgtatccaccccagaggccccagagcctccatctcaggagcagtgggccatccctgtggacgccacctcccctgttggtgatttctatcgcctcattccccagccagccttccagtgggcatttgagccagatgtgtttcagaaacaggccatcctgcacttggaacggcatgactctgtctttgtcgcagctcacacatctgcaggaaaaacagttgtggctgaatatgccattgccctggcccagaaacacatgacacgcaccatctacacttcgcccatcaaggccctgagcaaccagaagttccgggacttccgaaacacattcggggatgtggggctgctcaccggggatgtacagctgcatccggaggcctcctgcctcatcatgaccacagagatccttcgctccatgctgtacagtggctcagatgttattcgggacctggagtgggtcatctttgatgaggttcactatatcaacgatgtcgaggtaagggccatgggct

SEQ ID NO: 288867 - DNA, 1157 bp, Artificial Sequence
  derived and/or modified sequence
acttccgggctgccaggcagctgctgtggctccaggatgatggagacagagcgacttgtgctaccccctccagatcccctggacctaccccttcgggccgtggagctcggatgcacggggcactgggagctgctgaacttgcctggagctccagagagtagccttccccatggcctccctccttgtgccccagatctgcagcaagaagcagaacagttgtttctgtcatccccagcctggctgcctctgcatggtgtggagcactcagcccgaaaatggcagaggaagacggatccctggtctcttttggctgtcctgggagccccagtcccatccgacctacaggcccaaagacacccaaccacaggccagatactgggttacaaagaggtcttgctggagaacacaaatctctcggctacaacctccttgtctcttcgccggcctccagggccagcctcccagtccttatggggaaatccaactcagtatcccttctggccaggggggatggatgaacccaccataacagatctgaacacacgggaggaggctgaggaggagatagactttgagaaagatcttcttactattccacctggtttcaagaaaggcatggactttgcaccaaaaggaagcgtccacagctgtatccaccccagaggccccagagcctccatctcaggagcagtgggccatccctgtggacgccacctcccctgttggtgatttctatcgcctcattccccagccagccttccagtgggcatttgagccagatgtgtttcagaaacaggccatcctgcacttggaacggcatgactctgtctttgtcgcagctcacacatctgcaggaaaaacagttgtggctgaatatgccattgctctggcccagaaacacatgacacgcaccatctacacttcgcccatcaaggccctgagcaaccagaagttccgggacttccgaaacacattcggggatgtggggctgctcaccggggatgtacagctgcatccggaggcctcctgcctcatcatgaccacagagatccttcgctccatgctgtacagtggctcagatgttattcgggacctggagtgggtcatctttgatgaggttcactatatcaacgatgtcgaggtaagggccatgggct

SEQ ID NO: 288868 - DNA, 225 bp, Artificial Sequence
  derived and/or modified sequence
atgggccggaggagtagcaaatgctgctgtatttacgagaaacccagagcgttcggggagagttctacggagagcgatgaggaggaggaggagggatgcgggcatacccactgtgttcggggccatagaaaaggccggagacgcgccactctcggacctaccccaactacacccccacagcccccagacccctctcagcccccgcctggccctatgcaacactag

SEQ ID NO: 288869 - DNA, 225 bp, Artificial Sequence
  derived and/or modified sequence
atgggcagacgctcttccaaatgttgttgtatatatgaaaaacctcgagcctttggggaaagctcaacagaaagcgacgaggaggaagaagaggggtgtggtcacactcactgtgtgcgggggcaccgcaagggaagacgaagagccaccctgggtcccacccctacaactcccccacagccccccgatcctagccagcctcccccgggcccaatgcagcactag

SEQ ID NO: 288870 - DNA, 225 bp, Artificial Sequence
  derived and/or modified sequence
atggggaggcgatcatcgaagtgttgctgtatttatgaaaagccacgtgcctttggcgaatcctctaccgagtccgatgaagaggaagaggagggctgtggccacacccattgtgtccgaggccatagaaaggggcggaggagagccacactcgggccgacccctacaactcccccccagccccccgatccttcacagcccccccctggcccaatgcaacactag

SEQ ID NO: 288871 - DNA, 225 bp, Artificial Sequence
  derived and/or modified sequence
atgggccgcagaagctctaaatgttgttgtatttacgagaagccaagggccttcggtgagtcttcgaccgagagtgacgaggaagaagaagaaggctgtggccatactcattgcgtaagggggcaccgtaagggtaggcgcagagcaacgctggggcccacaccaaccacacccccccagccgccggatcccagtcaaccccctcctggccccatgcagcactag

SEQ ID NO: 288872 - DNA, 225 bp, Artificial Sequence
  derived and/or modified sequence
atggggaggcggtctagcaagtgttgttgcatttacgaaaagcctcgggcgtttggagaatcctcaaccgagtcagacgaggaggaggaagagggatgcggccacacacactgcgtgagagggcatagaaagggcagacgcagagctaccctcggccccactccaacgactcctccccagccccccgacccttcgcagcctccccccggacctatgcagcactag

SEQ ID NO: 288873 - DNA, 225 bp, Artificial Sequence
  derived and/or modified sequence
atggggcgccgttcttccaagtgctgttgtatttatgagaagccaagagcctttggagagtcttctacagaatccgatgaggaggaagaggaaggttgtggacacacgcactgtgtgcgcggccataggaaagggcgcaggagggccaccctgggtccaacacctaccacgcccccacagccccccgaccctagtcaacctcctcccggtcctatgcagcactag

SEQ ID NO: 288874 - DNA, 225 bp, Artificial Sequence
  derived and/or modified sequence
atgggacgccgcagctcgaaatgctgctgcatctatgaaaagcctcgggcgttcggtgaatcctccactgagtccgacgaggaggaagaagaaggttgtggtcatacccattgcgtgaggggtcataggaaagggagacgcagagccacgctggggccgacacctaccacacctccacaacctcccgacccctcacagccaccgcccggacccatgcagcattag

SEQ ID NO: 288875 - DNA, 225 bp, Artificial Sequence
  derived and/or modified sequence
atgggtagaaggtcttccaaatgttgctgcatctacgagaagccacgagctttcggcgaaagcagcaccgagagcgatgaagaggaagaggagggttgcggacacactcactgcgtgcgtggacatagaaaaggacggcggagggccaccttgggacccacacctacaacccctccacaacccccagatccatcacagcctcctcctggacccatgcaacactag

SEQ ID NO: 288876 - DNA, 225 bp, Artificial Sequence
  derived and/or modified sequence
atggggagacgctcctcaaagtgctgttgcatttacgagaagcccagggccttcggcgagagtagtacagagtccgacgaagaggaggaagaaggctgcggccacacacattgcgtccgcggccatcgcaaaggccgcaggagggccactctgggccccacgccaaccacgcccccccagcccccagatccttcacagccacctccggggccgatgcagcactag

SEQ ID NO: 288877 - DNA, 225 bp, Artificial Sequence
  derived and/or modified sequence
atgggtcgccgctcgagtaaatgttgttgcatatacgaaaagcccagagcattcggcgagtcctctaccgaaagcgacgaagaagaggaggaagggtgcggacatactcactgtgttcggggccaccgcaagggccggcgccgggcgactctggggcccactccgacgacccctccccagccgccagatcctagccagcctccccccggcccgatgcagcattag

SEQ ID NO: 288878 - DNA, 225 bp, Artificial Sequence
  derived and/or modified sequence
atgggacgaaggagctcaaagtgttgttgtatctatgaaaagcccagagcattcggcgagagtagtactgagagcgatgaagaggaagaggaaggatgcggacatacacactgcgtacgtgggcatcgcaagggccgccgccgcgccaccttaggtcccactccaaccacaccaccccagccaccagatcccagtcagccaccaccaggtcccatgcagcattag

SEQ ID NO: 288879 - DNA, 225 bp, Artificial Sequence
  derived and/or modified sequence
atgggacgacgctcttctaagtgctgttgcatctacgagaaaccgcgggcttttggggagtcttcgaccgaatctgatgaggaagaggaagaggggtgcggccacactcactgtgtgagaggccatcggaagggcaggcgacgggctaccctaggacctacgcccacgacacctccacaaccacctgacccctcccagcccccccccggtcctatgcagcattag

SEQ ID NO: 288880 - DNA, 225 bp, Artificial Sequence
  derived and/or modified sequence
atgggtcggcgatcaagtaagtgctgttgcatttacgagaaacctcgtgcatttggggaaagcagtacagagtcagacgaggaggaggaagaagggtgtggccatacccattgcgtccgcggccaccgaaagggcaggagacgcgccacccttggacctactccaaccacccccccacagcccccggatccaagccagccaccacccgggccaatgcagcattag

SEQ ID NO: 288881 - DNA, 225 bp, Artificial Sequence
  derived and/or modified sequence
atgggtcgaagatcttcgaaatgctgttgcatctacgaaaagccccgcgcctttggagagtcttccactgaaagcgacgaggaggaggaagaggggtgcggtcacacccattgtgtgaggggccataggaaggggagacgtagagccacgttggggcctacccctacaacacctccccaaccacccgatccaagccagccccctccgggcccaatgcagcactag

SEQ ID NO: 288882 - DNA, 225 bp, Artificial Sequence
  derived and/or modified sequence
atggggcgacgctccagcaagtgctgctgcatctacgagaagccccgggcattcggggaaagctctactgagtccgatgaggaggaggaagagggatgtgggcacacacactgtgtgcgaggacaccgcaaagggagaaggcgcgcaaccctcggacctacccctaccacccctccacagcctcctgacccatcccagcccccccccggcccgatgcagcactag

SEQ ID NO: 288883 - DNA, 225 bp, Artificial Sequence
  derived and/or modified sequence
atgggtagaagatcatcaaagtgctgctgcatctacgaaaagccaagggctttcggggagtcgtcaactgaatccgacgaagaggaagaagagggctgcgggcatacacactgtgtgcgcggacatcgcaaaggccgacgtcgggcaaccctgggaccaaccccgactacgcccccacagcccccggatcccagtcagcccccccctgggcccatgcagcattag

SEQ ID NO: 288884 - DNA, 225 bp, Artificial Sequence
  derived and/or modified sequence
atgggaagaaggtcttccaaatgttgttgcatctacgaaaaaccgcgcgcattcggcgaaagcagtacagaatccgatgaggaggaagaggaggggtgtggccacacgcattgtgtcagaggccatcgtaaaggcaggcgaagggccactctcgggccaacaccgacgacacctccccagcccccagacccaagtcagccccccccggggcccatgcagcattag

SEQ ID NO: 288885 - DNA, 225 bp, Artificial Sequence
  derived and/or modified sequence
atgggacgccgctcctcgaagtgctgctgcatttatgagaagcctcgcgcattcggagagagttcaactgaaagcgatgaggaagaagaagaagggtgtggacacacacactgtgttcgcgggcatcggaaaggccgaaggagagccaccctgggaccaacaccgacaacccccccacagccacccgacccatcacagccccctcccggtcctatgcagcactag

SEQ ID NO: 288886 - DNA, 225 bp, Artificial Sequence
  derived and/or modified sequence
atgggcagacgttcttcaaaatgttgctgcatttacgaaaagccgcgggcctttggcgagtcttctacagagagcgatgaggaagaagaagagggctgtggccacactcactgcgtgcgcggtcacaggaaggggcggaggcgggcaaccctggggccaacccccaccactcctccccagcccccagaccctagtcagcctccacctggtccaatgcagcattag

SEQ ID NO: 288887 - DNA, 225 bp, Artificial Sequence
  derived and/or modified sequence
atgggaagacgatcctctaagtgctgctgtatttatgagaagcctagggcatttggagagagttcaacagagtcagacgaagaagaggaggaaggatgcggccacactcactgcgtcagagggcatagaaaggggagacgccgagcgactctaggacccactcctaccacaccaccccagccccccgatccaagtcagccccccccgggtcctatgcagcactag

SEQ ID NO: 288888 - DNA, 225 bp, Artificial Sequence
  derived and/or modified sequence
atgggcaggaggtctagtaaatgctgctgcatctacgagaaaccacgggcctttggcgagagctcgactgagtccgacgaggaagaagaggagggctgtggtcacactcactgcgtacggggccacagaaaaggacgccgccgcgctaccctgggtccaacccctaccactcccccacagcccccagacccatcccagcccccaccgggccctatgcagcactag

SEQ ID NO: 288889 - DNA, 225 bp, Artificial Sequence
  derived and/or modified sequence
atgggccgccgcagcagtaaatgttgctgtatctacgaaaaacctcgagcattcggcgagtcctccacagaatcagacgaagaggaggaagaggggtgcgggcacacacattgcgtgaggggccaccggaaggggcgtagaagggctaccctgggacccaccccgaccacacctccccaaccacccgacccatcccagcctccccctggccccatgcagcattag

SEQ ID NO: 288890 - DNA, 225 bp, Artificial Sequence
  derived and/or modified sequence
atgggcagacggagctcgaagtgttgctgtatctatgagaaacctcgagcatttggggaatccagcacagagagcgatgaggaggaggaagagggctgcggccacacccattgtgtcagaggacacagaaagggaaggaggcgggccaccctgggccctactccgactaccccgccgcagcctccggacccgtctcagcctccacccgggccaatgcaacattag

SEQ ID NO: 288891 - DNA, 225 bp, Artificial Sequence
  derived and/or modified sequence
atgggccgacgtagtagcaaatgttgctgtatctacgagaagcctcgggccttcggggaaagttccactgagtccgacgaggaagaagaggaaggatgtggacatactcactgcgtccgtggccatcgcaaaggtcggcggcgggcaaccctaggaccaactcccaccacaccaccacagccacccgatccttcccaaccaccacccggacccatgcaacactag

SEQ ID NO: 288892 - DNA, 225 bp, Artificial Sequence
  derived and/or modified sequence
atggggagaagaagttcgaagtgttgctgtatctacgaaaaacccagagctttcggggaaagcagcaccgagagtgacgaagaagaagaagagggatgtggccatacacactgcgtgagagggcatcggaaggggcggcgccgcgccacactcggcccgaccccgaccacccccccccagcctcctgaccccagccaacctccaccaggaccaatgcagcactag

SEQ ID NO: 288893 - DNA, 225 bp, Artificial Sequence
  derived and/or modified sequence
atggggcgcaggtcatctaaatgctgttgcatatatgagaagcccagagcgtttggcgagagcagcaccgagagcgacgaggaggaggaggaaggctgtggtcatactcactgtgttaggggccaccgaaagggccggcgtcgagccaccctgggccccacccctactacacccccccagcctcccgatccgagccagcccccccccggacccatgcagcattag

SEQ ID NO: 288894 - DNA, 225 bp, Artificial Sequence
  derived and/or modified sequence
atgggacggcgtagctccaaatgctgctgcatttacgagaagcctcgggcatttggagagtcttctacagaatcagatgaggaggaagaagagggctgtggccatactcattgtgtccgcggccatcgcaagggtcgccggcgcgcaacgctgggtcctactcctaccacccctccacagcccccggacccctcccagcctcccccaggacccatgcagcattag

SEQ ID NO: 288895 - DNA, 225 bp, Artificial Sequence
  derived and/or modified sequence
atgggaagaaggtcctctaagtgttgttgtatatatgagaagcccagagctttcggggagtcctccaccgaatctgacgaggaagaggaagaaggatgcggacatacgcattgtgtaaggggacatcgtaagggccgtagaagagcgaccctcggcccaaccccaaccacacccccccagccgcctgatccctcccagcctccccccggtccgatgcagcattag

SEQ ID NO: 288896 - DNA, 225 bp, Artificial Sequence
  derived and/or modified sequence
atggggcgtcgctctagtaaatgctgctgtatttatgagaaacctcgggccttcggggaaagctctacagagagtgatgaggaggaggaagagggttgtggacacacacattgtgtgcgaggccacagaaaaggacgccgcagggccaccctggggccaacccccacaaccccccctcagcctcccgatcccagccagccccctccaggccctatgcaacattag

SEQ ID NO: 288897 - DNA, 225 bp, Artificial Sequence
  derived and/or modified sequence
atgggtcgacgcagctccaagtgctgttgcatatatgagaagcccagagccttcggtgagagtagtacggaaagcgacgaagaagaagaggagggatgtggacacacacactgcgttcggggtcaccgcaagggccggaggcgggctactctcggcccgactcccacaacccccccacaacccccagatccctcccaacctccaccgggaccaatgcaacactag

SEQ ID NO: 288898 - DNA, 225 bp, Artificial Sequence
  derived and/or modified sequence
atgggacgtagaagctcaaaatgctgttgtatctacgaaaagccacgggctttcggcgaatcctcaacagaatccgatgaggaggaggaagagggatgcggccacactcactgcgtgagggggcacagaaagggtcggcgcagagcaacattgggaccaacacccactacaccaccccaaccgcccgatccatctcagccacctccaggacctatgcaacactag

SEQ ID NO: 288899 - DNA, 225 bp, Artificial Sequence
  derived and/or modified sequence
atgggtcggaggtcctctaaatgctgctgcatctatgagaaaccccgcgcatttggggaaagtagtacagagtccgacgaagaggaagaggaaggttgcgggcacacacattgtgtacgcgggcaccgtaagggacgacgtcgggctacactgggcccaactcccaccaccccaccacagcccccagatccctcccagcccccgcctgggccaatgcagcactag

SEQ ID NO: 288900 - DNA, 225 bp, Artificial Sequence
  derived and/or modified sequence
atgggtcgccgctcatccaaatgctgttgcatttacgaaaaacctcgagcctttggcgaatcctccactgagagcgatgaggaggaagaggagggctgcgggcacacacactgcgtgcggggtcatcgcaaagggagacgccgagcaacactcggtccaacgccaaccacacctccccaacctcccgatccttcgcagcccccgccaggcccaatgcagcattag

SEQ ID NO: 288901 - DNA, 225 bp, Artificial Sequence
  derived and/or modified sequence
atgggtcggaggtcatctaagtgctgctgcatttacgagaagcccagagcttttggtgagtcctccacagaaagcgatgaagaagaagaagaggggtgcggacacacgcactgcgtgcgtggccatcgcaagggcagaaggcgggccaccttggggccaactccaacaacaccaccacagcctccagatccgagccaaccccctccaggccctatgcaacactag

SEQ ID NO: 288902 - DNA, 225 bp, Artificial Sequence
  derived and/or modified sequence
atgggtaggcgatcgagcaaatgttgctgtatctacgaaaaaccccgggcctttggtgagtctagcaccgaatctgacgaggaggaagaggaagggtgcgggcacacccactgcgtcaggggacaccggaagggtagaaggcgggccactttgggccctacacctaccacaccacctcagcccccggacccatcccagccaccgcctggacctatgcagcactag

SEQ ID NO: 288903 - DNA, 225 bp, Artificial Sequence
  derived and/or modified sequence
atgggtagacggtcctctaaatgctgctgtatctatgagaaaccacgcgcattcggggaatcttccaccgaatcagacgaggaggaagaagaaggctgcggccacacacactgtgtccgagggcaccggaagggtcggcggcgcgctaccctgggaccgactccgaccactcccccgcaaccccctgacccttctcaaccaccccctggtcctatgcaacattag

SEQ ID NO: 288904 - DNA, 225 bp, Artificial Sequence
  derived and/or modified sequence
atgggacgaagaagctctaaatgttgctgtatctatgagaagccgagagcatttggggagagttctaccgaatccgatgaggaggaggaagagggctgcggacacacacactgcgtcaggggccacagaaaggggcgcaggcgagctacgctgggtcccacacccaccacaccaccacagcccccagaccctagccagccccccccaggtcctatgcaacattag

SEQ ID NO: 288905 - DNA, 225 bp, Artificial Sequence
  derived and/or modified sequence
atgggtcgccggagtagtaaatgctgttgcatctacgagaaaccaagggccttcggggaaagtagtactgaatcagacgaagaggaggaggagggctgcgggcatacacactgtgtgcgcggccatcgtaagggacgtaggcgagcgacacttggacccacccctaccacccctccgcagccccccgacccatctcagcccccccctgggcctatgcagcactag

SEQ ID NO: 288906 - DNA, 225 bp, Artificial Sequence
  derived and/or modified sequence
atgggccgacgttcatcaaaatgctgctgtatatatgagaaaccccgtgcctttggagagagctccaccgagtccgatgaggaagaggaggaagggtgcggccacactcactgcgtgcggggccatcggaagggccgacgccgggctacgttgggtcctactcctacaacacctcctcagccccccgacccttcccagcctccacctgggcccatgcagcattag

SEQ ID NO: 288907 - DNA, 225 bp, Artificial Sequence
  derived and/or modified sequence
atgggtcgacgcagttccaagtgctgctgcatatacgagaaacctcgtgcgtttggcgaaagcagcactgaaagtgatgaggaggaagaggagggctgtgggcacacacactgtgttagaggtcatagaaaaggaaggcgccgggctaccctcggcccaacacccaccaccccgccgcagccacccgacccctcacagccgcctcctggacctatgcagcattag

SEQ ID NO: 288908 - DNA, 225 bp, Artificial Sequence
  derived and/or modified sequence
atgggcagaagaagcagcaagtgctgctgcatctatgagaagccccgggccttcggggagagcagcacagaaagtgatgaggaggaggaggagggctgcggccacacccactgtgtgcggggccacaggaagggcagaagaagagccaccctgggccccacccccaccaccccaccccagcccccagaccccagccagcccccacctggccccatgcagcactag

SEQ ID NO: 288909 - DNA, 225 bp, Artificial Sequence
  derived and/or modified sequence
atgggccggcggagcagcaagtgctgctgcatctacgagaagccccgggcctttggagagagtagtaccgagtccgacgaggaggaggaggaaggctgtgggcatacgcattgcgtgcgcgggcataggaaaggaagaaggcgtgccacgctgggtcctaccccaactacccccccgcagccaccagacccaagtcagcccccgccgggccccatgcaacactag

SEQ ID NO: 288910 - DNA, 225 bp, Artificial Sequence
  derived and/or modified sequence
atgggccggcggagcagcaagtgctgctgcatctacgagaagcccagagcctttggcgagagcagcactgaatccgatgaagaagaggaggaggggtgcggacatacacactgcgtacgcggacatagaaagggtcggagacgcgctaccctgggccccacaccaactaccccaccacagccccctgatccctcccagcctccacccggccctatgcagcattag

SEQ ID NO: 288911 - DNA, 225 bp, Artificial Sequence
  derived and/or modified sequence
atgggccggcggagcagcaagtgctgctgcatctacgagaagccccgcgccttcggggagtctagcaccgagagcgatgaggaagaagaggagggctgcggacatactcactgtgtcaggggacatcggaagggcagacgccgagccacgctcgggccaacacctacaactcctccccaacctccagatccatctcagccaccacctggtcctatgcaacattag

SEQ ID NO: 288912 - DNA, 225 bp, Artificial Sequence
  derived and/or modified sequence
atgggccggcggagcagcaagtgctgctgcatctacgagaagcccagagcgttcggagagtcaagcacggagtctgacgaagaggaggaagaaggctgtggacatactcattgcgtacggggccaccgcaaagggcgccgtagggccacgctgggacctacccccacaacacccccacagcctccagaccccagccagccgccaccaggccccatgcaacattag

SEQ ID NO: 288913 - DNA, 225 bp, Artificial Sequence
  derived and/or modified sequence
atgggccggcggagcagcaagtgctgctgcatctacgagaagccccgcgcgtttggcgaaagctccaccgaatccgatgaggaggaagaggaagggtgcggccacactcactgtgtgagggggcatcgtaagggaaggaggagagctaccctgggtcctacccctacgacacctccgcagccaccagacccctcacagccaccgccaggccctatgcagcactag

SEQ ID NO: 288914 - DNA, 225 bp, Artificial Sequence
  derived and/or modified sequence
atgggccggcggagcagcaagtgctgctgcatctacgagaagcccagggctttcggagaatcatccactgagtcggacgaggaggaagaagaaggttgcggtcacacccactgtgtcagagggcacaggaaaggccgtcgccgcgctacccttggacccacgcccacgacaccaccccagcctcctgacccatcccagccaccccctggccctatgcagcactag

SEQ ID NO: 288915 - DNA, 225 bp, Artificial Sequence
  derived and/or modified sequence
atgggccggcggagcagcaagtgctgctgcatctacgagaagccccgggcgtttggagagtcttcgacagagagcgacgaagaggaagaggaggggtgtggtcatacacactgcgttcgcgggcatcgcaagggtaggagaagagcgaccctcggacctacgccaactacccctccgcaaccccccgaccccagtcagcccccaccggggcccatgcaacattag

SEQ ID NO: 288916 - DNA, 225 bp, Artificial Sequence
  derived and/or modified sequence
atgggccggcggagcagcaagtgctgctgcatctacgagaagcccagagcgtttggagaaagttctaccgagtccgatgaggaggaggaagaggggtgcgggcatactcactgtgtgcgcggccatcgaaaggggcggcgacgggcaacgcttggcccaactccgaccactccaccacagccccctgatccctcccagcccccccccggccctatgcaacactag

SEQ ID NO: 288917 - DNA, 225 bp, Artificial Sequence
  derived and/or modified sequence
atgggccggcggagcagcaagtgctgctgcatctacgagaagccccgcgcatttggtgagtcgagcactgagtccgatgaagaggaggaagaggggtgcgggcatactcattgcgttaggggccatcggaagggcaggcgaagggccacactggggccaacaccgaccacaccaccacagccgcccgatccctcacagcctccacccggccctatgcagcattag

SEQ ID NO: 288918 - DNA, 225 bp, Artificial Sequence
  derived and/or modified sequence
atgggccggcggagcagcaagtgctgctgcatctacgagaagcccagggcttttggcgagagttctactgagagcgatgaggaagaggaggagggatgtgggcacacccactgcgtccgagggcacagaaaagggaggcggcgggccactttgggacccacacctactaccccaccacagccaccagaccccagtcaacccccccctgggccaatgcagcactag

SEQ ID NO: 288919 - DNA, 225 bp, Artificial Sequence
  derived and/or modified sequence
atgggccggcggagcagcaagtgctgctgcatctacgagaagccccgggcctttggtgagtcctctacagaaagcgatgaagaggaggaggagggatgtggccacactcactgcgtacgggggcatcgtaagggccgacgtcgggccactttgggcccaacaccgacaacaccacctcagcctcctgacccctcgcagcctccccccgggccaatgcagcactag

SEQ ID NO: 288920 - DNA, 225 bp, Artificial Sequence
  derived and/or modified sequence
atgggccggcggagcagcaagtgctgctgcatctacgagaagccccgcgccttcggggaatcatccaccgaaagcgatgaggaagaggaggagggttgtgggcacacccattgcgtccggggtcaccggaagggaagacggagggcaactctgggccctactccgacaactccacctcagccgcccgatccttcccagcctccgccaggccctatgcagcactag

SEQ ID NO: 288921 - DNA, 225 bp, Artificial Sequence
  derived and/or modified sequence
atgggccggcggagcagcaagtgctgctgcatctacgagaagcccagagcctttggggagagcagcacggaatcagatgaagaagaggaggagggttgcgggcatacacattgcgtgagaggtcaccggaaggggaggcgaagagccacacttggaccgactccaaccacaccccctcagccccccgatccctctcaaccaccacccggccctatgcagcactag

SEQ ID NO: 288922 - DNA, 225 bp, Artificial Sequence
  derived and/or modified sequence
atgggccggcggagcagcaagtgctgctgcatctacgagaagcccagagccttcggtgagtcaagcaccgaatctgatgaggaagaggaagagggatgcgggcacacacattgcgtgcgggggcacagaaaaggaagacggagagctacactgggacctacaccgaccactccaccacagccccccgaccctagtcagcccccgcctgggcccatgcagcattag

SEQ ID NO: 288923 - DNA, 225 bp, Artificial Sequence
  derived and/or modified sequence
atgggccggcggagcagcaagtgctgctgcatctacgagaagcccagggcattcggcgagtcctcgactgagagcgacgaagaggaggaagaaggctgcggccacacccactgtgtgcgtggccacagaaaggggcgccgtcgcgcgacgctgggtcctacccccacaacacctcctcagccaccagatccaagtcagcctccacccggcccaatgcagcattag

SEQ ID NO: 288924 - DNA, 225 bp, Artificial Sequence
  derived and/or modified sequence
atgggccggcggagcagcaagtgctgctgcatctacgagaagccccgggctttcggagagtccagcaccgaaagcgacgaggaggaggaggaaggctgtggccacacacactgtgtcagggggcacaggaaaggcagacggagggcgaccttaggtcctactccaaccacgccaccgcaaccccctgacccgtcccagccgccacctggaccaatgcaacactag

SEQ ID NO: 288925 - DNA, 225 bp, Artificial Sequence
  derived and/or modified sequence
atgggccggcggagcagcaagtgctgctgcatctacgagaagccccgagcttttggcgaatcttccaccgagtctgacgaggaggaggaggaggggtgcgggcatacccactgtgtgagaggtcaccggaaaggcagaaggcgcgcaacacttggccccacaccaacgactccgccgcaacctccagatcctagccagccacctccggggcctatgcaacattag

SEQ ID NO: 288926 - DNA, 225 bp, Artificial Sequence
  derived and/or modified sequence
atgggccggcggagcagcaagtgctgctgcatctacgagaagcccagagcattcggggagtcttccacagagtctgacgaagaagaggaagagggctgcgggcacacgcattgcgtccgcggtcaccgtaaaggcagacgtagagctacacttggcccaacacctacgacaccaccgcaaccacccgatccctcacagcctcccccaggcccaatgcaacactag

SEQ ID NO: 288927 - DNA, 225 bp, Artificial Sequence
  derived and/or modified sequence
atgggccggcggagcagcaagtgctgctgcatctacgagaagccccgggcttttggcgaatcatccacagaatcagacgaagaggaggaagaagggtgtggccacacccactgtgttcgtggccaccggaagggaagaaggcgagctacactggggcctactccaacgacaccaccacagccccccgatccttcacagcccccgcctggtccgatgcagcactag

SEQ ID NO: 288928 - DNA, 225 bp, Artificial Sequence
  derived and/or modified sequence
atgggccggcggagcagcaagtgctgctgcatctacgagaagccccgggcgtttggcgaatccagcaccgaatcagatgaagaggaagaagaagggtgcgggcacacacactgcgtgagaggtcaccgcaagggtcggcgcagagcgacactgggccccactcctaccacgccaccacaaccacctgacccgagccagccacctccgggacctatgcaacattag

SEQ ID NO: 288929 - DNA, 225 bp, Artificial Sequence
  derived and/or modified sequence
atgggccggcggagcagcaagtgctgctgcatctacgagaagcccagagccttcggggagtcttctactgaatcagacgaagaggaggaggagggatgtggccatacccattgcgtccgggggcacaggaaaggaaggcggagagctaccctgggtccaacccctacaacccctccccagcctccagatcccagccaacccccccccggaccgatgcagcactag

SEQ ID NO: 288930 - DNA, 225 bp, Artificial Sequence
  derived and/or modified sequence
atgggccggcggagcagcaagtgctgctgcatctacgagaagccccgcgcttttggcgagtcatccactgaaagtgatgaagaggaggaagaaggctgtggacatacccactgcgttcgaggacatcggaaaggcaggcgaagggctaccttaggtcctaccccaactactcctccgcagccccctgatccatctcagccgcccccaggacccatgcagcactag

SEQ ID NO: 288931 - DNA, 225 bp, Artificial Sequence
  derived and/or modified sequence
atgggccggcggagcagcaagtgctgctgcatctacgagaagccccgagctttcggggagagcagtacagagtcggacgaggaagaagaagagggctgcggccatacacactgtgtcagaggccacagaaaggggcgccgacgtgccacactgggcccgacgcccactacccccccacaacccccagaccctagccagcctccaccgggtccgatgcagcactag

SEQ ID NO: 288932 - DNA, 225 bp, Artificial Sequence
  derived and/or modified sequence
atgggccggcggagcagcaagtgctgctgcatctacgagaagcccagggcattcggcgaatcgtctacagagtcagatgaagaggaggaggagggttgtggacatactcactgcgtccgaggtcacaggaagggcaggcgtagagctacactcgggcctactccaacaaccccccctcaacctcccgatccgtcccagcccccacccggcccaatgcagcattag

SEQ ID NO: 288933 - DNA, 225 bp, Artificial Sequence
  derived and/or modified sequence
atgggccggcggagcagcaagtgctgctgcatctacgagaagcccagagctttcggcgagagtagtactgagtctgatgaggaagaagaggagggttgtggccacacgcattgtgtcaggggccaccggaagggccggaggcgagccactctcggccccacacctacgacaccgccccaaccacccgatccatcccagccccctccaggtcctatgcagcattag

SEQ ID NO: 288934 - DNA, 225 bp, Artificial Sequence
  derived and/or modified sequence
atgggccggcggagcagcaagtgctgctgcatctacgagaagccccgagcttttggcgagtcttccaccgaaagcgacgaagaggaagaagagggatgcggacacactcactgcgtcagaggtcatagaaaaggacgtagacgagccacactgggtcctactccaacgaccccaccccagccacccgacccctcccagcctccaccagggcctatgcagcactag

SEQ ID NO: 288935 - DNA, 225 bp, Artificial Sequence
  derived and/or modified sequence
atgggccggcggagcagcaagtgctgctgcatctacgagaagccccgggcctttggggagtcgagcactgagagcgatgaggaggaagaagagggatgcgggcatacccattgcgtccgcgggcataggaaggggcgacgccgggccaccttaggtccaacgcccacaactcctccacagcccccagacccatcccagcccccacctggtccaatgcaacattag

SEQ ID NO: 288936 - DNA, 225 bp, Artificial Sequence
  derived and/or modified sequence
atgggccggcggagcagcaagtgctgctgcatctacgagaagcccagagcgttcggcgaaagtagtacagagtcagatgaggaagaggaggagggctgcggccacacccactgtgtccgtggtcatagaaagggccggcggcgcgccactttggggccgaccccgacgactccgccccaaccgccggacccctcccaaccgccccccgggcctatgcagcattag

SEQ ID NO: 288937 - DNA, 225 bp, Artificial Sequence
  derived and/or modified sequence
atgggccggcggagcagcaagtgctgctgcatctacgagaagccccgggcgtttggcgagtcttcaaccgaatctgacgaagaggaggaagagggctgcggccacacacactgcgtcagggggcaccgcaaaggtcgacggcgagcgactttgggccctactccgacaaccccaccccagccaccagacccatcgcaaccccctccaggccctatgcagcactag

SEQ ID NO: 288938 - DNA, 225 bp, Artificial Sequence
  derived and/or modified sequence
atgggccggcggagcagcaagtgctgctgcatctacgagaagcccagagcttttggtgaatcttctaccgagtccgatgaagaggaagaagaggggtgcggccacacccattgcgtgcgagggcatcgtaagggaagacgccgtgctacgctgggccccacacctactacacctccccaaccgccagacccaagtcaaccaccacctgggcccatgcagcactag

SEQ ID NO: 288939 - DNA, 225 bp, Artificial Sequence
  derived and/or modified sequence
atgggccggcggagcagcaagtgctgctgcatctacgagaagccccgagcatttggagagagcagtacagaatccgatgaggaggaggaggaaggctgtgggcacacacactgcgtccgcggccaccgcaagggtaggcggcgcgctaccttgggcccgacacccactacccctccccagccaccagatccctcccaaccaccaccgggtcctatgcaacactag

SEQ ID NO: 288940 - DNA, 225 bp, Artificial Sequence
  derived and/or modified sequence
atgggccggcggagcagcaagtgctgctgcatctacgagaagcccagagcatttggcgaatcctcaacagaatcggacgaagaggaggaggaggggtgtggccacactcactgcgtgagaggtcatcgcaaaggaagaagaagggccacactcggacctacgccgaccacccctccccaacccccagacccttcacagcctcctccggggcctatgcagcactag

SEQ ID NO: 288941 - DNA, 225 bp, Artificial Sequence
  derived and/or modified sequence
atgggccggcggagcagcaagtgctgctgcatctacgagaagcccagggcctttggtgaatctagcaccgagtccgatgaagaagaagaagagggctgcggccacacccactgcgtgagaggacatcgcaaagggcggaggcgcgctactttgggccccacacccaccaccccaccacaaccccctgacccatcccaacctcccccaggtccgatgcagcactag

SEQ ID NO: 288942 - DNA, 225 bp, Artificial Sequence
  derived and/or modified sequence
atgggccggcggagcagcaagtgctgctgcatctacgagaagccccgcgcttttggcgagagtagcacggagtctgacgaagaagaggaagaagggtgtggacacacccactgcgtccggggtcacaggaaaggccggcgacgcgctactctggggccaacgccaaccacacctccccaaccccctgacccaagtcagcctccaccagggccgatgcagcattag

SEQ ID NO: 288943 - DNA, 225 bp, Artificial Sequence
  derived and/or modified sequence
atgggccggcggagcagcaagtgctgctgcatctacgagaagccccgggcttttggagagtcaagcaccgagtccgacgaagaggaagaggaaggatgcggccatacacactgtgtaagaggccatcgcaaagggcgccgcagggcgacactggggccgacaccaaccactcctccccagcccccagatccatcacagccacccccgggtcccatgcaacattag

SEQ ID NO: 288944 - DNA, 225 bp, Artificial Sequence
  derived and/or modified sequence
atgggccggcggagcagcaagtgctgctgcatctacgagaagcccagagcctttggggaatcaagtacagaaagcgatgaagaggaggaagaaggctgtgggcatacccattgcgtgagggggcataggaagggccgcagaagagccacactgggaccaactcctactactccaccgcagcccccggatccctcccaacctcctccgggtcctatgcagcactag

SEQ ID NO: 288945 - DNA, 225 bp, Artificial Sequence
  derived and/or modified sequence
atgggccggcggagcagcaagtgctgctgcatctacgagaagccccgcgccttcggagagtcctccaccgaatctgacgaggaggaagaggagggttgtggacacacccactgcgtcagggggcacaggaaaggtaggcgccgcgccacccttggcccaacacctaccaccccccctcagccgcctgacccgtcgcaacctcctccaggcccaatgcagcattag

SEQ ID NO: 288946 - DNA, 225 bp, Artificial Sequence
  derived and/or modified sequence
atgggccggcggagcagcaagtgctgctgcatctacgagaagcccagagcatttggcgagagctctaccgaatccgatgaagaggaggaggaaggctgtggtcatacccattgcgtcagaggccataggaaggggcggcgccgggccacattggggcccactcccacaactcccccccagcccccggacccctcacaaccgcccccagggcctatgcagcactag

SEQ ID NO: 288947 - DNA, 225 bp, Artificial Sequence
  derived and/or modified sequence
atgggccggcggagcagcaagtgctgctgcatctacgagaagccccgtgctttcggggagagcagcaccgaaagcgatgaggaagaggaagagggttgtggacatacccactgcgttagggggcaccggaagggcagacgccgggcaacgctggggcccactccgacaaccccccctcagccaccagatccctcacaaccacccccgggccccatgcagcactag

SEQ ID NO: 288948 - DNA, 225 bp, Artificial Sequence
  derived and/or modified sequence
atgggccggcggagcagcaagtgctgctgcatctacgagaagcccagagcttttggagagagctccaccgaaagtgatgaagaggaggaggaggggtgcggtcacacccattgcgtccgcggccaccgaaagggtagaaggagagctaccctggggcctacaccgaccacgccaccccagccccctgatcctagtcagcctccaccaggacctatgcagcattag

SEQ ID NO: 288949 - DNA, 225 bp, Artificial Sequence
  derived and/or modified sequence
atggggagacgcagtagcaaatgctgttgtatttatgaaaaacctcgagcatttggcgagtcaagcacagagtccgacgaggaggaagaggaaggttgtggccacactcactgcgttagagggcatcggaaaggccgtcgtagggccactttgggcccaactcccactacgcccccacagccgccagacccgtctcagccaccgcctggccctatgcaacactag

SEQ ID NO: 288950 - DNA, 225 bp, Artificial Sequence
  derived and/or modified sequence
atgggacgcagatcgagtaaatgttgttgcatatatgaaaagccaagggctttcggagagtcctctacggaatccgacgaagaagaagaggaaggctgtgggcacacccattgtgtccgcggacataggaagggaaggcggcgtgctacactcggccctactccaactacccctccacagcctccagatccaagccaacctccgcctgggcctatgcagcactag

SEQ ID NO: 288951 - DNA, 225 bp, Artificial Sequence
  derived and/or modified sequence
atggggaggcgctcatctaaatgctgctgcatatacgagaagccgagagccttcggcgaatcctcgaccgagagcgatgaagaggaagaggagggctgtggccacacccactgcgtacgtggacataggaagggcaggcggagggcaactctcgggccaacacccaccactccaccacagccaccagaccctagtcagcctccgccaggacctatgcagcactag

SEQ ID NO: 288952 - DNA, 225 bp, Artificial Sequence
  derived and/or modified sequence
atgggccgacgatcgtccaagtgctgctgcatctatgagaagccccgagcattcggagaatccagcactgagagtgacgaagaggaggaagaaggatgcggccacactcactgcgtgcgtgggcatcgaaaaggcaggaggcgcgcaacacttgggcctacgcctaccaccccacctcagccgcctgacccatcccagcctccccctggaccaatgcagcattag

SEQ ID NO: 288953 - DNA, 225 bp, Artificial Sequence
  derived and/or modified sequence
atgggccgtcgaagctccaagtgttgctgtatctatgaaaagcctcgtgcattcggagagtcttccacagagtcggatgaggaggaggaagagggctgtggacatacacattgtgtaagaggtcatagaaaaggacggagaagggcaacactaggcccaactcccaccacacctcctcagcctccagatcctagccagccacccccaggcccaatgcagcactag

SEQ ID NO: 288954 - DNA, 225 bp, Artificial Sequence
  derived and/or modified sequence
atgggcagaagaagcagcaaatgttgttgcatctacgagaagccaagagcattcggcgagagtagtacagaatctgacgaggaagaagaggaaggatgtggccatacgcattgcgtcaggggacaccgcaagggaaggcggagagccacgctgggacctacaccaacaactcctccacagccccctgatccttcacagccccctcctggccctatgcagcactag

SEQ ID NO: 288955 - DNA, 225 bp, Artificial Sequence
  derived and/or modified sequence
atgggcaggcggtctagtaagtgttgttgcatctacgagaagccgcgagcttttggcgagagctccactgagtctgatgaggaagaggaggagggttgcggacacacccactgcgtcaggggacatagaaaagggagaaggcgcgctacgttagggccaacacccaccacacctccacagccccctgacccatctcagccacctccgggtcctatgcagcactag

SEQ ID NO: 288956 - DNA, 225 bp, Artificial Sequence
  derived and/or modified sequence
atgggacgccgaagctcgaagtgttgctgtatttacgagaagcctcgagctttcggggagtcatccaccgaatccgacgaagaggaggaagagggatgtgggcatacccattgcgtgcgcggacatcggaaaggtagacgtcgggctacgctcgggcctacacctaccacacctccccagccccctgacccgtcccagccgcctcccggaccaatgcaacactag

SEQ ID NO: 288957 - DNA, 225 bp, Artificial Sequence
  derived and/or modified sequence
atggggaggagatcaagcaaatgctgctgcatttatgaaaaacccagagctttcggcgagtcctctactgaatctgacgaagaggaggaagaaggctgtggccacacacactgtgtccggggtcacaggaagggcagacggagagccacgctggggcctaccccaaccacccctcctcagccacctgacccctctcagccccctcctgggccaatgcagcattag

SEQ ID NO: 288958 - DNA, 225 bp, Artificial Sequence
  derived and/or modified sequence
atgggtcgccgttcatctaaatgttgctgtatttacgaaaagccacgtgcctttggagaatctagcactgaatccgacgaggaggaagaggaggggtgtggccacacacactgcgtacgcggacatcggaaaggcaggcggagggcaacgctgggccctactcccaccactccgccacaaccgcctgaccccagtcagccacccccaggtccaatgcagcactag

SEQ ID NO: 288959 - DNA, 225 bp, Artificial Sequence
  derived and/or modified sequence
atgggcagaaggagtagcaaatgctgctgtatctacgagaagccgagggctttcggagagtcttccaccgaatctgacgaggaagaagaggagggctgcgggcatacacattgtgttcgaggacaccggaaaggcagaaggcgcgcaactctgggccctactccaaccacaccacctcagcccccagatcctagccagcctccacctgggccaatgcagcactag

SEQ ID NO: 288960 - DNA, 225 bp, Artificial Sequence
  derived and/or modified sequence
atggggagacgcagcagtaaatgttgttgtatttatgagaaacctcgggcttttggggagtcgtcaacagaaagcgacgaggaagaggaggaaggctgtggacacacacattgcgttcgtggtcaccgtaaaggacggcgtcgcgctactctggggccaacgccaaccacacctccccagccacctgacccatcccaaccacccccagggcctatgcaacactag

SEQ ID NO: 288961 - DNA, 225 bp, Artificial Sequence
  derived and/or modified sequence
atgggaaggcgctcatctaagtgctgctgtatctatgagaagccacgggctttcggagaatcttccacagagtccgatgaggaagaggaagagggctgtgggcatacgcactgcgtgagaggacaccgcaaaggcagacggagagccacgttaggcccaacacccacgactccccctcagcctcctgaccctagccagcctcctccgggtcctatgcagcactag

SEQ ID NO: 288962 - DNA, 225 bp, Artificial Sequence
  derived and/or modified sequence
atggggaggaggtccagcaagtgttgttgcatttatgagaagcccagggcttttggagagtcttctactgaatcggacgaagaggaggaggaaggctgtggccacacacactgtgtgagggggcatcggaagggcagacgccgtgctaccttgggtcctacgcccaccacacctccccagcccccagacccttcacaacctccaccaggcccaatgcaacattag

SEQ ID NO: 288963 - DNA, 225 bp, Artificial Sequence
  derived and/or modified sequence
atgggacgcaggtcttctaagtgctgttgtatctatgagaagccacgagccttcggtgagtcctctacagaaagcgacgaggaggaggaagaaggatgtggacacacacattgtgtgcgtgggcaccgcaaggggaggcgaagagccacactaggccctacaccaactacacccccacagccacccgacccaagtcagcccccaccaggtcccatgcaacattag

SEQ ID NO: 288964 - DNA, 225 bp, Artificial Sequence
  derived and/or modified sequence
atggggcgtagatcatctaaatgttgttgcatttatgaaaaacccagagctttcggggaatccagtacagagtctgacgaggaggaggaggagggatgcgggcatacccattgcgtgcggggtcaccggaaagggaggcgccgagccactctcggaccgacacctacgaccccaccacagcctccggatcctagtcaaccaccgccagggccaatgcagcactag

SEQ ID NO: 288965 - DNA, 225 bp, Artificial Sequence
  derived and/or modified sequence
atgggacgcagatcctctaaatgttgctgtatctacgagaaacccagagcttttggcgagagttcaaccgaaagcgatgaggaagaagaggaaggctgcgggcacactcactgcgtaagaggtcatcgaaaaggtcgaagaagggcaacgttggggcctacacccactacacctcctcagccccctgacccatctcaacctccacccggacctatgcagcactag

SEQ ID NO: 288966 - DNA, 225 bp, Artificial Sequence
  derived and/or modified sequence
atgggaaggaggtccagtaagtgttgctgcatctacgagaagccaagagcgttcggggagagctcaacagaatcagacgaggaggaagaagaagggtgcggccatactcactgcgttcgagggcaccgcaaaggtcgcaggcgggcaacacttgggccaacccctacaaccccaccacagccccctgacccctcacaacctccgccaggccctatgcagcattag

SEQ ID NO: 288967 - DNA, 225 bp, Artificial Sequence
  derived and/or modified sequence
atgggcaggaggtcttcgaagtgttgctgtatctacgaaaagcctagagcctttggcgaatcttcaactgagtccgacgaagaagaggaggaaggatgcggccacacgcactgcgtgcgagggcataggaagggccgaagacgcgctacgcttggccctactcctacgactcctccgcagcctcccgatcccagccagccccctcccggacccatgcaacattag

SEQ ID NO: 288968 - DNA, 225 bp, Artificial Sequence
  derived and/or modified sequence
atgggtagaagatccagcaaatgttgttgcatttacgaaaagcctagggcgttcggagagagctccacagaaagcgacgaagaagaagaagagggttgtggtcatacccattgcgtgaggggacacaggaagggccgtcggagggctaccctaggaccaactcctacgaccccgccacagccacccgatccttctcagccacctccaggcccaatgcagcattag

SEQ ID NO: 288969 - DNA, 225 bp, Artificial Sequence
  derived and/or modified sequence
atgggacgaagatcgtccaaatgttgttgtatttacgagaagccccgagctttcggcgagagttccacagagtctgacgaagaggaagaagagggatgtggccacactcactgcgttcgtggccatcgaaaaggccgaagaagggcaactctcggacccaccccaacgacgcccccacagcctcccgacccatctcagccaccccctggacccatgcaacactag

SEQ ID NO: 288970 - DNA, 225 bp, Artificial Sequence
  derived and/or modified sequence
atgggtcggagatcttctaaatgctgttgcatttacgagaaaccccgagcctttggagagtcctctaccgaatctgatgaagaggaggaggaaggctgcgggcatacccactgcgtgcggggtcatcgaaagggacgacgtcgtgccacactgggacctacaccaactacaccacctcagcctcccgacccgtctcagcctcccccaggcccaatgcagcactag

SEQ ID NO: 288971 - DNA, 225 bp, Artificial Sequence
  derived and/or modified sequence
atgggcagacgctcgtccaaatgttgctgcatttatgagaaaccgagagcattcggcgaaagttctacagaatccgatgaggaggaggaagaggggtgcggacatacccactgtgtacgagggcataggaaagggagacgccgagcaaccctgggacccaccccaacaacaccaccacaacccccagacccttcccagcctccacctgggccaatgcagcattag

SEQ ID NO: 288972 - DNA, 225 bp, Artificial Sequence
  derived and/or modified sequence
atgggacggaggagcagcaagtgctgctgtatctacgaaaaacctagggcgttcggggaatcctcaaccgaatctgatgaggaggaggaggagggctgcggacatactcattgcgtgagaggacatagaaaaggaagaaggcgggctaccctgggaccaacacccacaactcctcctcagcccccagacccatctcaaccaccaccaggtccaatgcagcactag

SEQ ID NO: 288973 - DNA, 225 bp, Artificial Sequence
  derived and/or modified sequence
atgggcaggcgttcaagcaaatgttgttgcatctatgagaagcccagggctttcggtgaatcttccacagagtccgatgaggaggaagaggaaggatgcggacatactcactgcgtgcgcggacacagaaaaggtcgtagacgggcaaccctcggcccaactcccacaacacctccgcagccccctgatcctagccagccacccccaggacctatgcagcattag

SEQ ID NO: 288974 - DNA, 225 bp, Artificial Sequence
  derived and/or modified sequence
atgggtagacgcagtagcaaatgttgctgtatttacgaaaaaccacgcgcattcggggagagcagcaccgagagcgatgaagaggaggaagagggatgtggacacacccactgtgtgcgaggccatcggaagggacgaaggcgagccaccctcgggccaactccgaccacacctccacagccacctgatccatcccagccaccccctggcccaatgcagcattag

SEQ ID NO: 288975 - DNA, 225 bp, Artificial Sequence
  derived and/or modified sequence
atgggtcgcaggtccagtaaatgctgctgtatctatgagaaacccagggccttcggtgagagtagcacagaatctgacgaggaggaggaggaagggtgtgggcatacacactgcgtcaggggccaccgcaaaggacgcaggcgtgcaaccttgggccctacccccacaactcccccacagcctccggacccctctcagccaccccctggaccaatgcaacactag

SEQ ID NO: 288976 - DNA, 225 bp, Artificial Sequence
  derived and/or modified sequence
atggggagacgttcatccaaatgttgctgtatctatgaaaaaccgcgagcctttggagaaagtagcactgaaagtgacgaagaagaagaggagggatgtgggcatacacactgcgtgagaggtcaccgcaagggacggaggagagcaacactgggcccaacccctacgaccccacctcaaccacctgacccgagccagccaccacctggcccaatgcagcactag

SEQ ID NO: 288977 - DNA, 225 bp, Artificial Sequence
  derived and/or modified sequence
atgggcaggcggtcttcgaaatgttgctgcatctatgaaaagcccagagcattcggcgaaagtagcactgagagtgacgaagaggaagaggaaggctgtggacacacgcactgtgttaggggccacaggaagggtcgaagacgggcaacattagggccaacccccacaactccccctcagcccccagatccatcccagcctccccctggacccatgcagcattag

SEQ ID NO: 288978 - DNA, 225 bp, Artificial Sequence
  derived and/or modified sequence
atgggcaggagatccagcaaatgctgctgcatctacgagaagcccagggcgttcggcgagagtagcacagagtcagatgaagaggaggaagagggttgcggacacacccactgtgtacgcggacatcggaagggtcgcaggagggctactttaggccctacacccacgacgccacctcagccacctgacccatcccaacccccacctggaccaatgcagcattag

SEQ ID NO: 288979 - DNA, 225 bp, Artificial Sequence
  derived and/or modified sequence
atgggcaggcggtcatctaagtgctgctgcatttacgagaagccccgagccttcggagaaagcagcactgagtcggacgaagaggaggaagaaggctgtggccatacgcactgcgtgcggggtcatcgcaaagggcgtcgaagggccacgctcgggcctactcctactacaccacctcagccaccagacccaagccagcccccaccaggtccgatgcagcactag

SEQ ID NO: 288980 - DNA, 225 bp, Artificial Sequence
  derived and/or modified sequence
atggggcgacgtagttctaagtgctgctgtatctacgaaaaacccagagcttttggcgagtcctccacggaaagcgacgaagaggaggaggaagggtgtggccacacacattgcgttagaggtcatcgtaagggcaggcggagagccaccttgggaccaaccccgactactcccccacagccgcctgatccctctcagcctccacctgggcctatgcagcactag

SEQ ID NO: 288981 - DNA, 225 bp, Artificial Sequence
  derived and/or modified sequence
atgggaagacggtcatccaagtgctgctgcatctacgagaaaccccgtgcattcggagagagctctaccgagagcgacgaggaggaggaagaaggatgcggccatacacactgcgtgcggggtcaccggaaaggaagacggagggccacccttggtcccacacccaccacgcctcctcaaccacctgacccttctcaacctccacccggtccgatgcaacactag

SEQ ID NO: 288982 - DNA, 225 bp, Artificial Sequence
  derived and/or modified sequence
atggggcgtcgtagtagcaagtgttgttgcatctatgagaagccacgggcattcggagagagcagtaccgagtcagatgaagaagaggaagaaggttgtggacatacccattgtgtgcgagggcacagaaaaggtcggcgtagggcaactcttggacccacccccaccacgcctccacaaccccctgaccccagtcaacctcctcccggtcctatgcaacattag

SEQ ID NO: 288983 - DNA, 225 bp, Artificial Sequence
  derived and/or modified sequence
atgggccgtcgaagcagcaaatgttgctgcatctacgaaaagcctcgggcttttggggagagttccactgagagtgacgaagaagaggaagaagggtgtggacatacccactgtgtccggggtcatagaaaaggcagaagaagagccacccttggaccaactcccaccacacctccgcaacctcccgatccatcacagccacctcctggacccatgcagcattag

SEQ ID NO: 288984 - DNA, 225 bp, Artificial Sequence
  derived and/or modified sequence
atggggaggcgctcgtccaagtgttgttgtatttacgagaagccgagagcatttggcgaaagttcaacggaatccgatgaggaggaggaggaagggtgcggtcacacccactgcgtcagggggcacaggaagggcagaaggagagctacactggggccaacacctacgacccctcctcagcctccggacccctcccagcctcctcctgggcctatgcagcactag

SEQ ID NO: 288985 - DNA, 225 bp, Artificial Sequence
  derived and/or modified sequence
atgggcagacgctcctctaagtgttgttgtatctacgagaagccgagggcctttggggagagctccaccgaaagtgatgaggaagaggaagagggctgtgggcacacccattgcgtgcggggtcatcggaagggaagaagacgggcaaccctgggtccaacccccacaacaccccctcagcctccggacccaagccagcccccacctggtcctatgcagcactag

SEQ ID NO: 288986 - DNA, 225 bp, Artificial Sequence
  derived and/or modified sequence
atggggagaagatcctcaaagtgttgctgcatttacgagaagcctagagccttcggagaatcttccactgaatctgacgaggaggaggaggagggctgtggtcacacgcactgtgtgagaggacaccggaagggcaggcggagagctactctgggccctacccctacaactccgcctcaacctcctgacccaagtcagccccctccgggacccatgcagcactag

SEQ ID NO: 288987 - DNA, 225 bp, Artificial Sequence
  derived and/or modified sequence
atgggaaggagaagttctaaatgttgttgcatttatgagaagcccagggcatttggcgaatcatctacggaaagcgacgaagaggaggaggagggctgtgggcacacacattgcgtgcggggtcaccggaagggaaggaggcgcgcaaccctcgggccaacaccaacgactcccccacaacctccggacccatctcagcccccaccaggacccatgcaacactag

SEQ ID NO: 288988 - DNA, 225 bp, Artificial Sequence
  derived and/or modified sequence
atgggaagaaggtcttccaaatgttgctgcatatatgagaaaccgagggcatttggtgaatcaagcaccgagtctgatgaggaagaggaagagggctgcgggcatacccactgcgtccgtggacacagaaagggcagacgtcgagccacacttggaccgaccccaactacaccaccacagcctcctgatccctctcagcccccacctggcccaatgcagcactag

SEQ ID NO: 288989 - DNA, 1723 bp, Artificial Sequence
  derived and/or modified sequence
ggaaaaaggaagggagatcaaagattaggtgctggggactgaaaaataattttcatgtattaatactaccaaggatgatttggggaggaagacggagaaacagcaaggattatattttcctttgaagagttgctgggacctttcctaggttaggaattgtgtcttctcttatactggtggtataagaacaggaaataatacttattcctcaagggactatctgaggtaaaagacctgttctgttttatcttctgtcagctcctctggtgctatgcctatggtactgattgagctaaagaagaaaagagaggaggttccctgggagggagtgggaaaggttagtaagaggggactagataggtatgctcatccttaaccttctaggagaaccggagccttaccatcaaacttcggaaacggaagccagagaaaaaggtagaatggacaagtgacactgtggacaatgaacacatgggccgccgctcatccaaatgctgctgtatttatgagaaacctcgggcctttggcgagagctccacggaaagtgatgaggaggaagaagagggctgtggtcatacacactgtgtacgtggccaccgcaaaggacggcgtcgtgcaaccctaggaccgacccccaccacccctccccagcctcctgacccttcccagccccctccagggccaatgcagcactaaatccctctctcctccagcattcctgtgtctgtctggccctaaatgtatccatgtggctacttctccagccccctccttccctctcttctgcctgatagagggaagaggaagaggaggacgaacagagatcctgaaattctgacttgctgctattccagaacccagcctcctgggtttccccagtcctcatttttcctcccaatacccacccttctctctcgagggatctaggcaccttggtcccagtgtcttccttttgttctcactgccaaactgcctgtcctgggatctagttatcttggccctgcactctcaacatgagtagcgaacacttaaattgggttttcaacagtcccagctttcactgccagggtcccagtcagattccaggaatttgcgccctaactttgcttgctaatcctggtttagagctatcccactaaaatatttaatcctaattcttagtccttgcctgtgagatatgaggtcttacaggagacctcagagctcccagcccttctcctcctgctaacccttctcacaccctcaagaggagttagaaaagaggtccttgtcattctcacctcttatggaaaatggaataagaaataatcatatcctttcttcccacccttctcctgttatttaggatttctgacaaagctggcttgagattggtcacttagagccgactgtctcctctgccttttgtttttcagcttcagagacagatccaatatagtcccagggacctgggtctctgggagaggaaggaagagggagggagcaaagagattggggtatgtcccctgtagtacactcttacctcttacttcctagactttgatttctccggcagcccagatgttcagttctcttggcccctctctaccccttactgggatccggttttcattttccggtccttttgccatacacagttacagagatcagtcaaatccataccaccactgagatctcatttattgccacagatgcacaaaataaataacccaaaatcacaaaa

SEQ ID NO: 288990 - DNA, 1464 bp, Artificial Sequence
  derived and/or modified sequence
gggatatgggaggtgtggggttgaatatctagggctgggagaatcggaaggatgatttggggaggaagacggagaaacagcaaggattatattttcctttgaagagttgctgggacctttcctaggagaaccggagccttaccatcaaacttcggaaacggaagccagagaaaaaggtagaatggacaagtgacactgtggacaatgaacacatgggccgccgctcatccaaatgctgctgtatttatgagaaacctcgggcctttggcgagagctccacggaaagtgatgaggaggaagaagagggctgtggtcatacacactgtgtacgtggccaccgcaaaggacggcgtcgtgcaaccctaggaccgacccccaccacccctccccagcctcctgacccttcccagccccctccagggccaatgcagcactaaatccctctctcctccagcattcctgtgtctgtctggccctaaatgtatccatgtggctacttctccagccccctccttccctctcttctgcctgatagagggaagaggaagaggaggacgaacagagatcctgaaattctgacttgctgctattccagaacccagcctcctgggtttccccagtcctcatttttcctcccaatacccacccttctctctcgagggatctaggcaccttggtcccagtgtcttccttttgttctcactgccaaactgcctgtcctgggatctagttatcttggccctgcactctcaacatgagtagcgaacacttaaattgggttttcaacagtcccagctttcactgccagggtcccagtcagattccaggaatttgcgccctaactttgcttgctaatcctggtttagagctatcccactaaaatatttaatcctaattcttagtccttgcctgtgagatatgaggtcttacaggagacctcagagctcccagcccttctcctcctgctaacccttctcacaccctcaagaggagttagaaaagaggtccttgtcattctcacctcttatggaaaatggaataagaaataatcatatcctttcttcccacccttctcctgttatttaggatttctgacaaagctggcttgagattggtcacttagagccgactgtctcctctgccttttgtttttcagcttcagagacagatccaatatagtcccagggacctgggtctctgggagaggaaggaagagggagggagcaaagagattggggtatgtcccctgtagtacactcttacctcttacttcctagactttgatttctccggcagcccagatgttcagttctcttggcccctctctaccccttactgggatccggttttcattttccggtccttttgccatacacagttacagagatcagtcaaatccataccaccactgagatctcatttattgccacagatgcacaaaataaataacccaaaatcacaaaa

SEQ ID NO: 288991 - DNA, 1536 bp, Artificial Sequence
  derived and/or modified sequence
ggattagaagagttgttggaggagctaggcctagggatatgggaggtgtggggttgaatatctagggctgggagaatcggaaggtattggagctatttggagtggcagagatggtgcaggaggatgatttggggaggaagacggagaaacagcaaggattatattttcctttgaagagttgctgggacctttcctaggagaaccggagccttaccatcaaacttcggaaacggaagccagagaaaaaggtagaatggacaagtgacactgtggacaatgaacacatgggccgccgctcatccaaatgctgctgtatttatgagaaacctcgggcctttggcgagagctccacggaaagtgatgaggaggaagaagagggctgtggtcatacacactgtgtacgtggccaccgcaaaggacggcgtcgtgcaaccctaggaccgacccccaccacccctccccagcctcctgacccttcccagccccctccagggccaatgcagcactaaatccctctctcctccagcattcctgtgtctgtctggccctaaatgtatccatgtggctacttctccagccccctccttccctctcttctgcctgatagagggaagaggaagaggaggacgaacagagatcctgaaattctgacttgctgctattccagaacccagcctcctgggtttccccagtcctcatttttcctcccaatacccacccttctctctcgagggatctaggcaccttggtcccagtgtcttccttttgttctcactgccaaactgcctgtcctgggatctagttatcttggccctgcactctcaacatgagtagcgaacacttaaattgggttttcaacagtcccagctttcactgccagggtcccagtcagattccaggaatttgcgccctaactttgcttgctaatcctggtttagagctatcccactaaaatatttaatcctaattcttagtccttgcctgtgagatatgaggtcttacaggagacctcagagctcccagcccttctcctcctgctaacccttctcacaccctcaagaggagttagaaaagaggtccttgtcattctcacctcttatggaaaatggaataagaaataatcatatcctttcttcccacccttctcctgttatttaggatttctgacaaagctggcttgagattggtcacttagagccgactgtctcctctgccttttgtttttcagcttcagagacagatccaatatagtcccagggacctgggtctctgggagaggaaggaagagggagggagcaaagagattggggtatgtcccctgtagtacactcttacctcttacttcctagactttgatttctccggcagcccagatgttcagttctcttggcccctctctaccccttactgggatccggttttcattttccggtccttttgccatacacagttacagagatcagtcaaatccataccaccactgagatctcatttattgccacagatgcacaaaataaataacccaaaatcacaaaa

SEQ ID NO: 288992 - DNA, 1689 bp, Artificial Sequence
  derived and/or modified sequence
ccggaagcggcgagccggaagtggggttagccaggttatccccaggggtggagaagcggaggcccaggaggagggggaataaagaaggtggaggatcctggctaccactctgaatccgataccgcttctcttagacctcagcgacagaaaaagggaagggtgtctcatcccccttcctcctctcctccctgtcctgagccttagccatggccgaggcaggggctgggctgagcgagaccgtcactgagacaacggttaccgtgacaaccgagcccgatgatttggggaggaagacggagaaacagcaaggattatattttcctttgaagagttgctgggacctttcctaggagaaccggagccttaccatcaaacttcggaaacggaagccagagaaaaaggtagaatggacaagtgacactgtggacaatgaacacatgggccgccgctcatccaaatgctgctgtatttatgagaaacctcgggcctttggcgagagctccacggaaagtgatgaggaggaagaagagggctgtggtcatacacactgtgtacgtggccaccgcaaaggacggcgtcgtgcaaccctaggaccgacccccaccacccctccccagcctcctgacccttcccagccccctccagggccaatgcagcactaaatccctctctcctccagcattcctgtgtctgtctggccctaaatgtatccatgtggctacttctccagccccctccttccctctcttctgcctgatagagggaagaggaagaggaggacgaacagagatcctgaaattctgacttgctgctattccagaacccagcctcctgggtttccccagtcctcatttttcctcccaatacccacccttctctctcgagggatctaggcaccttggtcccagtgtcttccttttgttctcactgccaaactgcctgtcctgggatctagttatcttggccctgcactctcaacatgagtagcgaacacttaaattgggttttcaacagtcccagctttcactgccagggtcccagtcagattccaggaatttgcgccctaactttgcttgctaatcctggtttagagctatcccactaaaatatttaatcctaattcttagtccttgcctgtgagatatgaggtcttacaggagacctcagagctcccagcccttctcctcctgctaacccttctcacaccctcaagaggagttagaaaagaggtccttgtcattctcacctcttatggaaaatggaataagaaataatcatatcctttcttcccacccttctcctgttatttaggatttctgacaaagctggcttgagattggtcacttagagccgactgtctcctctgccttttgtttttcagcttcagagacagatccaatatagtcccagggacctgggtctctgggagaggaaggaagagggagggagcaaagagattggggtatgtcccctgtagtacactcttacctcttacttcctagactttgatttctccggcagcccagatgttcagttctcttggcccctctctaccccttactgggatccggttttcattttccggtccttttgccatacacagttacagagatcagtcaaatccataccaccactgagatctcatttattgccacagatgcacaaaataaataacccaaaatcacaaaa

SEQ ID NO: 288993 - DNA, 1640 bp, Artificial Sequence
  derived and/or modified sequence
ctacaggcacagggcgaggggtagaaccacatcgcttgactcttaagtgtgtttccaactgctcccacttcccgttttctttagagaaacccagaccaaacaaggaaagggaaataggccacggtagggtcattactattgctccttaagcttcctcgccggtccacctacccagacaaggcaaacggaaatctgcagcaggactcagcttggtgcacacaactccgccctcgccacacccactctgcagcgtctggcccggcaatacccatctgggcgcccctcctgcttcctctaggctgagaaccggagccttaccatcaaacttcggaaacggaagccagagaaaaaggtagaatggacaagtgacactgtggacaatgaacacatgggccgccgctcatccaaatgctgctgtatttatgagaaacctcgggcctttggcgagagctccacggaaagtgatgaggaggaagaagagggctgtggtcatacacactgtgtacgtggccaccgcaaaggacggcgtcgtgcaaccctaggaccgacccccaccacccctccccagcctcctgacccttcccagccccctccagggccaatgcagcactaaatccctctctcctccagcattcctgtgtctgtctggccctaaatgtatccatgtggctacttctccagccccctccttccctctcttctgcctgatagagggaagaggaagaggaggacgaacagagatcctgaaattctgacttgctgctattccagaacccagcctcctgggtttccccagtcctcatttttcctcccaatacccacccttctctctcgagggatctaggcaccttggtcccagtgtcttccttttgttctcactgccaaactgcctgtcctgggatctagttatcttggccctgcactctcaacatgagtagcgaacacttaaattgggttttcaacagtcccagctttcactgccagggtcccagtcagattccaggaatttgcgccctaactttgcttgctaatcctggtttagagctatcccactaaaatatttaatcctaattcttagtccttgcctgtgagatatgaggtcttacaggagacctcagagctcccagcccttctcctcctgctaacccttctcacaccctcaagaggagttagaaaagaggtccttgtcattctcacctcttatggaaaatggaataagaaataatcatatcctttcttcccacccttctcctgttatttaggatttctgacaaagctggcttgagattggtcacttagagccgactgtctcctctgccttttgtttttcagcttcagagacagatccaatatagtcccagggacctgggtctctgggagaggaaggaagagggagggagcaaagagattggggtatgtcccctgtagtacactcttacctcttacttcctagactttgatttctccggcagcccagatgttcagttctcttggcccctctctaccccttactgggatccggttttcattttccggtccttttgccatacacagttacagagatcagtcaaatccataccaccactgagatctcatttattgccacagatgcacaaaataaataacccaaaatcacaaaa

SEQ ID NO: 288994 - DNA, 1723 bp, Artificial Sequence
  derived and/or modified sequence
ggaaaaaggaagggagatcaaagattaggtgctggggactgaaaaataattttcatgtattaatactaccaaggatgatttggggaggaagacggagaaaaagcaaggattatattttcctttgaagagttgctgggacctttcctaggttaggaattgtgtcttctcttatactggtggtataagaacaggaaataatacttattcctcaagggactatctgaggtaaaagacctgttctgttttatcttctgtcagctcctctggtgctatgcctatggtactggttgagctaaagaagaaaagagaggaggttccctgggagggagtgggaaaggttagtaagaggggactagataggtatgctcatccttaaccttctaggagaaccggagccttaccatcaaacttcggaaacggaagccagagaaaaaggtagaatggacaagtgacactgtggacaatgaacacatgggccgccgctcatcaaaatgctgctgtatttatgagaaacctcgggcctttggcgagagctccacggaaagtgatgaggaggaagaagagggctgtggtcatacacactgtgtacgtggccaccgcaaaggacggcgtcgtgcaaccctaggaccgacccccaccacccctccccagcctcctgacccttcccagccccctccagggccaatgcagcactaaatccctctctcctccagcattcctgtgtctgtctggccctaaatgtatccatgtggctacttctccagccccctccttccctctcttctgcctgatagagggaagaggaagaggaggacgaacagagatcctgaaattctgacttgctgctattccagaacccagcctcctgggtttccccagtcctcatttttcctcccaatacccacccttctctctcgagggatctaggcaccttggtcccagtgtcttccttttgttctcactgccaaactgcctgtcctgggatctagttatcttggccctgcactctcaacatgagtagcgaacacttaaattgggttttcaacagtcccagctttcactgccagggtcccagtcagattccaggaatttgcgccctaactttgcttgctaatcctggtttagagctatcccactaaaatatttaatcctaattcttagtccttgcctgtgagatatgaggtcttacaggagacctcagagctcccagcccttctcctcctgctaacccttctcacaccctcaagaggagttagaaaagaggtccttgttattctcacctcttatggaaaatggaacaagaaataatcatatcctttcttcccacccttctcctgttatttaggatttctgacaaagctggcttgagattggtcacttagagccgactgtctcctctgccttttgtttttcagcttcagagacagatccaatatagtcccagggacctgggtctctgggagaggaaggaagagggagggagcaaagagattggggtatgtcccctgtagtacactctttcctcttacttcctagactttgatttctccggcagcccagatgttcagttctcttggcccctctctaccccttactgggatctggttttcattttccggtccttttgccatacacagttacagagatcagtcaaatccataccaccactgagatctcatttattgccacagatgcacaaaataaataacccaaaatcacaaaa

SEQ ID NO: 288995 - DNA, 1464 bp, Artificial Sequence
  derived and/or modified sequence
gggatatgggaggtgtggggttgaatatctagggctgggagaatcggaaggatgatttggggaggaagacggagaaaaagcaaggattatattttcctttgaagagttgctgggacctttcctaggagaaccggagccttaccatcaaacttcggaaacggaagccagagaaaaaggtagaatggacaagtgacactgtggacaatgaacacatgggccgccgctcatcaaaatgctgctgtatttatgagaaacctcgggcctttggcgagagctccacggaaagtgatgaggaggaagaagagggctgtggtcatacacactgtgtacgtggccaccgcaaaggacggcgtcgtgcaaccctaggaccgacccccaccacccctccccagcctcctgacccttcccagccccctccagggccaatgcagcactaaatccctctctcctccagcattcctgtgtctgtctggccctaaatgtatccatgtggctacttctccagccccctccttccctctcttctgcctgatagagggaagaggaagaggaggacgaacagagatcctgaaattctgacttgctgctattccagaacccagcctcctgggtttccccagtcctcatttttcctcccaatacccacccttctctctcgagggatctaggcaccttggtcccagtgtcttccttttgttctcactgccaaactgcctgtcctgggatctagttatcttggccctgcactctcaacatgagtagcgaacacttaaattgggttttcaacagtcccagctttcactgccagggtcccagtcagattccaggaatttgcgccctaactttgcttgctaatcctggtttagagctatcccactaaaatatttaatcctaattcttagtccttgcctgtgagatatgaggtcttacaggagacctcagagctcccagcccttctcctcctgctaacccttctcacaccctcaagaggagttagaaaagaggtccttgttattctcacctcttatggaaaatggaacaagaaataatcatatcctttcttcccacccttctcctgttatttaggatttctgacaaagctggcttgagattggtcacttagagccgactgtctcctctgccttttgtttttcagcttcagagacagatccaatatagtcccagggacctgggtctctgggagaggaaggaagagggagggagcaaagagattggggtatgtcccctgtagtacactctttcctcttacttcctagactttgatttctccggcagcccagatgttcagttctcttggcccctctctaccccttactgggatctggttttcattttccggtccttttgccatacacagttacagagatcagtcaaatccataccaccactgagatctcatttattgccacagatgcacaaaataaataacccaaaatcacaaaa

SEQ ID NO: 288996 - DNA, 1539 bp, Artificial Sequence
  derived and/or modified sequence
cagggattagaagagttgttggaggagctaggcctagggatatgggaggtgtggggttgaatatctagggctgggagaatcggaaggtattggagctatttggagtggcagagatggtgcaggaggatgatttggggaggaagacggagaaaaagcaaggattatattttcctttgaagagttgctgggacctttcctaggagaaccggagccttaccatcaaacttcggaaacggaagccagagaaaaaggtagaatggacaagtgacactgtggacaatgaacacatgggccgccgctcatcaaaatgctgctgtatttatgagaaacctcgggcctttggcgagagctccacggaaagtgatgaggaggaagaagagggctgtggtcatacacactgtgtacgtggccaccgcaaaggacggcgtcgtgcaaccctaggaccgacccccaccacccctccccagcctcctgacccttcccagccccctccagggccaatgcagcactaaatccctctctcctccagcattcctgtgtctgtctggccctaaatgtatccatgtggctacttctccagccccctccttccctctcttctgcctgatagagggaagaggaagaggaggacgaacagagatcctgaaattctgacttgctgctattccagaacccagcctcctgggtttccccagtcctcatttttcctcccaatacccacccttctctctcgagggatctaggcaccttggtcccagtgtcttccttttgttctcactgccaaactgcctgtcctgggatctagttatcttggccctgcactctcaacatgagtagcgaacacttaaattgggttttcaacagtcccagctttcactgccagggtcccagtcagattccaggaatttgcgccctaactttgcttgctaatcctggtttagagctatcccactaaaatatttaatcctaattcttagtccttgcctgtgagatatgaggtcttacaggagacctcagagctcccagcccttctcctcctgctaacccttctcacaccctcaagaggagttagaaaagaggtccttgttattctcacctcttatggaaaatggaacaagaaataatcatatcctttcttcccacccttctcctgttatttaggatttctgacaaagctggcttgagattggtcacttagagccgactgtctcctctgccttttgtttttcagcttcagagacagatccaatatagtcccagggacctgggtctctgggagaggaaggaagagggagggagcaaagagattggggtatgtcccctgtagtacactctttcctcttacttcctagactttgatttctccggcagcccagatgttcagttctcttggcccctctctaccccttactgggatctggttttcattttccggtccttttgccatacacagttacagagatcagtcaaatccataccaccactgagatctcatttattgccacagatgcacaaaataaataacccaaaatcacaaaa

SEQ ID NO: 288997 - DNA, 1689 bp, Artificial Sequence
  derived and/or modified sequence
ccggaagcggcgagccggaagtggggttagccaggttatccccaggggtggagaagcggaggcccaggaggagggggaataaagaaggtggaggatcctggctaccactctgaatccgataccgcttctcttagacctcagcgacagaaaaagggaagggtgtctcatcccccttcctcctctcctccctgtcctgagccttagccatggccgaggcaggggctgggctgagcgagaccgtcactgagacaacggttaccgtgacaaccgagcccgatgatttggggaggaagacggagaaaaagcaaggattatattttcctttgaagagttgctgggacctttcctaggagaaccggagccttaccatcaaacttcggaaacggaagccagagaaaaaggtagaatggacaagtgacactgtggacaatgaacacatgggccgccgctcatcaaaatgctgctgtatttatgagaaacctcgggcctttggcgagagctccacggaaagtgatgaggaggaagaagagggctgtggtcatacacactgtgtacgtggccaccgcaaaggacggcgtcgtgcaaccctaggaccgacccccaccacccctccccagcctcctgacccttcccagccccctccagggccaatgcagcactaaatccctctctcctccagcattcctgtgtctgtctggccctaaatgtatccatgtggctacttctccagccccctccttccctctcttctgcctgatagagggaagaggaagaggaggacgaacagagatcctgaaattctgacttgctgctattccagaacccagcctcctgggtttccccagtcctcatttttcctcccaatacccacccttctctctcgagggatctaggcaccttggtcccagtgtcttccttttgttctcactgccaaactgcctgtcctgggatctagttatcttggccctgcactctcaacatgagtagcgaacacttaaattgggttttcaacagtcccagctttcactgccagggtcccagtcagattccaggaatttgcgccctaactttgcttgctaatcctggtttagagctatcccactaaaatatttaatcctaattcttagtccttgcctgtgagatatgaggtcttacaggagacctcagagctcccagcccttctcctcctgctaacccttctcacaccctcaagaggagttagaaaagaggtccttgttattctcacctcttatggaaaatggaacaagaaataatcatatcctttcttcccacccttctcctgttatttaggatttctgacaaagctggcttgagattggtcacttagagccgactgtctcctctgccttttgtttttcagcttcagagacagatccaatatagtcccagggacctgggtctctgggagaggaaggaagagggagggagcaaagagattggggtatgtcccctgtagtacactctttcctcttacttcctagactttgatttctccggcagcccagatgttcagttctcttggcccctctctaccccttactgggatctggttttcattttccggtccttttgccatacacagttacagagatcagtcaaatccataccaccactgagatctcatttattgccacagatgcacaaaataaataacccaaaatcacaaaa

SEQ ID NO: 288998 - DNA, 1640 bp, Artificial Sequence
  derived and/or modified sequence
ctacaggcacagggcgaggggtagaaccacatcgcttgactcttaagtgtgtttccaactgctcccacttcccgttttctttagagaaacccagaccaaacaaggaaagggaaataggccacggtagggtcattactattgctccttaagcttcctcgccggtccacctacccagacaaggcaaacggaaatctgcagcaggactcagcttggtgcacacaactccgccctcgccacacccactctgcagcgtctggcccggcaatacccatctgggcgcccctcctgcttcctctaggctgagaaccggagccttaccatcaaacttcggaaacggaagccagagaaaaaggtagaatggacaagtgacactgtggacaatgaacacatgggccgccgctcatcaaaatgctgctgtatttatgagaaacctcgggcctttggcgagagctccacggaaagtgatgaggaggaagaagagggctgtggtcatacacactgtgtacgtggccaccgcaaaggacggcgtcgtgcaaccctaggaccgacccccaccacccctccccagcctcctgacccttcccagccccctccagggccaatgcagcactaaatccctctctcctccagcattcctgtgtctgtctggccctaaatgtatccatgtggctacttctccagccccctccttccctctcttctgcctgatagagggaagaggaagaggaggacgaacagagatcctgaaattctgacttgctgctattccagaacccagcctcctgggtttccccagtcctcatttttcctcccaatacccacccttctctctcgagggatctaggcaccttggtcccagtgtcttccttttgttctcactgccaaactgcctgtcctgggatctagttatcttggccctgcactctcaacatgagtagcgaacacttaaattgggttttcaacagtcccagctttcactgccagggtcccagtcagattccaggaatttgcgccctaactttgcttgctaatcctggtttagagctatcccactaaaatatttaatcctaattcttagtccttgcctgtgagatatgaggtcttacaggagacctcagagctcccagcccttctcctcctgctaacccttctcacaccctcaagaggagttagaaaagaggtccttgttattctcacctcttatggaaaatggaacaagaaataatcatatcctttcttcccacccttctcctgttatttaggatttctgacaaagctggcttgagattggtcacttagagccgactgtctcctctgccttttgtttttcagcttcagagacagatccaatatagtcccagggacctgggtctctgggagaggaaggaagagggagggagcaaagagattggggtatgtcccctgtagtacactctttcctcttacttcctagactttgatttctccggcagcccagatgttcagttctcttggcccctctctaccccttactgggatctggttttcattttccggtccttttgccatacacagttacagagatcagtcaaatccataccaccactgagatctcatttattgccacagatgcacaaaataaataacccaaaatcacaaaa

SEQ ID NO: 288999 - DNA, 1464 bp, Artificial Sequence
  derived and/or modified sequence
gggatatgggaggtgtggggttgaatatctagggctgggagaatcggaaggatgatttggggaggaagacggagaaacagcaaggattatattttcctttgaagagttgctgggacctttcctaggagaaccggagccttaccatcaaacttcggaaacggaagccagagaaaaaggtagaatggacaagtgacactgtggacaatgaacacatgggccgccgctcatccaaatgctgctgtatttatgagaaacctcgggcctttggcgagagctccacggaaagtgatgaggaggaagaagagggctgtggtcatacacactgtgtacgtggccaccgcaaaggacggcgtcgtgcaaccctaggaccgacccccaccacccctccccagcctcctgacccttcccagccccctccagggccaatgcagcactaaatccctctctcctccagcattcctgtgtctgtctggccctaaatgtatccatgtggctacttctccagccccctccttccctctcttctgcctgatagagggaagaggaagaggaggacgaacagagatcctgaaattctgacttgctgctattccagaacccagcctcctgggtttccccagtcctcatttttcctcccaatacccacccttctctctcgagggatctaggcaccttggtcccagtgtcttccttttgttctcactgccaaactgcctgtcctgggatctagttatcttggccctgcactctcaacatgagtagcgaacacttaaattgggttttcaacagtcccagctttcactgccagggtcccagtcagattccaggaatttgcgccctaactttgcttgctaatcctggtttagagctatcccactaaaatatttaatcctaattcttagtccttgcctgtgagatatgaggtcttacaggagacctcagagctcccagcccttctcctcctgctaacccttctcacaccctcaagaggagttagaaaagaggtccttgtcattctcacctcttatggaaaatggaataagaaataatcatatcctttcttcccacccttctcctgttatttaggatttctgacaaagctggcttgagattggtcacttagagccgactgtctcctctgccttttgtttttcagcttcagagacagatccaatatagtcccagggacctgggtctctgggagaggaaggaagagggagggagcaaagagattggggtatgtcccctgtagtacactcttacctcttacttcctagactttgatttctccggcagcccagatgttcagttctcttggcccctctctaccccttactgggatctggttttcattttccggtccttttgccatacacagttacagagatcagtcaaatccataccaccactgagatctcatttattgccacagatgcacaaaataaataacccaaaatcacaaaa

SEQ ID NO: 289000 - DNA, 1689 bp, Artificial Sequence
  derived and/or modified sequence
ccggaagcggcgagccggaagtggggttagccaggttatccccaggggtggagaagcggaggcccaggaggagggggaataaagaaggtggaggatcctggctaccaatctgaatccgataccgcttctcttagacctcagcgacagaaaaagggaagggtgtctcatcccccttcctcctctcctccctgtcctgagccttagccatggccgaggcaggggctgggctgagcgagaccgtcactgagacaacggttaccgtgacaaccgagcccgatgatttggggaggaagacggagaaacagcaaggattatattttcctttgaagagttgctgggacctttcctaggagaaccggagccttaccatcaaacttcggaaacggaagccagagaaaaaggtagaatggacaagtgacactgtggacaatgaacacatgggccgccgctcatccaaatgctgctgtatttatgagaaacctcgggcctttggcgagagctccacggaaagtgatgaggaggaagaagagggctgtggtcatacacactgtgtacgtggccaccgcaaaggacggcgtcgtgcaaccctaggaccgacccccaccacccctccccagcctcctgacccttcccagccccctccagggccaatgcagcactaaatccctctctcctccagcattcctgtgtctgtctggccctaaatgtatccatgtggctacttctccagccccctccttccctctcttctgcctgatagagggaagaggaagaggaggacgaacagagatcctgaaattctgacttgctgctattccagaacccagcctcctgggtttccccagtcctcatttttcctcccaatacccacccttctctctcgagggatctaggcaccttggtcccagtgtcttccttttgttctcactgccaaactgcctgtcctgggatctagttatcttggccctgcactctcaacatgagtagcgaacacttaaattgggttttcaacagtcccagctttcactgccagggtcccagtcagattccaggaatttgcgccctaactttgcttgctaatcctggtttagagctatcccactaaaatatttaatcctaattcttagtccttgcctgtgagatatgaggtcttacaggagacctcagagctcccagcccttctcctcctgctaacccttctcacaccctcaagaggagttagaaaagaggtccttgtcattctcacctcttatggaaaatggaataagaaataatcatatcctttcttcccacccttctcctgttatttaggatttctgacaaagctggcttgagattggtcacttagagccgactgtctcctctgccttttgtttttcagcttcagagacagatccaatatagtcccagggacctgggtctctgggagaggaaggaagagggagggagcaaagagattggggtatgtcccctgtagtacactcttacctcttacttcctagactttgatttctccggcagcccagatgttcagttctcttggcccctctctaccccttactgggatctggttttcattttccggtccttttgccatacacagttacagagatcagtcaaatccataccaccactgagatctcatttattgccacagatgcacaaaataaataacccaaaatcacaaaa

SEQ ID NO: 289001 - DNA, 1536 bp, Artificial Sequence
  derived and/or modified sequence
ggattagaagagttgttggaggagctaggcctagggatatgggaggtgtggggttgaatatctagggctgggagaatcggaaggtattggagctatttggagtggcagagatggtgcaggaggatgatttggggaggaagacggagaaacagcaaggattatattttcctttgaagagttgctgggacctttcctaggagaaccggagccttaccatcaaacttcggaaacggaagccagagaaaaaggtagaatggacaagtgacactgtggacaatgaacacatgggccgccgctcatccaaatgctgctgtatttatgagaaacctcgggcctttggcgagagctccacggaaagtgatgaggaggaagaagagggctgtggtcatacacactgtgtacgtggccaccgcaaaggacggcgtcgtgcaaccctaggaccgacccccaccacccctccccagcctcctgacccttcccagccccctccagggccaatgcagcactaaatccctctctcctccagcattcctgtgtctgtctggccctaaatgtatccatgtggctacttctccagccccctccttccctctcttctgcctgatagagggaagaggaagaggaggacgaacagagatcctgaaattctgacttgctgctattccagaacccagcctcctgggtttccccagtcctcatttttcctcccaatacccacccttctctctcgagggatctaggcaccttggtcccagtgtcttccttttgttctcactgccaaactgcctgtcctgggatctagttatcttggccctgcactctcaacatgagtagcgaacacttaaattgggttttcaacagtcccagctttcactgccagggtcccagtcagattccaggaatttgcgccctaactttgcttgctaatcctggtttagagctatcccactaaaatatttaatcctaattcttagtccttgcctgtgagatatgaggtcttacaggagacctcagagctcccagcccttctcctcctgctaacccttctcacaccctcaagaggagttagaaaagaggtccttgtcattctcacctcttatggaaaatggaataagaaataatcatatcctttcttcccacccttctcctgttatttaggatttctgacaaagctggcttgagattggtcacttagagccgactgtctcctctgccttttgtttttcagcttcagagacagatccaatatagtcccagggacctgggtctctgggagaggaaggaagagggagggagcaaagagattggggtatgtcccctgtagtacactcttacctcttacttcctagactttgatttctccggcagcccagatgttcagttctcttggcccctctctaccccttactgggatctggttttcattttccggtccttttgccatacacagttacagagatcagtcaaatccataccaccactgagatctcatttattgccacagatgcacaaaataaataacccaaaatcacaaaa

SEQ ID NO: 289002 - DNA, 1689 bp, Artificial Sequence
  derived and/or modified sequence
ccggaagcggcgagccggaagtggggttagccaggttatccccaggggtggagaagcggaggcccaggaggagggggaataaagaaggtggaggatcctggctaccactctgaatccgataccgcttctcttagacctcagcgacagaaaaagggaagggtgtctcatcccccttcctcctctcctccctgtcctgagccttagccatggccgaggcaggggctgggctgagcgagaccgtcactgagacaacggttaccgtgacaaccgagcccgatgatttggggaggaagacggagaaacagcaaggattatattttcctttgaagagttgctgggacctttcctaggagaaccggagccttaccatcaaacttcggaaacggaagccagagaaaaaggtagaatggacaagtgacactgtggacaatgaacacatgggccgccgctcatccaaatgctgctgtatttatgagaaacctcgggcctttggcgagagctccacggaaagtgatgaggaggaagaagagggctgtggtcatacacactgtgtacgtggccaccgcaaaggacggcgtcgtgcaaccctaggaccgacccccaccacccctccccagcctcctgacccttcccagccccctccagggccaatgcagcactaaatccctctctcctccagcattcctgtgtctgtctggccctaaatgtatccatgtggctacttctccagccccctccttccctctcttctgcctgatagagggaagaggaagaggaggacgaacagagatcctgaaattctgacttgctgctattccagaacccagcctcctgggtttccccagtcctcatttttcctcccaatacccacccttctctctcgagggatctaggcaccttggtcccagtgtcttccttttgttctcactgccaaactgcctgtcctgggatctagttatcttggccctgcactctcaacatgagtagcgaacacttaaattgggttttcaacagtcccagctttcactgccagggtcccagtcagattccaggaatttgcgccctaactttgcttgctaatcctggtttagagctatcccactaaaatatttaatcctaattcttagtccttgcctgtgagatatgaggtcttacaggagacctcagagctcccagcccttctcctcctgctaacccttctcacaccctcaagaggagttagaaaagaggtccttgtcattctcacctcttatggaaaatggaataagaaataatcatatcctttcttcccacccttctcctgttatttaggatttctgacaaagctggcttgagattggtcacttagagccgactgtctcctctgccttttgtttttcagcttcagagacagatccaatatagtcccagggacctgggtctctgggagaggaaggaagagggagggagcaaagagattggggtatgtcccctgtagtacactcttacctcttacttcctagactttgatttctccggcagcccagatgttcagttctcttggcccctctctaccccttactgggatctggttttcattttccggtccttttgccatacacagttacagagatcagtcaaatccataccaccactgagatctcatttattgccacagatgcacaaaataaataacccaaaatcacaaaa

SEQ ID NO: 289003 - DNA, 1723 bp, Artificial Sequence
  derived and/or modified sequence
ggaaaaaggaagggagatcaaagattaggtgctggggactgaaaaataattttcatgtattaatactaccaaggatgatttggggaggaagacggagaaacagcaaggattatattttcctttgaagagttgctgggacctttcctaggttaggaattgtgtcttctcttatactggtggtataagaacaggaaataatacttattcctcaagggactatctgaggtaaaagacctgttctgttttatcttctgtcagctcctctggtgctatgcctatggtactgattgagctaaagaagaaaagagaggaggttccctgggagggagtgggaaaggttagtaagaggggactagataggtatgctcatccttaaccttctaggagaaccggagccttaccatcaaacttcggaaacggaagccagagaaaaaggtagaatggacaagtgacactgtggacaatgaacacatgggccgccgctcatccaaatgctgctgtatttatgagaaacctcgggcctttggcgagagctccacggaaagtgatgaggaggaagaagagggctgtggtcatacacactgtgtacgtggccaccgcaaaggacggcgtcgtgcaaccctaggaccgacccccaccacccctccccagcctcctgacccttcccagccccctccagggccaatgcagcactaaatccctctctcctccagcattcctgtgtctgtctggccctaaatgtatccatgtggctacttctccagccccctccttccctctcttctgcctgatagagggaagaggaagaggaggacgaacagagatcctgaaattctgacttgctgctattccagaacccagcctcctgggtttccccagtcctcatttttcctcccaatacccacccttctctctcgagggatctaggcaccttggtcccagtgtcttccttttgttctcactgccaaactgcctgtcctgggatctagttatcttggccctgcactctcaacatgagtagcgaacacttaaattgggttttcaacagtcccagctttcactgccagggtcccagtcagattccaggaatttgcgccctaactttgcttgctaatcctggtttagagctatcccactaaaatatttaatcctaattcttagtccttgcctgtgagatatgaggtcttacaggagacctcagagctcccagcccttctcctcctgctaacccttctcacaccctcaagaggagttagaaaagaggtccttgtcattctcacctcttatggaaaatggaataagaaataatcatatcctttcttcccacccttctcctgttatttaggatttctgacaaagctggcttgagattggtcacttagagccgactgtctcctctgccttttgtttttcagcttcagagacagatccaatatagtcccagggacctgggtctctgggagaggaaggaagagggagggagcaaagagattggggtatgtcccctgtagtacactcttacctcttacttcctagactttgatttctccggcagcccagatgttcagttctcttggcccctctctaccccttactgggatctggttttcattttccggtccttttgccatacacagttacagagatcagtcaaatccataccaccactgagatctcatttattgccacagatgcacaaaataaataacccaaaatcacaaaa

SEQ ID NO: 289004 - DNA, 1640 bp, Artificial Sequence
  derived and/or modified sequence
ctacaggcacagggcgaggggtagaaccacatcgcttgactcttaagtgtgtttccaactgctcccacttcccgttttctttagagaaacccagaccaaacaaggaaagggaaataggccacggtagggtcattactattgctccttaagcttcctcgccggtccacctacccagacaaggcaaacggaaatctgcagcaggactcagcttggtgcacacaactccgccctcgccacacccactctgcagcgtctggcccggcaatacccatctgggcgcccctcctgcttcctctaggctgagaaccggagccttaccatcaaacttcggaaacggaagccagagaaaaaggtagaatggacaagtgacactgtggacaatgaacacatgggccgccgctcatccaaatgctgctgtatttatgagaaacctcgggcctttggcgagagctccacggaaagtgatgaggaggaagaagagggctgtggtcatacacactgtgtacgtggccaccgcaaaggacggcgtcgtgcaaccctaggaccgacccccaccacccctccccagcctcctgacccttcccagccccctccagggccaatgcagcactaaatccctctctcctccagcattcctgtgtctgtctggccctaaatgtatccatgtggctacttctccagccccctccttccctctcttctgcctgatagagggaagaggaagaggaggacgaacagagatcctgaaattctgacttgctgctattccagaacccagcctcctgggtttccccagtcctcatttttcctcccaatacccacccttctctctcgagggatctaggcaccttggtcccagtgtcttccttttgttctcactgccaaactgcctgtcctgggatctagttatcttggccctgcactctcaacatgagtagcgaacacttaaattgggttttcaacagtcccagctttcactgccagggtcccagtcagattccaggaatttgcgccctaactttgcttgctaatcctggtttagagctatcccactaaaatatttaatcctaattcttagtccttgcctgtgagatatgaggtcttacaggagacctcagagctcccagcccttctcctcctgctaacccttctcacaccctcaagaggagttagaaaagaggtccttgtcattctcacctcttatggaaaatggaataagaaataatcatatcctttcttcccacccttctcctgttatttaggatttctgacaaagctggcttgagattggtcacttagagccgactgtctcctctgccttttgtttttcagcttcagagacagatccaatatagtcccagggacctgggtctctgggagaggaaggaagagggagggagcaaagagattggggtatgtcccctgtagtacactcttacctcttacttcctagactttgatttctccggcagcccagatgttcagttctcttggcccctctctaccccttactgggatctggttttcattttccggtccttttgccatacacagttacagagatcagtcaaatccataccaccactgagatctcatttattgccacagatgcacaaaataaataacccaaaatcacaaaa

SEQ ID NO: 289005 - DNA, 1536 bp, Artificial Sequence
  derived and/or modified sequence
ggattagaagagttgttggagaagctaggcctagggatatgggaggtgtggggttgaatatctagggctgggagaatcggaaggtattggagctatttggagtggcagagatggtgcaggaggatgatttggggaggaagacggagaaacagcaaggattatattttcctttgaagagttgctgggacctttcctaggagaaccggagccttaccatcaaacttcggaaacggaagccagagaaaaaggtagaatggacaagtgacactgtggacaatgaacacatgggccgccgctcatccaaatgctgctgtatttatgagaaacctcgggcctttggcgagagctccacggaaagtgatgaggaggaagaagagggctgtggtcatacacactgtgtacgtggccaccgcaaaggacggcgtcgtgcaaccctaggaccgacccccaccacccctccccagcctcctgacccttcccagccccctccagggccaatgcagcactaaatccctctctcctccagcattcctgtgtctgtctggccctaaatgtatccatgtggctacttctccagccccctccttccctctcttctgcctgatagagggaagaggaagaggaggacgaacagagatcctgaaattctgacttgctgctattccagaacccagcctcctgggtttccccagtcctcatttttcctcccaatacccacccttctctctcgagggatctaggcaccttggtcccagtgtcttccttttgttctcactgctaaactgcctgtcctgggatctagttatcttggccctgcactctcaacatgagtagcgaacacttaaattgggttttcaacagtcccagctttcactgccagggtcccagtcagattccaggaatttgcgccctaactttgcttgctaatcctggtttagagctatcccactaaaatatttaatcctaattcttagtccttgcctgtgagatatgaggtcttacaggagacctcagagctcccagcccttctcctcctgctaaaccttctcacaccctcaagaggagttagaaaagaggtccttgtcattctcacctcttatggaaaatggaataagaaataatcatatcctttcttcccacccttctcctgttatttaggatttctgacaaagctggcttgagattggtcacttagagccgactgtctcctctgccttttgtttttcagcttcagagacagatccaatatagtcccagggacctgggtctctgggagaggaaggaagagggagggagcaaagagattggggtatgtcccctgtagtacactcttacctcttacttcctagactttgatttctccggcagcccagatgttcagttctcttggcccctctctaccccttactgggatctggttttcattttccggtccttttgccatacacagttacagagatcagtcaaatccataccaccactgagatctcatttattgccacagatgcacaaaataaataacccaaaatcacaaaa

SEQ ID NO: 289006 - DNA, 1640 bp, Artificial Sequence
  derived and/or modified sequence
ctacaggcacagggcgaggggtagaaccacatcgcttgactcttaagtgtgtttccaactgctcccacttcccgttttctttagagaaacccagaccaaacaaggaaagggaaataggccacggtagggtcattactattgctccttaagcttcctcgccggtccacctacccagacaaggcaaacggaaatctgcagcaggactcagcttggtgcacacaactccgccctcgccacacccactctgcagcgtctggcccggcaatacccatctgggcgcccctcctgcttcctctaggctgagaaccggagccttaccatcaaacttcggaaacggaagccagagaaaaaggtagaatggacaagtgacactgtggacaatgaacacatgggccgccgctcatccaaatgctgctgtatttatgagaaacctcgggcctttggcgagagctccacggaaagtgatgaggaggaagaagagggctgtggtcatacacactgtgtacgtggccaccgcaaaggacggcgtcgtgcaaccctaggaccgacccccaccacccctccccagcctcctgacccttcccagccccctccagggccaatgcagcactaaatccctctctcctccagcattcctgtgtctgtctggccctaaatgtatccatgtggctacttctccagccccctccttccctctcttctgcctgatagagggaagaggaagaggaggacgaacagagatcctgaaattctgacttgctgctattccagaacccagcctcctgggtttccccagtcctcatttttcctcccaatacccacccttctctctcgagggatctaggcaccttggtcccagtgtcttccttttgttctcactgctaaactgcctgtcctgggatctagttatcttggccctgcactctcaacatgagtagcgaacacttaaattgggttttcaacagtcccagctttcactgccagggtcccagtcagattccaggaatttgcgccctaactttgcttgctaatcctggtttagagctatcccactaaaatatttaatcctaattcttagtccttgcctgtgagatatgaggtcttacaggagacctcagagctcccagcccttctcctcctgctaaaccttctcacaccctcaagaggagttagaaaagaggtccttgtcattctcacctcttatggaaaatggaataagaaataatcatatcctttcttcccacccttctcctgttatttaggatttctgacaaagctggcttgagattggtcacttagagccgactgtctcctctgccttttgtttttcagcttcagagacagatccaatatagtcccagggacctgggtctctgggagaggaaggaagagggagggagcaaagagattggggtatgtcccctgtagtacactcttacctcttacttcctagactttgatttctccggcagcccagatgttcagttctcttggcccctctctaccccttactgggatctggttttcattttccggtccttttgccatacacagttacagagatcagtcaaatccataccaccactgagatctcatttattgccacagatgcacaaaataaataacccaaaatcacaaaa

SEQ ID NO: 289007 - DNA, 1689 bp, Artificial Sequence
  derived and/or modified sequence
ccggaagcggcgagccggaagtggggttagccaggttatccccaggggtggagaagcggaggcccaggaggagggggaataaagaaggtggaggatcctggctaccactctgaatccgataccgcttctcttagacctcagcgacagaaaaagggaagggtgtctcatcccccttcctcctctcctccctgtcctgagccttagccatggccgaggcaggggctgggctgagcgagaccgtcactgagacaacggttaccgtgacaaccgagcccgatgatttggggaggaagacggagaaacagcaaggattatattttcctttgaagagttgctgggacctttcctaggagaaccggagccttaccatcaaacttcggaaacggaagccagagaaaaaggtagaatggacaagtgacactgtggacaatgaacacatgggccgccgctcatccaaatgctgctgtatttatgagaaacctcgggcctttggcgagagctccacggaaagtgatgaggaggaagaagagggctgtggtcatacacactgtgtacgtggccaccgcaaaggacggcgtcgtgcaaccctaggaccgacccccaccacccctccccagcctcctgacccttcccagccccctccagggccaatgcagcactaaatccctctctcctccagcattcctgtgtctgtctggccctaaatgtatccatgtggctacttctccagccccctccttccctctcttctgcctgatagagggaagaggaagaggaggacgaacagagatcctgaaattctgacttgctgctattccagaacccagcctcctgggtttccccagtcctcatttttcctcccaatacccacccttctctctcgagggatctaggcaccttggtcccagtgtcttccttttgttctcactgctaaactgcctgtcctgggatctagttatcttggccctgcactctcaacatgagtagcgaacacttaaattgggttttcaacagtcccagctttcactgccagggtcccagtcagattccaggaatttgcgccctaactttgcttgctaatcctggtttagagctatcccactaaaatatttaatcctaattcttagtccttgcctgtgagatatgaggtcttacaggagacctcagagctcccagcccttctcctcctgctaaaccttctcacaccctcaagaggagttagaaaagaggtccttgtcattctcacctcttatggaaaatggaataagaaataatcatatcctttcttcccacccttctcctgttatttaggatttctgacaaagctggcttgagattggtcacttagagccgactgtctcctctgccttttgtttttcagcttcagagacagatccaatatagtcccagggacctgggtctctgggagaggaaggaagagggagggagcaaagagattggggtatgtcccctgtagtacactcttacctcttacttcctagactttgatttctccggcagcccagatgttcagttctcttggcccctctctaccccttactgggatctggttttcattttccggtccttttgccatacacagttacagagatcagtcaaatccataccaccactgagatctcatttattgccacagatgcacaaaataaataacccaaaatcacaaaa

SEQ ID NO: 289008 - DNA, 1723 bp, Artificial Sequence
  derived and/or modified sequence
ggaaaaaggaagggagatcaaagattaggtgctggggactgaaaaataattttcatgtattaatactaccaaggatgatttggggaggaagacggagaaacagcaaggattatattttcctttgaagagttgctgggacctttcctaggttaggaattgtgtcttctcttatactggtggtataagaacaggaaataatacttattcctcaagggactatctgaggtaaaagacctgttctgttttatcttctgtcagctcctctggtgctatgcctatggtactgattgagctaaagaagaaaagagaggaggttccctgggagggagtgggaaaggttagtaagaggggactagataggtatgctcatccttaaccttctaggagaaccggagccttaccatcaaacttcggaaacggaagccagagaaaaaggtagaatggacaagtgacactgtggacaatgaacacatgggccgccgctcatccaaatgctgctgtatttatgagaaacctcgggcctttggcgagagctccacggaaagtgatgaggaggaagaagagggctgtggtcatacacactgtgtacgtggccaccgcaaaggacggcgtcgtgcaaccctaggaccgacccccaccacccctccccagcctcctgacccttcccagccccctccagggccaatgcagcactaaatccctctctcctccagcattcctgtgtctgtctggccctaaatgtatccatgtggctacttctccagccccctccttccctctcttctgcctgatagagggaagaggaagaggaggacgaacagagatcctgaaattctgacttgctgctattccagaacccagcctcctgggtttccccagtcctcatttttcctcccaatacccacccttctctctcgagggatctaggcaccttggtcccagtgtcttccttttgttctcactgctaaactgcctgtcctgggatctagttatcttggccctgcactctcaacatgagtagcgaacacttaaattgggttttcaacagtcccagctttcactgccagggtcccagtcagattccaggaatttgcgccctaactttgcttgctaatcctggtttagagctatcccactaaaatatttaatcctaattcttagtccttgcctgtgagatatgaggtcttacaggagacctcagagctcccagcccttctcctcctgctaaaccttctcacaccctcaagaggagttagaaaagaggtccttgtcattctcacctcttatggaaaatggaataagaaataatcatatcctttcttcccacccttctcctgttatttaggatttctgacaaagctggcttgagattggtcacttagagccgactgtctcctctgccttttgtttttcagcttcagagacagatccaatatagtcccagggacctgggtctctgggagaggaaggaagagggagggagcaaagagattggggtatgtcccctgtagtacactcttacctcttacttcctagactttgatttctccggcagcccagatgttcagttctcttggcccctctctaccccttactgggatctggttttcattttccggtccttttgccatacacagttacagagatcagtcaaatccataccaccactgagatctcatttattgccacagatgcacaaaataaataacccaaaatcacaaaa

SEQ ID NO: 289009 - DNA, 1464 bp, Artificial Sequence
  derived and/or modified sequence
gggatatgggaggtgtggggttgaatatctagggctgggagaatcggaaggatgatttggggaggaagacggagaaacagcaaggattatattttcctttgaagagttgctgggacctttcctaggagaaccggagccttaccatcaaacttcggaaacggaagccagagaaaaaggtagaatggacaagtgacactgtggacaatgaacacatgggccgccgctcatccaaatgctgctgtatttatgagaaacctcgggcctttggcgagagctccacggaaagtgatgaggaggaagaagagggctgtggtcatacacactgtgtacgtggccaccgcaaaggacggcgtcgtgcaaccctaggaccgacccccaccacccctccccagcctcctgacccttcccagccccctccagggccaatgcagcactaaatccctctctcctccagcattcctgtgtctgtctggccctaaatgtatccatgtggctacttctccagccccctccttccctctcttctgcctgatagagggaagaggaagaggaggacgaacagagatcctgaaattctgacttgctgctattccagaacccagcctcctgggtttccccagtcctcatttttcctcccaatacccacccttctctctcgagggatctaggcaccttggtcccagtgtcttccttttgttctcactgctaaactgcctgtcctgggatctagttatcttggccctgcactctcaacatgagtagcgaacacttaaattgggttttcaacagtcccagctttcactgccagggtcccagtcagattccaggaatttgcgccctaactttgcttgctaatcctggtttagagctatcccactaaaatatttaatcctaattcttagtccttgcctgtgagatatgaggtcttacaggagacctcagagctcccagcccttctcctcctgctaaaccttctcacaccctcaagaggagttagaaaagaggtccttgtcattctcacctcttatggaaaatggaataagaaataatcatatcctttcttcccacccttctcctgttatttaggatttctgacaaagctggcttgagattggtcacttagagccgactgtctcctctgccttttgtttttcagcttcagagacagatccaatatagtcccagggacctgggtctctgggagaggaaggaagagggagggagcaaagagattggggtatgtcccctgtagtacactcttacctcttacttcctagactttgatttctccggcagcccagatgttcagttctcttggcccctctctaccccttactgggatctggttttcattttccggtccttttgccatacacagttacagagatcagtcaaatccataccaccactgagatctcatttattgccacagatgcacaaaataaataacccaaaatcacaaaa

SEQ ID NO: 289010 - DNA, 225 bp, Artificial Sequence
  derived and/or modified sequence
atgggcagaagaagcagcaagtgctgctgcatctacgagaagcccagagccttcggcgagagcagcaccgagagcgacgaggaggaggaggagggctgcggccacacccactgcgtgagaggccacagaaagggcagaagaagagccaccctgggccccacccccaccacccccccccagccccccgaccccagccagcccccccccggccccatgcagcactag

SEQ ID NO: 289011 - DNA, 2742 bp, Artificial Sequence
  derived and/or modified sequence
atgggcccagaggccctgtcttccctcttactgctgctgctcgtggcctcaggtgacgctgacatgaaagggcacttcgaccctgccaaatgtcggtatgcactcgggatgcaggatcgcaccatcccagatagcgacatcagtgcgtcgtcatcatggtccgattccacggctgctcgtcatagtaggctggagagctctgacggggatggagcgtggtgccccgcaggaagtgtctttcccaaggaggaagaatatctccaggtggacctacagagactccatcttgtggctttggtcggtacgcagggcaggcacgccggtgggctgggcaaagagttcagcaggagttatagactgcgctacagtcgcgatggacggcgatggatggggtggaaggacagatggggacaggaggttattagcggaaacgaggatcccgaaggcgtggtgctgaaagacctgggccctccaatggtggctaggctggtccgtttttacccacgggctgaccgtgtgatgagcgtgtgcttacgggtcgagctttatgggtgcctgtggcgggacgggcttctgtcttatacagctccggtcggccagacaatgtacctatcggaggctgtgtatttgaacgactccacatatgacggtcacacggtcggaggcttgcagtacggcggacttggtcaattggccgacggggtcgtggggttggacgacttccgcaaaagccaggaactgcgggtttggccagggtacgactacgtgggatggagtaaccactcttttagttctggctacgtggaaatggagtttgagtttgatagactgagagcatttcaggcgatgcaggtccattgtaacaacatgcatacattgggggcacgcttacctggtggagtggagtgcagattccgcagaggccctgccatggcttgggagggcgaaccaatgcgtcacaacttaggcggaaatctgggtgaccccagagcgcgagccgtgagtgtgcccctgggaggccgagtggccagatttttgcagtgccgctttctcttcgctggaccttggcttctcttctctgagataagttttatttcggacgtcgttaacaactcctccccagcactaggcggtactttcccccctgccccttggtggccacccggtcccccaccaacaaattttagctctttggagctcgagcccagaggtcagcagccagtggccaaagctgagggctcccctaccgcaattcttatcggatgcctggtggcgattatcctgctcctgcttctgatcatcgctttgatgttatggcgcctgcactggagacgcctattaagcaaggcagagaggagggtgctggaagaggagctgacagtccacctaagcgtacccggagataccattctgatcaataatcggccagggccacgcgaaccgccaccatatcaggagcccaggccgagaggcaaccctccccatagtgccccttgtgtacctaacgggtccgctttgctgttgtccaacccagcctacagactcctgttggcaacctatgctcgtccaccccgaggcccaggccctccaacaccagcctgggctaaacccaccaatacacaagcttacagtggggattatatggaacctgaaaaacctggagccccactgttgcccccacctccccagaactccgtgccacactacgctgaagccgatatcgtaactctgcaaggagttacgggtggaaacacttatgccgtgccggctctccccccaggggctgttggagacggcccacctagggtagattttccccgttccaggttaaggttcaaggaaaaattaggcgagggtcagtttggggaggttcatttatgcgaggtggatagcccacaggacctcgtcagccttgattttcctcttaacgttagaaaaggacacccattgttagtggccgtgaagatactgaggccagatgccaccaagaatgcacggaacgactttctcaaggaagtcaagatcatgtccaggctcaaagatcctaatatcattagactgcttggagtgtgtgtccaggatgaccccctctgcatgattaccgactacatggaaaatggcgacctgaaccagtttctgtccgcacaccagctggaggacaaagcagcagaaggcgcaccgggagatggacaagctgcacagggcccaacaatctcctatccaatgttgcttcacgtggccgcacagatagcatcaggaatgcggtatctggccaccctgaactttgtgcaccgagatcttgctacacgaaactgcctggtcggagagaatttcaccatcaaaatcgcggactttgggatgtccaggaacttatatgccggagactactatagggtgcaggggagggccgtgctgcctattcgctggatggcttgggagtgtatcctcatgggcaaatttacaaccgcctctgacgtctgggcgttcggcgtaactttatgggaagtcctgatgctttgtagggcccagcctttcggccaactgacagacgagcaggtcatcgaaaacgcaggcgagttctttagagaccaaggaagacaagtttacttatcacggccacctgcttgcccacagggactgtacgagctcatgctccgctgctggagccgggagtcggaacagcggcctcccttttctcagctccatcgattcctggcggaagacgctctgaatacagtgtag

SEQ ID NO: 289012 - DNA, 2742 bp, Artificial Sequence
  derived and/or modified sequence
atgggacctgaggctctgagctccctcttgttgctcctactagtggcctccggcgatgcagatatgaagggccatttcgatccggcaaaatgccgctacgctctgggaatgcaagataggacgattcccgacagtgatatctccgcctccagttcctggtccgattctacagcggctcggcatagccggttggaatcatccgacggtgatggcgcttggtgccccgctggaagcgtcttccccaaagaggaagaatatttgcaggtggatttgcagcgtctccacttggttgctctggtgggaacacaaggccgacatgccggaggcctcggaaaagaattttctagatcttacaggcttcggtacagtagggacggacgacgctggatgggttggaaggaccggtggggacaggaagtaatctctggaaacgaagatcccgagggagtagtgctgaaagacctgggtcctcctatggtggctcgcctggtgcgcttttatccaagagctgatagagtaatgtctgtgtgcctccgcgtagagctgtacggttgcctctggcgggacggcctgttgtcatataccgcaccggtcgggcaaacaatgtacctgtcagaggctgtttatcttaacgactctacttacgatgggcacacagtcgggggactccagtatggcggactcgggcagttagcggacggagtggtcgggttagatgactttagaaagagccaggagctgagggtatggcccggttatgactatgtgggctggtctaaccattcatttagctcaggatacgttgagatggaattcgaatttgaccgcctgagggcattccaggccatgcaggtgcactgtaataacatgcatactctgggagcgcgactgcctggcggagtcgagtgtcgcttcagacggggacccgctatggcctgggagggggagcctatgagacataacttgggtggcaatctgggagaccccagggcgcgagccgtgtcagttccgctaggcggacgggttgcgagatttctacaatgccggtttctgttcgctgggccatggctgctgttcagtgagatttcattcatctctgacgtcgtgaacaacagctctcctgccttaggaggcaccttccctccagctccctggtggccacctggccctccccctaccaacttcagctcactggagcttgaaccacgaggacagcaacctgtagctaaagccgaaggtagtcctacggcgatcctgattggttgccttgtagccatcattctgctgcttttactcattatcgcattgatgctttggcgactgcattggcgcaggctgctcagtaaggctgagaggcgcgtgctcgaagaagagttgacggtgcacttgagcgtgcccggagacacaatacttatcaataatcgtccaggacctagagaacctccgccttaccaggagccaaggccgaggggaaatcctcctcattctgcaccttgcgtccctaatggttccgcactgctcctgagcaatccagcttacaggctcctacttgccacatatgctcgcccacccaggggacccggaccaccaactccggcatgggcgaagcctactaacacccaagcgtactcgggagattatatggagccagaaaaacctggggcacccctgttaccaccacctccgcagaattccgtgcctcattatgccgaggcagacatcgtcacactgcagggagtgaccgggggaaacacctatgccgtgcccgctctgcctcccggagccgtgggagacggtccaccacgggtagactttcccagatcaagattgcgcttcaaggagaaactaggagagggccagtttggggaggtgcacctttgtgaggtcgatagccctcaggacctggtcagcctggacttccccctgaatgtgaggaaaggacatcctctcctggtcgccgtaaagatcctgcgacccgacgcgacaaagaacgcaagaaatgatttcctgaaggaagtgaagattatgagccgcctgaaagatccaaacatcatccggctgctgggcgtatgcgtgcaggacgatccactctgcatgatcactgattatatggagaacggagatctgaatcagttcctttccgcccaccagttagaggataaggccgctgagggagcacctggtgacggtcaggccgctcagggcccaactattagctaccctatgctactgcatgttgctgcccagattgcaagcggcatgcggtatctcgctacccttaatttcgtacaccgcgacctggctactagaaactgcctggtgggagaaaacttcactatcaaaattgccgattttggcatgagccgcaacttgtacgcgggagactactaccgagtccagggcagagctgtactgccgattcgttggatggcttgggaatgcatccttatgggcaaatttactactgcgagtgacgtgtgggctttcggcgtgacactgtgggaggtgttgatgctctgtagagctcagccattcgggcaactgactgacgagcaggtcatcgagaacgcaggcgagtttttcagggaccagggtaggcaagtctatctgagtaggcccccagcatgtccacaaggcctttacgagctaatgctgcgctgctggagtagagagagtgagcagcgcccacctttcagccagctccaccgttttctggctgaggatgcgttgaacactgtctag

SEQ ID NO: 289013 - DNA, 2742 bp, Artificial Sequence
  derived and/or modified sequence
atgggccctgaggccctgagttctctgttgctgttgttgctggtcgcgagtggagacgccgatatgaagggacactttgacccggctaagtgccgctatgccctcggcatgcaggaccgcaccattcccgacagtgatattagcgcatctagctcctggtccgactcaactgcagcacgccattctcggttggagtcttccgatggcgatggcgcttggtgccccgctggttccgtgtttcctaaagaagaagaatacttacaggtggacctgcagcggcttcaccttgtggccctcgtcgggactcagggccgacatgctgggggattgggcaaagagttctcccggtcataccgcttaagatactcaagagacggaagacggtggatgggctggaaggacagatggggacaggaggtgatcagcggcaacgaagatcccgaaggggtggtattaaaggacctgggcccacccatggtcgcacgcctcgtccggttctacccgagagcggatcgggtgatgtccgtgtgtttaagagttgagctttacgggtgtctatggcgcgacgggctgctttcttatacagctccagtgggacagactatgtatctgtccgaggctgtatatctgaacgatagcacgtatgatggacacacagtggggggtttgcagtacggaggtctaggacagctggctgatggagtcgtgggcctggatgatttcaggaagtcccaagaattgcgcgtttggccaggctatgattatgttggctggtccaatcacagcttcagctcaggttatgttgagatggagtttgagtttgacaggctcagagctttccaggctatgcaggttcattgcaacaacatgcataccttgggagctaggctcccgggtggagttgagtgtcggttcaggcgtgggccagccatggcttgggagggcgagcccatgcgccataacctgggtggtaacctaggagatccgagggcgagggccgtctccgtcccccttggcggacgggtggccagattcttacagtgtaggtttcttttcgctgggccatggctcctgttttccgagatttcctttattagcgacgttgttaataattccagcccggcactcggaggtacctttcctcccgctccgtggtggcctccgggaccgcctccaactaatttcagctctttggaactcgaaccacggggacagcaacctgtggcgaaggcagaaggatcccctactgctattctgattggctgtctggtcgctataattctcttattactgctcatcattgccctcatgctctggcggttgcattggagaagactgctcagcaaggcagaaaggcgagtgctcgaggaagaacttactgtgcacttgtctgtgcctggagacacaatcctgattaataacaggcctggccctagagaaccaccaccatatcaggagccccgtcctagaggtaacccaccacactccgctccgtgcgtgccgaacggatcggccctcttgctgtccaatccggcataccgcctgttattggcaacttatgcgaggccaccgcgtgggcctggaccaccaacccccgcatgggcgaaacccaccaacacgcaagcatattctggcgactacatggaaccagaaaagcccggagccccactgctacccccacctccgcagaactcagtaccccactacgcagaggccgatattgtgaccctacagggcgtaacagggggaaatacttatgccgttcccgcactgccccctggcgctgtgggagacgggcctcccagggtcgactttccacgctctcgattaaggtttaaagagaaactcggggaaggccagttcggtgaggtccacctgtgtgaggtcgattcccctcaggatttggtgtcactagactttccactgaatgtgcggaaggggcacccactgctggtcgctgtgaaaattctgagacccgatgctaccaagaacgcacggaacgacttcttaaaagaagtaaaaatcatgagccggctgaaagaccccaatattatccgtctcctgggtgtctgtgtccaagacgaccccttgtgcatgatcaccgactacatggaaaacggcgacctgaaccagtttctgtctgcccaccagttagaagacaaagccgcagagggcgcaccgggagatggtcaggccgctcaaggacctactatttcttaccctatgctcctgcacgtcgccgcacagatcgctagtgggatgcgatacctcgctactttgaacttcgtccaccgtgatcttgcaacaagaaattgcctggtgggagaaaacttcacgattaagatagcagacttcggcatgtcccgcaatttatatgcgggagactactacagagtacaggggagagctgttctgccaattagatggatggcctgggagtgcatcctgatgggaaagtttactacagcgtctgacgtgtgggcttttggagtgaccctgtgggaagttctcatgttatgtagagctcagccttttggccaattgacagatgaacaggtgattgagaacgccggagagttctttagggatcagggacgccaggtgtatctctctcgccctcctgcctgcccacagggactgtatgagttaatgctccggtgttggtcaagagaatccgagcagaggccgccattctcccagctgcaccgctttctggccgaggacgcgctgaacacagtctag

SEQ ID NO: 289014 - DNA, 2742 bp, Artificial Sequence
  derived and/or modified sequence
atgggcccagaggccctatccagtcttctgctcctgcttctcgtggccagcggcgatgccgatatgaaaggacacttcgatccagctaagtgtcgctatgccctaggcatgcaggaccgcaccataccagattctgacatttccgcgtctagtagttggtcagatagtactgccgctaggcactccaggctagagtcctctgacggcgacggggcatggtgccctgccggttctgtgttccctaaagaggaggaatatctgcaggtggatttacagagactgcaccttgtcgccctggtcgggacccaggggaggcatgccggaggattggggaaggagttcagcaggagctatagactaaggtatagcagggacggcagacggtggatggggtggaaggacagatggggccaggaggtgattagcgggaatgaggatccagaaggcgtcgtcctcaaagatttaggacctcccatggttgccagactcgttcgcttttacccacgtgccgatagggtgatgagcgtctgcctgagggtagaactgtacggctgtctctggcgggacggactactgtcatacacggcaccagtgggtcaaaccatgtacctgtccgaagctgtctatttaaatgacagtacttacgacggccatacagtgggagggctgcagtatggcggactcggacagctggctgatggcgtcgtcggccttgatgactttcggaaaagccaggagctgagagtctggcctggctacgattatgtcggctggtcgaatcactctttctcttctggctatgttgagatggagttcgaatttgacagactgagagcgtttcaagctatgcaggtccactgcaacaatatgcataccttaggtgcgagattgccgggtggtgtggagtgcagatttaggagaggcccagctatggcctgggaaggagagccgatgcggcacaatctaggagggaatctgggggatccccgagcaagggcagtgtctgtgccattgggcggtagggtggctcgcttcctacagtgcaggttcctgttcgctggtccctggctcctgttctcggagatttctttcatttctgacgtggtgaataattctagccccgcactgggcggtacatttccgcctgcaccttggtggccaccgggaccacccccaaccaacttcagtagcctcgaactggagcccagggggcagcaacccgtggccaaggcggaaggcagccctaccgctatactgatcggttgccttgtggccatcattttgctcctcctgttgattatcgcactcatgctctggcgcctacactggcgaaggctgttaagtaaagcggagcgccgagtgttggaagaagagttgacagttcatctgtctgtgcctggagacaccatcctgattaacaaccggcctgggccacgcgagccacccccatatcaagaaccgaggccacgtgggaaccctccacactcagcaccgtgtgtgcctaacggcagtgcactcttgctgtcgaaccctgcatatagactcttacttgctacgtatgccaggcccccacggggacccggaccacctaccccggcatgggcgaaaccgacgaacacccaggcttacagtggagattatatggagcccgagaagccaggcgctccactgctgcccccaccacctcagaacagcgtgccccactacgcagaggccgacattgtgaccttgcaaggcgtaactgggggtaacacctacgccgtgcctgccctacctcccggagctgtaggtgacggcccacctcgggttgactttcctcgcagccgtctgcgtttcaaggagaaactgggtgaaggacagttcggcgaggtgcatctgtgcgaagtggactccccccaggatttggtaagcctcgattttcccctgaacgtccgtaagggccaccccctgttggttgcggttaaaatcctgcgccctgacgccaccaaaaatgctcgcaatgacttcctgaaagaagtgaagattatgtctcgcctcaaggatccgaatattatccgccttctgggcgtctgcgtgcaggacgatcctctatgtatgattacagactatatggaaaacggtgatcttaatcagtttctgtctgctcaccagctggaggacaaagccgctgagggcgcacctggggacggacaggccgcacaggggcctacaatctcctatcctatgctcctccacgtagccgctcagattgccagcggcatgcgatatttggcaacattaaatttcgtccacagggacctcgccacgaggaattgtctggtcggcgagaatttcaccattaagatagccgattttggcatgtcacggaacctctatgcaggcgattactatcgagtacaaggccgagcagtgctcccaatccgctggatggcctgggagtgcattctgatgggtaagttcaccactgcctcagatgtgtgggccttcggagtaacgctttgggaggtgctaatgctctgtcgggcacaaccatttgggcagcttacagatgagcaggtgatcgagaatgccggagaattcttcagggaccaaggcaggcaagtttacctgtcccgcccaccagcatgccctcagggactgtacgaattgatgctaagatgctggtctcgcgaatcggaacagcgccctccatttagccagctgcacaggtttcttgccgaagatgccctcaacactgtatag

SEQ ID NO: 289015 - DNA, 2742 bp, Artificial Sequence
  derived and/or modified sequence
atgggacctgaagcactgtctagtcttctgctgctgttgcttgtggccagcggcgacgccgatatgaaggggcacttcgaccctgcaaaatgcaggtacgccctgggcatgcaggatcgaactatcccagattctgatatttctgccagctcttcatggagcgattctactgccgctcgccattcaagacttgagagctccgacggggatggagcttggtgtccggctggctccgtgtttcccaaagaagaagaatacctccaggtggaccttcaacgacttcaccttgtggctcttgtaggaacacaaggaaggcacgctggcggtttgggaaaagagttttcccgaagctaccgcctgcgctattctcgagacgggcgacgttggatgggatggaaggatcggtggggacaggaggtgatcagcggaaatgaggatcctgaaggagtggtccttaaggacctgggtcctcccatggttgcccgtctggtgaggttctatccacgcgctgatagagtgatgtcagtctgcttgagagtggagctgtacggctgcctttggagagatgggctgctatcctacacagcccctgttggacagaccatgtatctttccgaagctgtgtatctaaatgattcaacatatgatggccatacagtcggtggcttgcagtatggtgggcttggtcagctagcagatggtgtagtaggactggatgattttcggaagtctcaggaattgagggtatggccaggatacgattacgtggggtggtcgaatcactcattctcatctggttacgtggagatggaatttgagttcgataggttacgcgcatttcaagccatgcaggtacactgcaacaatatgcataccctcggagctcgtctacctggaggagtggaatgccgctttcgacgcggtcctgccatggcatgggagggagaacccatgaggcacaatctgggagggaacttgggcgaccctagggccagagcagtgtccgtccctctcggagggcgagtagccagatttttgcagtgtcgcttcctgttcgccggaccctggctgctgttctcagagatttcttttatctcagatgtcgtcaataattcctctccagcgcttggaggaacttttcctccagccccatggtggcctccaggaccgccacctacaaacttcagcagcctggagctcgaacccagaggccagcagcctgttgcgaaggcagaaggctctcccaccgctattctgatcgggtgtctggtcgcgattatcctgctgctactgctgatcatagcgttaatgttgtggcgtctccattggcgaaggctcctgagtaaggctgagcgtagggtgttagaggaggagctgacagtccacctttccgtgcccggagatacaatcctcatcaataatcggccaggacctcgcgagccccctccctatcaggagcccaggccaagagggaacccacctcactctgccccttgcgtccccaacggcagcgctttactacttagtaatccagcttataggctcttactcgccacctatgctcgacctcctaggggaccgggaccccctacacctgcctgggccaaaccaaccaacactcaggcctatagcggcgactatatggaacccgaaaaaccaggcgctccgctcctgccacctcccccacagaactcagtgccacactatgccgaggccgatatcgtgactctacagggcgttaccgggggtaatacctacgctgtacctgccctcccccctggagcggtgggagatggcccacccagggtcgacttccctaggtcaaggttgaggttcaaggaaaagcttggcgagggccagttcggcgaggtgcacctttgcgaggtcgacagcccacaggacttggtcagtctggacttccctctgaacgttaggaaaggacaccctctgctggtggccgtgaagatattaagaccggatgctacaaaaaacgccagaaatgacttcttaaaagaggttaaaatcatgagcaggcttaaggaccctaacattattcgactcttaggagtgtgcgtgcaggatgaccccctttgtatgatcacggattacatggagaacggagacttgaaccaatttctgtcagcccatcagttggaggataaggccgctgagggcgcacccggtgatggccaggcagcccagggacccactataagttatcctatgctcctgcacgtggcagctcaaatcgcctcggggatgcgctacctggctacattgaattttgttcatagagatctagccaccagaaactgtctggtaggagagaatttcacaataaagattgctgatttcggcatgtctaggaatctctacgccggagactattaccgggtgcagggcagagccgtgctccccataagatggatggcctgggagtgtatccttatgggcaaattcactacagccagtgacgtgtgggccttcggcgtaacactgtgggaagttctgatgctgtgccgcgctcaacctttcgggcaactcacagacgaacaggtgatcgaaaatgcaggagagttcttcagggatcagggcaggcaagtctatttgtccaggcccccagcttgcccccaggggctgtatgagttgatgttgagatgctggtctcgcgagtctgaacagcgacctcctttctcccagttgcaccgcttcctagcggaggatgccttgaataccgtgtag

SEQ ID NO: 289016 - DNA, 2742 bp, Artificial Sequence
  derived and/or modified sequence
atggggcctgaggcgttgtcatctctgttactgctcctgctggttgcctcaggggatgccgatatgaaaggccatttcgaccctgccaaatgcaggtatgcactcggtatgcaagatcgaactatacctgactccgatatatcagctagctcctcttggtccgactccaccgctgctcgccattctaggctggaaagcagcgatggcgacggcgcttggtgtccagctgggtcggtcttcccaaaggaggaggagtacctgcaagtcgacctccaaagattacacctagtggcgttggtcggcacccaggggagacacgccggtggtctgggtaaggagttctctcgttcctatcgtcttcggtacagcagagatggcaggagatggatgggatggaaagaccggtggggtcaagaggtgatctccgggaatgaagaccccgagggggtggtactgaaagacttaggccctccaatggtggcacgcctcgtcagattttacccgagggcagatagggtcatgtctgtgtgtctcagagttgagctatatggctgcctctggagggatgggttgctctcatacacagcgccagttggccagacgatgtacttgtcagaggctgtgtacctgaacgattctacatacgatggccacactgtgggcggtctccagtatgggggactggggcagctggcagacggtgtggtcggcctagatgatttccggaagtcccaagaactccgtgtgtggcctggatacgattacgtgggatggtcaaaccattctttctcgtcgggctacgttgagatggagttcgagtttgatcggctacgcgcttttcaggccatgcaggtgcattgtaataacatgcacacactgggggctcgactgcctggcggtgtggagtgccgcttcagaagggggccagccatggcttgggagggcgaacccatgaggcacaacctagggggaaatctaggcgacccacgggcaagagccgtgtccgtgcccctgggtggcagagtggccaggtttctacaatgccgttttctttttgctggcccatggttgctattctctgagatttcattcattagcgatgtggtgaataattcaagcccggctctgggcggaacgtttcctcccgctccatggtggccccctggcccaccaccaacaaatttttcaagtctagagttggaaccgagaggacagcaacctgtggccaaagcagaaggatctcctacagccatattgatcggttgcctggtcgccatcatactgcttctgcttttgatcatcgccctgatgttatggcgattgcactggcgcaggctgttgtctaaggctgagaggcgtgtcctggaagaggagctcactgtgcatctctccgtgccaggtgacacaatccttattaataataggccgggaccgagggagccgccaccttatcaggagccccgtcccaggggaaacccgccacattctgctccctgcgtgccgaatgggtctgcactgctgctctccaatccggcatacagattgctgctggcaacctacgcaagaccaccccgaggcccaggtcctccgactcctgcttgggccaaaccgactaatacacaagcatatagtggtgattacatggaacccgagaagcctggagcccctctgttgccacctccccctcagaattctgtaccacactatgctgaagctgatattgtgaccctgcagggcgtaactgggggtaatacatacgccgtgcctgccctgcctccaggcgcagtgggcgatggaccgcctagggtggacttcccacgctcccgactccgatttaaagaaaagctgggggaaggtcagttcggcgaagtgcacctatgcgaagtagattcacctcaggatttggtgtccctcgatttccccctgaatgtgaggaagggccatcctttactggtggcagtcaagattctcaggccagatgccacaaaaaatgctagaaatgacttcctcaaagaagtgaagatcatgagtcgattgaaagatccaaacattatcagattgctgggggtttgtgttcaggatgatcctctgtgcatgattaccgattacatggaaaacggggaccttaaccagtttttgagtgcacaccaactcgaagacaaagccgctgaaggtgccccaggcgacgggcaggccgcacaaggtccaactatcagctatcctatgttacttcacgtggccgctcagatcgcgtccgggatgaggtacttggctacactcaacttcgtccatagagacctggccactcgcaactgcctggtcggagaaaattttaccattaagattgctgacttcggtatgagcagaaacctctatgcgggtgactattatcgggtccagggaagagccgtactgcccatccgctggatggcttgggaatgtatcttgatgggtaaattcactacagctagcgatgtatgggctttcggggtgactctgtgggaggtgctcatgctgtgcagagctcaaccatttggacagctcaccgatgaacaggtgatcgagaatgctggtgaattttttcgcgaccagggtcgacaagtatatttgtcaagacctccagcgtgcccccaggggctgtacgaactgatgttgcggtgctggtcacgggagagtgaacagaggcccccatttagccaattgcatcgcttcctggccgaggacgccctcaataccgtgtag

SEQ ID NO: 289017 - DNA, 2742 bp, Artificial Sequence
  derived and/or modified sequence
atgggacctgaagccctcagcagtctgttactcttgctgctggtggcctctggcgacgcggacatgaaggggcacttcgatcccgcaaagtgtagatatgccctgggtatgcaggatcggaccatccccgatagcgacatctccgcttcgtcaagctggagtgacagtacagctgccaggcacagccggctagagtctagcgatggcgacggcgcttggtgccccgctggctccgtgtttcctaaagaggaggaatatcttcaggtcgacctacagaggttgcacctggtcgctctggtgggcacccagggcaggcatgctgggggattagggaaagaatttagccggagctacaggctgcgttatagcagagacggacgcaggtggatgggatggaaggaccggtggggccaggaagtcataagcggtaacgaggatcccgagggggtggttctgaaagatctcggacccccaatggtagcgcgactcgttcggttctaccccagggccgaccgcgttatgtcagtttgtcttagggtcgagttatatgggtgtttgtggcgcgacgggctgctgagctacacagcacccgtgggccagactatgtacctgtctgaagctgtctatcttaacgactccacctatgacgggcataccgtaggcggacttcagtacggaggcctaggccagcttgctgatggcgtcgtgggcctggatgattttcgcaaatcacaagaactgcgcgtgtggccgggatacgactacgtcggctggagcaatcacagcttctcatctgggtacgtcgagatggagttcgagttcgatcgactgcgtgctttccaagcaatgcaggttcattgcaataatatgcacactctgggcgcacgacttccaggtggggtggaatgcagattccgtaggggcccagctatggcttgggaaggggaacccatgcgccacaatctgggaggcaatttgggcgatcctcgggctagagctgtttctgttcccctgggtggtagagttgcaaggtttcttcaatgccgtttcctgttcgcgggtccctggctcttattctccgagataagctttattagtgacgtggtcaataacagcagcccagccctgggtgggacttttcccccagccccttggtggcctcccggtccccctcctaccaattttagttctctggagctcgagcccagggggcagcagcccgtggccaaggcagaaggcagcccaacagcaattctaattggttgcctggttgccatcattctgctcctgctactaatcatagctttaatgctgtggcgcttacattggcggcgactcctgtcaaaagccgaacgcagagtgcttgaggaggaactgactgtacacctgtctgtccctggagacaccattctcatcaataacagacctggcccacgagagccccctccctaccaagaaccacggccaaggggcaatcctccccatagcgcaccatgtgtacccaatggttccgctttgctgttatcaaatcctgcctaccgcctgctcctggccacctacgcacgaccccctcgcggtcccggtcccccaacacccgcatgggccaaacctaccaatactcaggcttactctggcgactatatggagccagaaaaacctggagccccacttctgccgcctccaccgcagaatagcgtgccccactacgccgaagccgacatcgtgaccctccagggcgtgactggcggaaatacgtacgcggtgcctgctttaccaccgggagcggtgggggacgggcctcccagggtggattttccccgttcgaggttaagattcaaagagaaactgggcgaggggcagttcggcgaggtgcatctttgcgaggtggactctccacaagatctggtctctctcgactttcccctgaacgtccgcaagggccaccccctgctggtggcagtgaagatacttcggcctgacgctactaaaaacgctcgtaatgattttcttaaagaggtgaagattatgtcacggctgaaggacccaaatataatccgccttctcggagtgtgcgttcaggatgaccctctttgcatgatcaccgactatatggagaacggcgatctcaaccagtttttgagcgcgcaccagctcgaagacaaagctgccgaaggagcgccaggcgacggacaggcagctcaaggcccaacgattagttacccgatgctgcttcacgttgccgcacagattgccagcgggatgcgctatttagccactttgaattttgtccatagggacctggcaactcggaactgccttgtaggcgaaaattttacgatcaagatagctgactttggcatgagccggaatctgtacgctggtgattactatcgtgtgcagggcagagccgtcctgcctattcgctggatggcatgggagtgtattcttatgggtaaatttaccacggcttccgacgtgtgggctttcggcgtgactctgtgggaggtgctcatgttgtgccgggctcagccttttgggcagctgactgacgagcaagtaatcgaaaacgctggtgaattcttccgtgaccagggtcggcaggtatacctatcgaggccgcctgcatgtccccaggggctctatgagctgatgctccgctgctggagccgggagtcagagcagcgccctccattttcacagcttcacaggtttctcgccgaggacgccctgaatacggtctag

SEQ ID NO: 289018 - DNA, 2742 bp, Artificial Sequence
  derived and/or modified sequence
atgggccctgaagctctgtctagcctccttttgctcctcctggtcgcaagtggggacgctgatatgaagggtcatttcgaccccgctaagtgcagatatgccctcgggatgcaggaccgcaccatcccagactctgatatatctgctagctcctcctggtctgactctaccgctgcgagacactcgaggcttgaaagctctgatggcgatggcgcttggtgcccggcaggtagtgtctttcccaaggaggaggagtatctgcaggttgacctgcagagactgcatctagttgccctggtggggactcaggggaggcacgcaggcggtctggggaaggaatttagccggtcgtatcgcttgcgctattctagggatggtcgaagatggatggggtggaaggacaggtggggccaagaagtgatcagcgggaatgaggaccctgagggtgtggtacttaaggatctggggcctcctatggtggcaagactggttaggttttaccccagagcagatcgggtgatgtctgtatgtctaagggttgagctgtacggatgtctatggcgggacggtctgttatcctacacagctcctgttggccagacgatgtacctctcggaggctgtttacctaaatgattctacgtacgacggacacactgtgggtggcttgcagtatggtggactgggacagctggctgatggagttgtggggctagatgactttcgcaagagtcaggagctgcgcgtgtggcctgggtatgactacgtgggctggtcgaaccattcctttagctctggatacgttgagatggagttcgaattcgataggttgcgagcatttcaagccatgcaggtacactgcaacaacatgcacaccttaggtgcccgactgcccggaggtgtggagtgcaggtttcggagagggcctgcgatggcgtgggagggcgaacccatgagacacaatctcggtggaaatttgggggatcccagagcaagggctgtctcagtgccactgggaggcagggtcgctaggttcctgcaatgtcggttcctcttcgccggaccctggttgctgttctcggaaattagcttcattagcgacgtggtcaataactcatcacccgctcttggtggaacattcccacccgctccatggtggcctcccggacccccacccacaaacttctcaagcctggaactggagccccgaggtcagcagccagttgctaaagctgaaggttcccccacagcgatattgattggttgtctggttgcaatcattctcctgctcctgctgataattgcgctgatgctgtggcggctacactggcggaggcttctgtcaaaggccgagcggcgtgtcctggaagaagaacttaccgtccacttatctgtccccggagataccatcttgatcaataacaggcccggtccgagagaaccgcctccataccaggagccacggcctcgaggcaaccctcctcattctgctccatgtgttcctaatggtagcgccctgttgctctccaaccccgcttatcgcctgctgctggctacttacgcccgaccccctagaggtcctggtcccccaacgccagcgtgggccaagccgacaaacacccaggcctactccggagactacatggagcctgagaagccaggtgcacccttactgcctcctccccctcagaactcagtgcctcactatgctgaagcagatattgtaacactgcagggggttacaggaggcaatacgtacgctgtgcccgctttaccccctggggctgtgggagacggccctccacgtgtcgatttccccagatctaggctgagattcaaggagaaacttggcgagggccagtttggagaggttcacctgtgtgaggtggatagtccccaggatctggtgagcctggatttcccgcttaacgtgcgcaaaggccaccctctactggtggctgtgaagatcctccggcctgatgcgaccaagaatgcacgcaatgattttctaaaggaagtcaagatcatgagccgcctgaaggaccctaatataatcagactgctgggagtttgtgttcaggacgatccactgtgcatgatcactgattatatggagaatggtgacctgaatcaattccttagtgcccatcagttggaggacaaggccgctgagggggcaccaggagatgggcaggcggcacagggccctaccatttcttatcctatgcttctgcacgtcgctgcacaaatcgcctcgggcatgcggtaccttgctactctgaactttgtccacagggacttagcaacccgcaactgcttagtgggagagaactttactattaagatagcagactttggaatgtcccggaacctgtacgccggagattattacagggtgcaaggaagggccgtgctgcctatccgctggatggcgtgggaatgtattctgatgggaaagtttacaaccgccagtgacgtgtgggctttcggagttaccctctgggaagtcctgatgctgtgccgcgctcagccttttgggcagttgacagatgaacaggtgatcgagaatgcaggcgagttctttagggaccaaggtagacaggtgtacctgtcacgccctccggcatgcccccagggcctgtatgagctcatgcttcgctgttggtctagggaatcggagcagagaccccctttctcccagttgcatcgattcctggctgaggacgcactgaacactgtttag

SEQ ID NO: 289019 - DNA, 2742 bp, Artificial Sequence
  derived and/or modified sequence
atgggcccagaagctctgtctagcctgctgcttctgctgctcgtagctagtggagatgcagacatgaagggccacttcgacccggctaagtgtcgctatgccttgggaatgcaggacagaacgattcccgatagcgacataagtgcgagctcctcatggtccgactctaccgccgctaggcatagccgtttggagtcgtccgatggagatggagcctggtgtcctgccggtagcgtgtttcccaaagaggaggagtacttgcaagttgaccttcagcgactccacttagtcgctttagtaggcacgcaaggcaggcatgccggaggacttggcaaggagtttagtagaagctatagattgagatacagcagagatgggaggcgttggatggggtggaaggatagatggggacaggaggtgatctccgggaacgaggacccagagggcgttgtactgaaagatctcggtcccccaatggtggccaggctcgtcagattctaccctcgggctgaccgggtcatgagcgtgtgcctacgagtcgagctatacggctgtctatggagagacggattgctgtcatataccgcccctgtgggacagaccatgtatctaagcgaggccgtgtatctcaacgatagcacctatgatggtcataccgtaggcggattacaatacggagggctgggacagctcgccgacggagtggtgggcctcgacgatttccggaaatcccaggaactaagggtgtggccgggatatgactatgtcggatggtcaaaccactcctttagcagcgggtatgtcgaaatggaattcgagttcgacagactgcgcgcttttcaggcaatgcaggtgcattgcaacaacatgcacactctgggcgctaggttacccggtggtgtggagtgcagattcagaaggggaccagccatggcctgggagggggagcctatgcgtcacaacctcgggggaaacttaggggacccacgtgctagagctgtgtcggttcccttaggaggacgggtcgcaaggttcttgcagtgccggttcctgttcgcaggcccttggctcctgttctccgagattagcttcatcagcgacgtggtgaacaactcatcccccgcactcggtgggacatttccacccgcaccatggtggccacccggtcctccgcctacaaatttcagtagtctggagctggaacctagaggccagcagcctgttgcaaaagctgagggctctcccactgccatcctgatcggctgtcttgtggcaattatcctcctgcttctactaatcatcgccctgatgctgtggcggctccattggaggcgactcttgagcaaggctgagagacgcgtgctggaggaagagttaacagtgcatctgtctgtgcccggagacaccatcttgattaacaataggccagggcctcgggagcctccaccttaccaggaaccacgacctagaggaaatcccccacattcggcaccatgcgtgcccaatggcagcgcgctgctcttaagcaaccccgcatatcggcttctgttagccacttatgcgcgacctcctagagggccaggacctccaaccccggcttgggccaagcctacgaacacacaagcttattctggtgactacatggagcctgagaagccaggcgctcctctcctccccccacctccacagaattctgtcccacactatgccgaagcggacattgtcactctacaaggggttacaggaggtaatacatatgctgtccccgcattaccccctggcgctgtgggcgatggaccacctagagttgatttcccacgatcgcgcctccgattcaaggagaaattgggtgagggccagtttggcgaagtccacctgtgtgaagtggactcacctcaagacctcgtgagcctggactttcccctgaatgtcaggaaaggccatccccttctggtggccgtaaaaattcttcggccagatgccaccaagaacgcccgtaacgatttcctgaaggaggtgaaaatcatgtcccgactcaaagatcccaatatcattcgcctacttggggtgtgtgtccaggatgaccccctgtgtatgattaccgactacatggaaaacggcgatctcaaccaattcctttccgcccatcagctggaggataaggcagctgaaggtgcgcctggggatggccaagcagcgcaagggccaacaatcagctatcccatgttgctccatgttgctgcccagatagccagtggaatgagatacctggcaaccttgaatttcgttcaccgggatttggcgacacgcaattgtctcgtgggtgagaatttcaccatcaaaatcgccgacttcggaatgtctagaaacctgtacgcgggagactattatcgggtgcagggtagagccgtgctcccaatccggtggatggcttgggagtgcattcttatgggtaaatttactactgcaagtgacgtttgggcttttggggtgactctgtgggaagtgctcatgctgtgtcgcgcacagccgttcggccaacttacagatgagcaagtcattgaaaacgcgggtgaatttttcagggaccagggccgacaggtatatctgtcacggcctcccgcatgtccacagggcctttacgagttgatgctcaggtgctggtctcgcgagtctgaacagcgccctccatttagccagctgcacaggtttcttgcggaggacgctctgaataccgtttag

SEQ ID NO: 289020 - DNA, 2742 bp, Artificial Sequence
  derived and/or modified sequence
atggggcctgaggccctgtcaagcctcctcctgctgttgcttgttgccagtggtgatgctgatatgaaaggacacttcgatccagcaaagtgtcgttacgctttgggcatgcaggataggactattccggactctgacatctctgctagtagcagttggtctgactccaccgctgcccgacactcgcgtttggagtcctctgatggcgatggtgcctggtgccctgcaggcagtgtattccctaaggaagaagagtatctacaggtggatctgcagaggctccaccttgtcgcgctcgtaggtacccaaggacgtcacgccggtggcttgggcaaagagttctctagatcctacagactgcggtacagccgcgacggacgacgctggatgggctggaaagataggtggggccaggaagttatcagtggaaacgaggaccctgagggggtggtactcaaggatctgggcccaccgatggtcgcaaggttggttcggttttatccgagggccgaccgggttatgtccgtgtgtcttcgtgtcgaactgtacggatgtttgtggcgggacggtctccttagctatactgctcccgtggggcaaaccatgtatctgagcgaagccgtctatctgaatgattcaacatatgatggacacacggtcgggggattgcaatatggcggtctcggacaactggcagatggggtggtgggcctggatgatttccgaaagagtcaggaactgagggtgtggccaggatatgactacgttgggtggtccaaccattctttctctagcggatatgttgagatggagtttgagtttgatcggctccgcgctttccaggccatgcaagtgcactgcaacaatatgcataccctcggtgcgcgactgcctggaggggtggagtgcaggtttcgacgaggacccgcaatggcctgggagggggaacctatgcggcataatctgggcggtaatctgggcgaccctcgggctcgagccgtctccgtgcctctcggcggacgcgttgcacgtttcctccagtgtcggttcctctttgcgggaccatggctcctgttttcggaaattagttttatttccgatgtcgtgaataactctagtccggcattgggcggtacatttcctccagccccttggtggcccccaggcccaccacccactaatttctcatccctggagctggaaccaaggggacaacagccagtggcaaaggctgaagggtccccaacagccattcttatcgggtgcctagtggccatcatccttttactgcttcttataattgccctcatgctatggaggctccattggaggcgactgctgtcaaaggccgagaggagggttttggaagaagagctcactgttcacctgagcgtccccggtgacactattctcattaacaaccggccagggcctagagaaccacccccatatcaggagcctaggccacggggtaatccacctcacagcgccccatgcgtccctaatggtagcgccttgctgctgagtaatcctgcctacagactgctgctggcaacatatgctcgtcccccaagagggccaggccctccaacgcccgcatgggccaagcccacgaacacacaggcttacagcggcgattacatggaacctgaaaaacctggggcacctctactccccccacccccacaaaatagcgtgccccactatgccgaagcggacattgttacgctgcagggcgtcaccggcggtaatacatatgccgtccctgctttacccccaggagcagtaggtgatggtcccccacgcgtggattttccgcgttcccggctgagattcaaggagaaactgggcgagggtcagttcggggaggtgcacctctgtgaggtggactcaccacaggacctagtgtccttggattttccgctcaacgtacgcaagggacatcctttgctcgttgcagttaaaattcttaggcccgacgcgaccaaaaacgccagaaacgacttccttaaagaggttaagatcatgagccgcctgaaggaccctaatatcatcagactcctgggtgtttgtgtgcaggacgacccactgtgtatgatcacagactatatggagaatggagatctcaatcagtttctgtcggcccatcagttggaagataaggcagcagagggcgctcccggtgatggccaggctgcacaagggccaactatctcttaccctatgctgttgcatgtggctgctcagatcgcaagtgggatgcgttacttagccactctgaactttgtgcatcgagatctagcaactcggaactgcctcgtgggcgaaaatttcaccataaaaatagctgattttggaatgtctcgaaatttatacgctggtgattactaccgcgtccagggtcgagcagtactcccaatacggtggatggcctgggaatgcattctgatggggaagttcactactgcttccgacgtgtgggcattcggagtgacattatgggaagtgttgatgctctgcagggctcagcccttcggacagttaaccgacgaacaggtcattgagaatgctggggagtttttcagggatcagggacgacaggtctatctgtctcgacccccagcctgcccgcagggactttacgagcttatgctgcggtgctggagcagggaatcagagcagcgacctcctttcagccagcttcataggttcctggccgaggacgctcttaacaccgtgtag

SEQ ID NO: 289021 - DNA, 2742 bp, Artificial Sequence
  derived and/or modified sequence
atggggcctgaggctctgagttctcttctgctgctgctgctggtcgcctccggcgatgcagatatgaaagggcacttcgatcccgcaaagtgcaggtatgctcttggcatgcaggacagaactattcccgactctgacatctcggcctcgagctcctggagcgactccacagccgcacggcactcgagacttgagagctccgatggggatggcgcttggtgtcccgcagggtcagtctttcccaaggaggaagaatatctccaggtcgacctgcagaggttgcacttggtggcattggtgggcactcaaggcagacacgccggaggcctgggtaaagagttctctcgctcttacagattgagatatagccgggatggcagacgatggatggggtggaaggacagatggggccaggaggtcatcagtggcaatgaagatcccgaaggcgtcgtacttaaggaccttggtccacctatggtggcaaggctcgtgcggttctatccaagagccgaccgggttatgagcgtctgtctgagggtagagctgtatggctgcctttggagagacggactcctgagctatacggctccagtggggcagacaatgtatctatctgaagctgtctacctcaatgacagcacatatgacgggcataccgtgggaggcctccagtatgggggtttgggacaactggcagatggagtagtggggctcgacgactttcgcaagtcccaagagttgcgggtgtggcctggatatgactatgtgggttggtccaaccactcattcagcagcggttatgtggaaatggagtttgagttcgaccgtctcagggcatttcaggccatgcaggtccactgtaacaatatgcatacattaggcgctcgactgcctggcggtgtggagtgcagattcagacggggacccgctatggcttgggaaggagagccaatgcggcacaatctcggtggcaatctgggcgaccccagagcgagagcggtgtcggtacccctcgggggtcgagttgcacgcttcttgcagtgtcgctttctgttcgccggaccatggctgctgttctccgaaatatctttcatctcagatgtagttaacaattcaagccccgcactcggcggaacgttccccccagccccttggtggcctccaggcccacctcccaccaattttagcagtcttgagttggaaccacggggacagcaacccgtggcaaaggccgagggctctccaactgcaatcctgattgggtgcctcgtggctattattctgctgctactgctcatcatagcattgatgctgtggcggctgcattggcgtaggttactctccaaggcggagaggagagtgcttgaagaggaacttactgtgcatcttagcgttcctggcgataccatcctgatcaacaataggcccggtcctcgggagcctccaccttaccaggagcctagaccccgtggcaatccgccacatagcgctccttgcgttcccaacggctccgccctcctgctctcaaatccagcctatcggcttttgctcgccacgtacgccagaccccctcgcggacccggaccacctaccccggcatgggctaaacctactaatactcaggcttatagcggagactacatggaacctgaaaagcccggagcccctcttctgcctccaccccctcagaacagcgtcccacattatgccgaggccgatatagtcactctccaaggtgtgacaggcggaaacacctatgccgtcccagctctgccacctggtgctgtcggagacgggcctccacgggtcgacttcccccgatcccgccttcggttcaaagaaaaattaggcgagggacagttcggtgaggtgcatctttgtgaagtggacagtccacaggaccttgtgtcccttgactttcctctgaatgtgcgcaaaggacacccattgttggtcgctgtaaaaattctacggccagatgcaactaaaaatgcacgaaacgacttcctgaaggaggtcaagataatgtcccgtctgaaagaccccaatataataagattactgggcgtttgcgttcaggatgaccctttgtgtatgatcactgattacatggaaaatggagacctgaatcagtttctaagtgcccatcaattggaggataaggcagctgagggagcaccaggagatgggcaggctgcacagggcccaaccatctcttaccctatgctactccacgtggccgctcagattgcttccgggatgcggtacctagccaccttgaacttcgtgcatcgggacctggctacgagaaattgcttagtgggcgagaattttaccattaagattgccgacttcggcatgtctagaaacctttacgcaggggattactacagggtgcagggtcgcgctgtgctacccatcagatggatggcctgggaatgtattctcatggggaagttcaccaccgcgtctgatgtgtgggcgttcggagtgacactgtgggaggtccttatgctatgtcgggcacagccttttggacagctcactgacgagcaggttattgagaatgctggcgagtttttccgggaccaaggacgccaagtgtacctcagcaggcctcccgcatgcccccaaggcttatacgagcttatgctgcgctgctggagtcgggagagtgaacagagaccccctttttcccagttgcataggttcttagcagaggacgccctgaacactgtttag

SEQ ID NO: 289022 - DNA, 2742 bp, Artificial Sequence
  derived and/or modified sequence
atgggtcctgaagccctatctagcttactcttactacttctggtggcctcaggagatgccgatatgaagggacactttgatccagccaaatgccgatatgctctgggtatgcaagatagaaccattcctgacagcgatatttcagcctcctcttcttggtcagacagcactgccgctaggcattccagactcgaaagcagtgatggcgatggcgcatggtgcccagcaggcagcgtgttccccaaagaggaagaatatctccaggttgaccttcagcgcctccatctggtagccctggtgggtacgcagggacggcacgcgggaggactcgggaaggagttttctcggtcttacaggttgcgttattcccgtgacggacgcagatggatgggctggaaagacagatggggacaggaagtcatcagtggtaatgaggacccagaaggtgtggtcctgaaggatctgggccctcctatggtggcgaggctcgtgcgcttctacccgagagccgaccgtgtgatgtctgtgtgtctgcgggtggagctgtacggctgcttgtggagagatggattactgtcatataccgccccagtggggcagaccatgtacctctccgaggccgtttatctgaatgacagcacctacgatggacatactgtcggaggactacagtacggtggtctgggccagctggcagacggcgtcgtcggattagacgattttaggaaaagccaggagttgcgagtgtggccaggctacgactacgttggctggtctaatcactctttttcaagtggatatgtggaaatggaattcgagtttgacagactgcgcgctttccaggctatgcaggtgcactgtaacaatatgcatacactcggtgcccgactgcccggaggggtagaatgccgctttagaaggggacctgccatggcatgggagggagagcccatgcgtcacaacctgggcggaaacctcggtgatccacgggcccgggccgtgtcagtgccacttggtggacgagttgcaaggttcctgcaatgtagatttctgtttgccgggccctggctcctttttagtgagatttccttcatatccgatgtggtgaataacagcagccctgccctgggcggaacattcccgcctgctccctggtggccccctggaccaccgcccaccaatttctctagtctggagctggagccacggggccagcaaccggtcgcaaaagccgagggcagtcctaccgccatcctcattgggtgcttggtggctatcatcctgcttctgttacttatcattgccctgatgctgtggcgactgcattggaggaggcttctctccaaagctgaacggcgcgtgctggaggaggagctcactgtgcatctgagcgtacctggagacaccatcctgataaacaaccgccctggccccagagaacccccgccttatcaagaaccccgcccaagaggcaacccaccacactcagctccttgcgtccccaatggcagcgccttgttgttatccaatcccgcttaccgtctcttgctggccacctatgcccggcccccccggggtcccggcccccccactcctgcgtgggcaaaacctactaacacgcaagcttactccggtgactacatggagcctgaaaaaccgggggcacccctgctacctccccctccccagaatagcgtgccacattacgccgaggcagatatcgtcacattgcagggcgtaaccggaggaaacacctatgcggtgcccgctctccctccgggtgccgtcggtgatggccctccccgggttgactttcctcggtcaaggctaagattcaaagagaaactcggcgagggccaatttggggaagtgcatctctgcgaagtcgactcaccacaggacctcgtttccctcgactttcccttgaatgttagaaagggacacccattgctggttgcagtcaagatcctacggcccgacgcgacaaagaatgcccgtaacgattttttgaaggaggttaaaattatgtcaagattaaaggatcctaacattatcaggctactgggtgtgtgcgttcaggacgatcccctatgcatgatcacagactacatggagaacggggatttgaatcagttcctgtcagcccatcagctggaggacaaggctgccgagggcgctcccggcgacgggcaagctgcccaaggccctaccattagttatcccatgttactgcatgtggctgcgcagatcgccagcgggatgaggtacctcgctaccctgaacttcgtccaccgggatctcgctacaagaaattgcctagtgggtgagaactttaccataaaaatcgcagacttcggcatgagccgcaatctctacgcaggcgactattatcgggtgcaaggaagggcagtgttacccattagatggatggcctgggagtgcatactgatggggaaatttactaccgcctccgacgtttgggccttcggtgtgacactttgggaagttttgatgttgtgccgggctcagccctttggccagctcacagatgagcaagtgattgaaaacgctggtgaattcttccgagaccaggggcgacaggtgtatctgtcccggccccctgcctgccctcagggtctgtatgagctcatgcttcgctgctggtccagagagtcagaacagaggcccccattcagccagctgcatcggttcctcgccgaggacgccctaaatactgtctag

SEQ ID NO: 289023 - DNA, 2742 bp, Artificial Sequence
  derived and/or modified sequence
atgggacccgaggctttgtcgtccttacttttactcttgcttgtagctagcggtgatgcagatatgaaaggccatttcgaccccgccaaatgcagatatgcgcttgggatgcaagatcggactattcctgattctgacatatcagcttcctcctcttggtccgactccactgcagcaaggcattctcgcctcgaaagttcagatggcgacggcgcttggtgcccagccggcagcgtcttcccgaaagaagaggaatatctgcaagtggacctgcagagactgcacctggtagcactggtgggaacacaggggcgccatgccggcggtctgggtaaagaattctcaaggagctaccggctacgctatagtagggatggaaggcgctggatggggtggaaagaccgctggggtcaggaagtgatctctgggaatgaggaccccgaaggggtcgtcttgaaggatctgggcccacccatggtggcacggctggtgcgattctatcctcgtgctgatcgcgttatgtccgtttgcctacgcgtcgaactgtatggatgcctatggcgggatggattgctcagctacactgccccagtagggcaaaccatgtatctttccgaagcagtgtatctgaatgatagtacatatgacggtcacaccgtcgggggtctgcaatatgggggacttggacagttggcagacggtgtcgtggggctggacgatttcagaaaaagtcaagaactgcgcgtatggcctggctacgattacgttggctggagcaaccactccttctcttcgggctatgtcgaaatggagtttgagtttgaccgactccgtgcctttcaagccatgcaggttcactgtaacaacatgcataccctgggggctcgccttccaggcggggtggaatgcaggttcaggcgcggccctgcgatggcctgggaaggtgaacccatgagacataacttgggcgggaacttgggtgatccccgggcgcgagccgtgtcagtcccgcttggagggcgagtggcccgttttctccagtgtcgcttcctgttcgcgggaccctggctgcttttctccgaaatttctttcatctctgacgtggtcaataactcctctcctgctctaggcgggacttttccacctgctccttggtggccacccgggccccccccgaccaacttcagctctctggaactcgagccaagagggcaacagcccgtcgcgaaagctgaggggtcccctactgcaattttaattggatgtcttgttgccattatactgttgttactgctaatcattgctctaatgctgtggcgcctgcattggcggcgcctcctctctaaggcagagaggcgtgtgctcgaagaggagctgacagtacatctatccgtcccaggagacacaatacttataaataatcgaccaggcccacgtgagccccctccttaccaggaaccaagaccaagagggaatccaccccattccgccccttgcgtgcctaacggatctgctctgttgttaagcaatccagcatataggctgctcttggctacttatgccagaccgcccaggggacccggcccccctacccccgcatgggcgaagccgaccaatactcaggcatactcaggagactacatggaacctgaaaaacccggggctccactgctgccccctcccccacagaactccgtccctcactacgccgaagccgatatcgtcactttgcaaggcgtaactggcggtaacacgtacgccgtgccagcgctgcctccgggcgccgtgggcgatggaccccctagagtggatttcccccggtccagactgcggttcaaagaaaaactgggagaagggcaatttggagaagtccacctgtgcgaggtagactcaccacaggatcttgtcagcttggatttcccactgaacgtcaggaagggccatcctctgctcgtggcagtcaaaatcttacgccccgacgcgaccaaaaacgcacgaaacgacttccttaaggaggtcaagatcatgagccggctcaaggatccaaatattattaggctgttgggtgtgtgtgtgcaggacgatcccctgtgcatgattacagactacatggaaaacggcgatttaaatcagttcctttcagcccaccagctggaagacaaagcggcggaaggagcacccggcgacggacaggccgcccagggccccacaatcagctaccctatgctgcttcatgtcgctgcacagatagcatccggaatgcgatatctcgcgaccctcaacttcgtccatagggaccttgccacccgaaattgcttagtcggggagaatttcactattaaaattgctgacttcggaatgtcaagaaacctctacgcaggcgactattatagagtgcagggacgggccgtactgccaatacgttggatggcctgggagtgcatcctcatgggtaagtttaccacggcttcagatgtgtgggcttttggggtaacactctgggaagtcttaatgctgtgtagagctcagccttttgggcagctgaccgacgaacaggtgattgagaatgctggcgagttcttccgggaccaggggcggcaggtgtatttaagccgacctcccgcatgcccgcaaggcctttacgagcttatgttgagatgctggagtcgggaatcagaacagcgaccacccttctcacagcttcatcggtttctcgctgaggatgcccttaatactgtgtag

SEQ ID NO: 289024 - DNA, 2742 bp, Artificial Sequence
  derived and/or modified sequence
atgggacccgaagccctatctagtctgctacttctcctcctcgtggcaagtggggatgcagatatgaagggccatttcgatccagctaagtgtagatatgcactgggcatgcaggataggacaatccccgattctgacatatctgcctcatccagctggtctgacagcaccgctgctagacattctagattggagtcctcagatggagatggcgcctggtgcccagcaggttccgtctttcctaaagaggaagagtatctgcaagtggatctccagaggttacatctggttgccctggtcggcacccagggtaggcacgccggcgggctagggaaggagttctcaagaagttatagactgagatattcacgggacggcaggcgatggatgggctggaaggatagatggggacaggaggtaatttcaggcaacgaggaccccgaaggcgtggtactcaaggacttagggccacccatggtggctcggctggtgagattctaccctcgggccgaccgcgtaatgagcgtctgtctaagagtggaattgtacggatgtctgtggagggacggactgctttcatataccgcccctgtgggacagaccatgtatctcagcgaggccgtgtatttaaacgatagcacgtatgatggacatactgtgggaggacttcagtacggtggtctgggtcaactggccgacggtgtggttggcctcgacgactttagaaaatcccaagagctgagagtgtggcctgggtacgattatgtgggttggagtaaccattctttttcaagcggctacgtggagatggagttcgaattcgatagactgcgggcttttcaggccatgcaggttcactgcaataatatgcataccctgggcgcccgtcttccaggaggtgtggaatgtagattccggcgcggcccagcgatggcctgggagggggagcctatgcgccataatctgggtggcaatctgggcgacccgcgcgctcgcgccgtgagtgtgcctctcggcggacgtgtggcccggttcctgcaatgtcgctttctgtttgctgggccctggctcctgtttagcgagatctcattcatcagcgacgtggtaaacaattcatccccggcattaggcggaacatttcctcctgccccttggtggccaccaggcccaccacctacaaatttcagttcactggagctcgaaccaagggggcaacagccagttgccaaagcagaaggcagccccacagcaatcttgatcgggtgtctggtggccatcattcttctcctgcttctgatcatcgcactcatgttatggcgcttgcattggaggcgtctgctgtcgaaggctgaaagaagagttttggaggaggagttgactgtgcacctctccgtacctggcgataccatactcattaataaccgcccagggcctagagagccccctccctaccaggagcctcggccacgggggaacccccctcattctgcaccctgtgttccaaacggaagcgccctcctgttatcaaatccggcctaccggctactattagccacctatgcaagaccacccaggggaccaggtccccctacgccagcatgggctaagcccacgaacactcaagcatattctggcgactatatggagcctgagaagccaggcgcacccctgctgcctcccccacctcagaactccgtgccccattatgccgaagccgatatcgtgaccctgcaaggagtcaccgggggtaatacctatgctgtgcccgctctccctcctggagctgtcggagatggaccaccccgggtggactttccacggtcccggcttaggttcaaagaaaaattaggcgaagggcagtttggcgaagttcatttatgtgaagttgactctcctcaagatcttgtctctctggatttcccactaaacgtgcgaaaaggacaccccctactcgtagctgttaagatcctgaggcctgacgctaccaagaacgcccgcaacgactttctcaaagaggttaaaatcatgtccaggctgaaggatcccaatattatacggcttctcggggtttgcgtgcaggacgatcctctgtgtatgatcaccgactacatggaaaacggggatcttaaccagttcctcagcgctcaccagctggaagacaaggctgctgagggagcccctggggacggacaagccgctcagggtccgaccatctcgtaccccatgctactacacgtggcagcacagatcgcatcaggtatgcgttacctggctaccctcaacttcgttcaccgcgacctcgctacacgcaattgccttgtcggagagaattttacaattaagatcgccgatttcggcatgtctagaaatttgtatgccggagactattacagagtgcagggtagagcagtcctgccgatccggtggatggcttgggaatgcatcctcatgggcaaattcactacggcctccgacgtgtgggcctttggtgtgacattgtgggaggtccttatgctctgtcgcgcacagccctttggtcagctgactgacgaacaggtaattgaaaatgccggagagttttttagagaccagggccgccaagtgtaccttagccggcctccagcgtgcccgcagggactgtatgagcttatgctgcggtgttggagtagggaaagtgaacagagaccaccattcagccagttacatcgtttcttggccgaggacgcattgaacacagtatag

SEQ ID NO: 289025 - DNA, 2742 bp, Artificial Sequence
  derived and/or modified sequence
atgggcccagaagcactgtcatccctgcttcttttgctcctcgtggctagcggtgatgcagacatgaaggggcacttcgaccctgctaagtgtcggtatgctttaggcatgcaagaccgaacaattcccgattcagatatttctgcttcaagcagctggagcgacagcacagcagccagacattctcgtcttgaatccagcgacggtgatggcgcatggtgcccagcgggatcagtgtttcctaaggaagaagagtatctccaggtcgacctacaacgtcttcacctggttgcccttgtgggtacccagggtagacacgcaggaggcttgggcaaggaattttcacggagctatcgcctgcgttacagccgggatgggcgacgttggatgggctggaaggatcgctgggggcaagaggtgattagcggcaatgaggaccccgaaggggtagtactcaaagatctgggcccgccaatggttgcaaggctcgtccgattttatccccgagccgacagagtgatgtcagtttgtctgcgggttgagctgtatggctgtctgtggcgagatggactgttgagctatacagctccagtgggccaaacaatgtacttatctgaggccgtgtacctgaatgatagcacctatgacgggcacacggtgggcgggctgcaatacggaggcctaggacagcttgctgatggagtcgtggggctggatgacttcagaaagtcacaggaacttcgggtgtggccgggatatgactacgttggctggagtaatcattcctttagcagcggttacgtggaaatggaatttgaattcgatagactcagggcctttcaggcaatgcaagtacattgtaataacatgcatactctgggtgccagactacccgggggagtcgaatgtcgcttcaggagagggcccgccatggcctgggagggtgagcctatgagacataacctgggaggcaatctcggtgatccccgagcccgcgcagtgtcagttccccttggcggacgggtagcacggttcctccagtgtcgcttcctttttgccggcccctggctgctattctcagaaatttcgttcatatccgacgtcgttaacaatagttctcctgcattggggggtacattcccaccagctccatggtggccacctggtccaccaccgaccaatttttctagtctggagctcgagccgagaggccaacagccagtggccaaagcagagggctctccgaccgccatcttaatcgggtgcctcgtcgcaattattctgcttctgcttctcatcatcgcgctgatgctgtggcgacttcattggagaaggctattaagtaaggccgagcgccgggtgctggaagaggagctgacagtccatctgagcgtacccggcgacaccatccttatcaacaacagacccggaccccgcgagcctccaccataccaggaacccagacctcgcggcaatccaccccactcggcaccctgcgtcccaaacggatcggctctgctgctgagtaaccccgcctaccggctgctgctggccacctatgcacgcccgcccagaggccccggtccacctacaccagcctgggctaagcctactaacactcaagcctacagtggtgactacatggagcccgagaagcctggcgcccccctactccctcctccgccccagaactctgtaccacactacgcagaggccgatatcgtaacactgcagggcgtgacgggaggcaatacatacgccgttccagctctccctccaggagctgttggtgatggcccacccagagtagacttccccagatcaaggctgaggtttaaagagaaacttggcgaggggcagtttggtgaggttcatctttgtgaggtagactcaccccaggacttggtatctctggattttccgctcaacgtcagaaaagggcatccactactggtcgccgtgaaaatcttaagacctgatgctaccaaaaacgctcgaaacgactttctgaaagaagtgaagatcatgtcacggctaaaagacccaaacataatccgcctgttaggtgtctgtgtacaggatgatccactgtgcatgattacagattatatggagaatggagacctgaaccagttcttgtctgcccatcagctggaagacaaggccgccgagggcgcccctggcgacgggcaagctgcgcaaggaccaacgattagctaccctatgctgctacacgtggccgctcagatagcatctggaatgaggtatctagcaacactgaactttgtgcaccgcgatctggctactagaaactgtctggtaggggaaaacttcaccattaaaattgccgattttggaatgtcaagaaatttgtacgccggcgattattatcgagtacaagggcgagccgtgctgccaattagatggatggcctgggaatgtatcctgatgggcaagttcaccactgcaagcgacgtctgggccttcggagtgactctttgggaagtgctgatgctgtgtcgcgcccagcccttcggccagctcacggatgagcaggtcattgagaatgcgggagaatttttccgcgaccagggtaggcaggtgtacttatcacgcccgcctgcgtgcccccaggggctgtacgagctgatgctgcggtgttggagtagggagtccgaacagagaccacccttctctcaactccatcgctttctcgctgaagatgctttgaatactgtttag

SEQ ID NO: 289026 - DNA, 2742 bp, Artificial Sequence
  derived and/or modified sequence
atggggccagaagccctgtcctctctgctgttactgttgctggttgctagcggtgatgccgatatgaaagggcacttcgatccggcaaaatgtcggtatgcccttggcatgcaagatcggacaatccctgattcagacatttctgctagctcttcttggtccgattctacggcagccaggcatagtcgtttggagtcgtctgatggcgacggtgcttggtgtcccgctggttctgtgttccctaaggaagaagagtacctacaagtcgatctccagcgcctccacctggtggccctggttggtacgcagggtcggcatgcgggaggcctcggcaaggagttcagtaggagctacaggctgcggtatagtcgagatggacgccggtggatgggctggaaggacagatggggccaggaagttatctcaggcaatgaggatcccgagggtgtagtgcttaaggacctggggcctccaatggtcgccagactcgtgcgcttttatccaagagcagatcgtgttatgtctgtgtgcctaagggtcgagctatacggatgcctgtggcgggacggcctgttgagttacactgcgcctgtgggacagactatgtacctgtctgaggctgtgtatttgaatgatagcacctacgacggtcatactgttgggggactccagtatgggggcctagggcagctggcggacggtgtcgtcgggttagatgactttcgtaagtctcaagaattaagggtctggcctggctacgattacgtggggtggagcaaccattctttcagctccggctatgtcgagatggagtttgagttcgaccggcttagagccttccaggccatgcaggttcactgcaataatatgcatactctcggcgcaagactccccggaggggtcgagtgccggtttcgcaggggccccgccatggcatgggaaggcgaaccgatgagacacaacctgggcggcaacctgggtgacccgagagctagggctgtgtctgtcccactcggcggccgggttgctcggttccttcagtgccgatttctgtttgcaggcccatggctgctcttctctgagatttcatttatatccgatgtcgtgaataattcttcccctgctctcggtggaacattcccccccgctccatggtggccaccaggccctcctcctaccaatttcagcagtttagaactagaaccaaggggccagcagcccgtggcaaaagccgagggatcccccacagctatactcattggatgtctggtggctattatcctgcttctactcctgattatagctctcatgctctggcgactccactggagaagattactgtcgaaggccgagaggagagtactggaggaagagctcacagtgcacctgagtgttcccggagacaccattctgatcaataatagaccaggcccaagggaaccccccccctaccaagagcccagacctagagggaatccaccccattctgcaccttgcgtcccaaacggctcagctctcctgctgtcaaaccccgcctacagactgctcctggctacgtatgcgagacccccaaggggaccaggtccccccacacccgcttgggctaaaccaaccaacacacaggcctacagtggtgactacatggaacccgaaaaacctggcgctcccctcttaccacctccacctcagaactcagttccccactacgcagaggcagatattgtcaccttacagggagtcactgggggaaacacctatgctgtgccagccctccctccaggtgccgtaggcgatgggcctccaagagtcgatttcccgagatctagactgcgattcaaggagaaacttggggagggccagttcggggaagtccatctgtgcgaagtcgactcccctcaggacctggtgtccctggactttccactgaatgtccgaaagggccaccccctcttagtagccgtgaagatccttagaccagatgccactaaaaacgcacggaatgactttctgaaggaagtcaaaattatgtcccggttaaaagaccccaacattatccggcttcttggagtatgtgttcaggatgatcccctttgtatgatcaccgactatatggaaaacggggacttaaatcagttcctgtcagcacatcaactcgaagacaaggccgctgagggtgcacctggagacggccaggcagcccaggggcctactattagctaccctatgctcttacacgtcgcagcccagatcgcatctgggatgaggtacctcgctaccctgaatttcgttcatcgcgaccttgccactcgcaattgtctcgtcggtgaaaattttacaattaagatcgccgactttggcatgtcccgaaatctgtacgcaggagactactatagagtgcagggtagagctgttctgcccatccggtggatggcttgggagtgtatactcatgggaaaatttactactgctagcgacgtgtgggccttcggtgtcaccctgtgggaggtcctgatgctatgccgtgcacagccattcggacaactcactgatgagcaggttattgaaaatgccggtgagttttttcgcgatcaggggcgtcaggtttacctctcccgccctccagcctgtccccaaggactgtacgaattgatgctgcgctgctggtcacgcgagagcgaacagagaccacccttttcacagttgcatcgcttcctggctgaggacgccctgaacacagtgtag

SEQ ID NO: 289027 - DNA, 2742 bp, Artificial Sequence
  derived and/or modified sequence
atgggacccgaggccctctcttcacttctgcttctgctgctagtggcctcgggagatgccgacatgaaagggcactttgaccctgcaaagtgcaggtacgcacttggaatgcaggatcggacaatccccgacagtgatatctctgcctcctcatcttggtctgatagcactgccgcccgccactcacggctagaaagctcagacggagacggggcttggtgcccggcaggaagtgtgtttcctaaggaggaagagtatctccaggtggaccttcaacgcttacacctcgtggccctggtggggacccaaggaagacatgccggcggcctggggaaggagttctctagatcctataggctgaggtacagtagagacggacgtagatggatggggtggaaggacaggtggggtcaggaggtgatatccggtaacgaagacccagaaggtgtggtcctgaaagatttaggcccacctatggtggcaaggctggtcagattttatccgcgggccgatcgagtaatgtctgtgtgtttgagagtcgagttgtacgggtgtctatggcgggatggacttttatcgtatacggcgccggtgggtcagactatgtacttgtccgaagccgtgtatttgaacgactccacctacgacgggcataccgtagggggcttacagtacggtggactgggacaactggccgatggagtcgtaggcctagatgattttcgcaaatcacaagaattaagggtgtggccaggctacgattacgtggggtggtctaatcactctttttcctctgggtatgtggagatggagttcgagttcgatcggctgcgggccttccaggctatgcaggttcactgcaataacatgcacaccctcggtgcaagactgcccggcggcgtcgagtgtcgtttcagaagagggcctgctatggcttgggagggtgaacctatgcgccataatcttggaggcaacctcggggatccccgcgcccgagctgtttcagtgcccctgggtggtcgggttgctagattcctacagtgtcggtttctctttgccgggccgtggctgcttttttcagagattagttttatatcggacgtggtgaacaattcatcacctgcactcgggggcaccttccctcctgccccgtggtggcccccgggaccccctcccaccaattttagcagtttggagctggagccaagggggcagcaaccggtggctaaagctgagggctctcccacggccatcttaattggctgtttagtggccataatccttcttctcttattgatcattgccctgatgctgtggcgactgcactggcggcgactgctctctaaagcagaacgtagagttttagaagaagagctcactgtgcacctctcagtcccgggagataccatactcataaataatagacctggtcctcgcgaaccgcctccttaccaggagccaagaccgcgagggaacccaccacatagtgccccttgcgtgcctaacggcagtgctctcctgctgtccaaccccgcgtacagactgctcctcgcaacatatgccagaccaccacgggggcccggcccgccaactccagcatgggccaagcccacaaacacgcaggcttactctggagattatatggagccagagaagccaggagcaccactactcccgccccctccccaaaattctgtcccgcactatgcagaggccgacatcgttaccctccaaggtgtgactggtggaaatacctatgccgtacccgccttacctcccggtgccgtaggtgatgggcccccaagagtcgatttcccgcggtcaaggctgagattcaaggagaaactgggagagggtcagttcggggaggttcacctgtgcgaggtggacagtcctcaggaccttgtgtctctggacttccctctcaacgtaagaaaaggtcaccccctcttagtggccgtgaagattctgagaccggacgcgactaagaacgccagaaacgattttctcaaagaggttaagatcatgtcccgactgaaagatccaaacatcatacgcctgcttggagtgtgcgtgcaagacgatccactgtgtatgattacagactatatggaaaatggcgacctaaaccagtttctttccgcccatcagttagaggacaaagcagccgaaggtgcaccaggcgatggccaggcagcccaggggcctacaatttcttacccaatgttgctccacgttgccgcacagattgctagtggaatgcggtaccttgccacacttaacttcgtccaccgggacctggcaacgaggaactgtctggtgggagagaactttacaataaagatagccgatttcggaatgtccaggaacctctacgcaggtgactactacagggtccagggcagggcagtgcttccaatccgttggatggcatgggagtgtatattgatggggaaattcaccactgcaagcgatgtctgggcttttggagtcacactctgggaagttctgatgctttgtcgtgcgcaaccatttggccagctgacagacgaacaggtaattgagaatgctggggagttttttagagaccaagggcgtcaggtctacctctctcgtcctccagcctgtcctcagggtttgtatgagctgatgctgagatgctggtcacgggagagtgagcagaggcctcctttttcacagctgcacaggttcctagccgaggatgcacttaatactgtttag

SEQ ID NO: 289028 - DNA, 2742 bp, Artificial Sequence
  derived and/or modified sequence
atggggccagaggccctgagctctctacttttgctgttattagttgctagtggcgacgcggacatgaagggacacttcgaccctgctaaatgccggtatgctttaggcatgcaggacagaactatccctgattctgatataagtgcctcatcatcatggagtgattctacagccgctagacattcccgactggaaagcagtgacggagatggagcctggtgcccggctggaagtgtctttcctaaagaagaagaatacttacaggtagatctgcagcgtctgcatctagtggcccttgtaggcactcagggacggcacgcgggaggactgggtaaggagttctctcgtagttacaggctgaggtattccagagacggcaggcggtggatggggtggaaggaccgctggggacaggaagtcatctccggcaacgaagatcctgagggagttgtgctgaaagacttggggccccccatggtggcgcggcttgttagattctacccaagggctgaccgggttatgagcgtgtgcctcagagtggagctctacggatgtctgtggagagacggacttctcagttatacagcgcccgtcggtcagaccatgtatctgagcgaggccgtgtatctgaacgactctacgtacgatgggcacactgtcggggggctccagtacggaggattgggacaactcgcagacggagtggtaggcttggatgacttcaggaagtctcaggaattgcgggtttggcctgggtacgactacgtcgggtggtccaatcacagcttttcctcaggatacgtcgagatggagttcgagttcgacaggttaagggctttccaggccatgcaggtccactgcaacaacatgcacactttaggggccagacttcccgggggagttgaatgtcgatttcgccgaggaccagcgatggcttgggagggagagccaatgcggcataatctgggaggcaatttaggcgatccaagggctcgcgccgtgtctgtacccttgggtggaagagtcgccaggttccttcagtgcaggtttctgtttgcaggcccatggttattgttcagcgagatctcatttatctctgatgtggtcaataattcatctccagcacttggcggcaccttcccgcctgccccttggtggccccccggtcccccccctaccaacttctcatcactcgaactagagcctcgaggacaacagcccgtggccaaagccgaaggatcccctactgcaatattgattggctgcctcgtcgctattatactgttactgcttctgattattgcgctgatgctttggcggctccattggaggagactgctgtctaaggctgagcgcagggtactggaagaagagcttacagtccacctgtccgtgccaggtgacacaatcctgatcaacaacaggccaggtcccagagaacccccaccttaccaggagcccagacctagaggaaatccaccacatagtgctccgtgcgtgcccaatggaagcgctctgcttttgagtaaccccgcttatcgcttacttctagccacttatgcccggcccccccgcggaccagggccaccaaccccagcctgggccaagcctaccaatactcaagcctacagtggtgactatatggaacccgagaagcctggcgccccgcttctcccacccccccctcagaacagtgtaccccactacgccgaggccgatatcgtgaccctccaaggagtgacaggcggcaatacctacgcagtacctgcactgccaccaggagccgtaggggacggtccccccagagtggacttcccacgatctagattgagatttaaagaaaagctgggagaaggacagtttggggaggttcatctgtgcgaagtagattctccccaggacctggtttctctggatttccccctcaatgtccgaaaaggccatcctcttctagtcgccgtaaaaattctccggcctgacgctacaaagaacgcccggaatgatttcctgaaagaagttaagatcatgagccgcctcaaagatcccaacatcatcagactcctgggggtgtgtgtacaggatgacccgctttgtatgattactgactacatggagaacggcgacctcaatcagttcttgtccgcccaccagctcgaagacaaggccgcggagggggctcctggcgacgggcaggccgcgcaggggcctactattagttacccaatgcttctgcacgttgccgcccagatcgctagtggaatgaggtatctcgctactcttaacttcgtccatagggatcttgccacccgcaattgcctcgtcggtgaaaattttacgattaagattgccgatttcggtatgtcgcggaacttatatgccggcgactactacagggtgcagggccgggctgtgctgccaatccgctggatggcatgggaatgcatccttatgggcaagtttactactgcttctgacgtatgggcttttggtgtgactctctgggaggtattgatgctgtgcagggcacaaccgtttggccaattgacggatgagcaggtgatagagaacgcaggcgagttcttcagggatcagggtaggcaggtgtatctcagccggccccccgcttgcccccagggcctgtacgagctgatgctgaggtgttggtcccgcgaaagtgagcagaggcctccattttcccagttacacagattccttgcagaagatgccctcaacacagtgtag

SEQ ID NO: 289029 - DNA, 2742 bp, Artificial Sequence
  derived and/or modified sequence
atggggcctgaggccctgtcctcattactccttctgctcctggtggcaagcggcgatgccgacatgaagggccactttgatcctgccaaatgtcgctacgcccttggaatgcaggatcggacaattccagactctgacataagcgcctcaagtagctggtctgacagcacagccgcccgccattctaggcttgaatccagtgacggcgacggcgcctggtgcccggccggcagtgtgttcccgaaggaagaagagtatttacaggtggacttacagaggctacatctggtagctctcgttggtacccagggacgacacgctggcggactcgggaaagagttcagccgcagctatcgcctacggtactctagagatgggaggcgctggatgggatggaaagacaggtggggtcaagaagtaataagcggaaacgaagatcccgaaggagttgtcctgaaagatctcggtcctccgatggttgcacggttagtgagattctatcctagagcagacagagtcatgtctgtatgtctacgcgtagagctctacggctgtctttggcgcgacggccttctgtcttacactgcgccagtgggacaaactatgtacctcagcgaggcagtgtatctgaatgacagtacttatgacggccacaccgtaggaggtctgcagtatggaggactggggcagttggctgatggagtggtgggccttgacgactttaggaagagccaggagcttagggtctggccgggctacgactacgttgggtggagtaatcactccttcagtagtggctacgtcgaaatggagttcgaatttgatcgactgcgagcctttcaggcaatgcaggtgcactgcaataacatgcataccttgggcgcccgcttaccagggggggttgaatgcagatttaggagaggcccagcaatggcgtgggagggcgagccaatgcggcataatctggggggcaacttgggcgatccccgtgctagagcggtgtctgtgcctttaggtggtcgcgtagcgagattcctacaatgccggttcctcttcgctggtccttggttgctcttcagtgaaatatcctttatatccgacgttgtgaacaattcctcccccgcgctaggtggaacgttcccacccgcgccatggtggccgcctggacccccccccactaacttttcctcgctggaacttgaaccccgaggccagcagcccgtagcaaaggcggaaggcagcccaaccgccatcctcatcggatgcctagtggctatcatcctccttctgttactcataattgcactgatgttgtggcggctgcactggcggcgactgctctctaaggccgagagacgggtattggaggaggaactgaccgttcatctgtccgtgccaggtgacacaatactaatcaataataggcctggccccagagaaccccccccctatcaagaaccgagaccacgcgggaatccccctcatagcgcaccctgcgtgccgaacggatctgccctgctgctttctaaccccgcctatcgcctgttactcgccacttacgcccggccaccccgcggacccggaccaccaacacccgcttgggccaaaccaacaaatacacaggcctactccggtgactatatggaacccgaaaagcctggcgcccctctgctgccccccccgccccagaacagcgtgccccattacgctgaagccgacatcgtgactctgcagggggtaacaggggggaacacctacgcagtacccgcccttccacccggggcggtcggggacggccctccacgggtcgatttccctcggtcacgcctgcgctttaaggaaaagttgggtgagggccagtttggcgaggtacacctttgtgaagtggacagccctcaagacctggtgtcgttagacttccccctcaatgtccgtaaaggacatcccctgctggtggccgtcaagatcctgcggcctgatgcaacaaaaaacgctcgcaatgattttctgaaagaagtaaagatcatgagcaggctcaaggatccaaatatcatacgactgcttggggtgtgtgtccaggacgacccgttgtgcatgattacggattacatggaaaacggcgacctgaatcaattcctgtccgcccatcaactcgaggacaaagcagctgagggtgctcctggcgatggtcaagctgctcagggacctacaatttcatacccgatgctgctgcatgttgctgcccagattgcctccgggatgcggtacctggctactttgaactttgtgcatagagatcttgcaacacgcaactgtctggttggcgagaattttacaatcaagattgctgactttggcatgtcaagaaacctctacgccggtgactactacagagtacaaggtcgagcagtgctgcccatccggtggatggcttgggaatgcatactgatgggcaaatttaccacggccagtgacgtctgggccttcggcgtgaccttgtgggaggtcctgatgttgtgccgggcccaacccttcggacaactcaccgacgaacaagtgatcgagaatgctggagaatttttccgggaccagggtcggcaagtctatttatccaggccccctgcatgccctcagggcctgtacgagttgatgctccggtgctggagtagagaaagcgagcaacgcccccccttcagtcagctgcacaggtttctcgcagaagacgctttgaatactgtttag

SEQ ID NO: 289030 - DNA, 2742 bp, Artificial Sequence
  derived and/or modified sequence
atgggcccagaagcactaagctccctgttgctgctcttactggtggcaagcggcgacgcagatatgaaaggccatttcgatcctgctaaatgccggtacgccctgggcatgcaggaccgtaccatcccagattcagacataagtgcctctagttcttggagtgactcaaccgctgcaaggcactcccgattggagtcctcagatggcgatggggcctggtgtccagcaggctcggtgttccccaaagaggaggagtatctccaggtcgatctccagcgacttcacctggtcgcattggttggtacccagggcaggcacgcaggcgggctgggaaaagagttctctcgaagttacaggctcaggtactcaagagatggacgccggtggatgggatggaaggataggtggggtcaggaggtgataagcggtaacgaggatcccgagggagtggtgctcaaggatctgggtccacccatggtggcacggctagtgcgattttaccctagagctgaccgcgtaatgtctgtgtgtctgagggttgaattgtacggctgcctttggagagatggtctcttgagttacacagcccctgtgggccaaacaatgtatctgagtgaggcagtgtacctgaacgattcaacatatgatggacataccgtgggggggctccagtacggcggactgggccagctggcagacggagtggtgggtctcgatgacttccgaaaatcacaggaattgcgggtgtggccaggctacgactatgtgggttggtctaatcatagtttctcttccggttacgtggaaatggaatttgagtttgacaggctccgagcctttcaagctatgcaggtgcattgtaacaacatgcacacactgggtgctaggctgccaggcggagtagagtgccgcttccgcagaggacccgcaatggcatgggagggagagcccatgcggcacaaccttggcggcaatctaggcgaccctagagccagggcggtctcagtccctctgggaggtagggtggcccgctttctgcagtgtaggtttctgttcgccgggccgtggcttctcttctccgaaatctcctttatctcagacgttgtcaacaatagtagtcccgctctcgggggaacgttcccccccgccccatggtggcctcctggaccaccccctactaatttttcttctctcgagctagaacccagaggacagcagccagtggcaaaggctgaggggtcacctactgcaattttaatcgggtgcctggtggctatcattctgctcctgctgcttatcatcgccctgatgctgtggaggcttcattggcggaggcttttaagcaaagccgaacgcagggtacttgaggaagagctgaccgtgcatttgtctgtgccaggagacacaatccttatcaacaacaggcctggcccaagggaaccaccaccatatcaggagcccagaccaagaggcaatccgccacattcagccccatgtgtcccaaatggttctgcccttctccttagtaatccagcttaccggttacttcttgctacatacgccaggcctccgcggggaccggggcctcctacccctgcatgggccaagccaacaaatacccaagcttactctggcgactatatggagccggagaagcctggagcccccctgctccctcccccaccgcaaaattcagtgccgcactacgctgaggcggatatcgtaacactgcaaggagtcacaggcggaaatacttatgccgttcccgctcttccccctggcgccgtgggcgacggcccgccgagagtggatttccccagatctcgcttgagatttaaggaaaaattaggagagggccaatttggagaggttcatctgtgcgaagtggattctcctcaagacttggtttccctggactttccactgaacgtaaggaagggccaccctcttctggtcgctgtaaagattctgagacccgatgccaccaagaatgcccgtaatgacttcctgaaggaagttaagattatgtctcgactgaaagacccaaacatcattaggttactgggagtctgtgttcaggatgaccctctgtgtatgatcactgactacatggaaaacggcgaccttaatcaattcctctccgctcaccagttagaagataaggcagccgagggcgccccaggagacggtcaggccgcccagggacccacaataagctaccccatgctcctgcacgtggccgcacagattgcttccggaatgcgatatctggccaccttgaacttcgtccacagagatctcgcaactagaaattgtctggtgggagagaactttaccatcaagattgctgatttcggtatgtcacggaacctgtacgcaggcgactattaccgcgtgcagggacgggccgtcctgccaatacgctggatggcatgggagtgcatactaatgggcaaatttaccactgccagtgatgtctgggcatttggagtgaccctgtgggaggtgctgatgctatgcagggcacaaccattcggacagctgacggatgagcaggtaattgaaaacgcaggcgaatttttccgcgaccaaggacgacaggtatatctttcccgaccccccgcctgcccccagggactctacgaactcatgcttagatgctggagccgagagagtgagcagaggcccccctttagtcaactccataggttcttggccgaggatgccctgaatacagtgtag

SEQ ID NO: 289031 - DNA, 2742 bp, Artificial Sequence
  derived and/or modified sequence
atgggtccagaggcattgagctcattattattacttctcctggtggcaagcggagacgccgatatgaaaggacattttgaccctgccaaatgccgctatgctctgggaatgcaggaccgcaccatccccgattcggatatctccgcaagctccagctggtctgactctaccgcggctcgacattctaggttggagtcctccgatggcgatggtgcatggtgtccggcaggctctgtctttcctaaagaagaggagtatctgcaagttgacctccaacgactgcatttagtagctctggtcggcacccagggtaggcacgccgggggtctcggaaaggaatttagccggtcttacagattaagatattcgcgtgatgggcgaaggtggatgggatggaaggaccgctggggccaggaagtgatcagtggaaacgaggacccagaaggagttgttctgaaagatctgggtccccccatggtcgcgcgtttagttcggttctaccctagggccgatcgagtcatgtcagtgtgtctgcgggttgagctatacgggtgtttatggcgagacggcctattgagctatactgcacccgtcggtcaaactatgtacctttctgaggccgtgtacctgaacgatagcacatatgatggccacacagtcggaggactgcaatacggagggctgggacaacttgcagacggagttgttggcctggatgattttcgaaaatcgcaggagctgagggtttggcccggctacgattatgttggatggtcaaatcatagcttttcatctggctacgtggagatggagttcgagttcgaccgccttcgtgcttttcaggcaatgcaggtgcattgcaataacatgcatactctcggtgctcgactccctggtggagtggagtgtcgcttcaggcggggccctgcaatggcgtgggaaggagaacctatgcgtcataaccttggcggcaacttaggagacccccgtgcgcgagctgtctctgtgcctctgggcggtagagtggcaagatttctgcagtgccgcttcctttttgcaggcccctggctgctcttctccgagatttctttcatctccgacgtggtgaataattcaagccctgccttgggcggaacctttccacctgccccctggtggccccccgggccaccccccaccaattttagtagcttggagctggagcccaggggtcagcagcctgtagccaaagccgaggggagtcctaccgctattttgatcgggtgtctggtcgcaattatattgttgctactgctaattatcgccctaatgctgtggcgattgcactggagacgactgttatccaaggcggaacggcgggtactggaggaagaactgactgtgcatttgtccgtgcctggcgatactatcttaatcaataacagaccaggccctcgggagccacccccttatcaggaaccccgtccgcgcggaaatccaccccactcagccccgtgcgtgcccaatggatcagccttgctcctgtctaatcccgcctacaggctcctgcttgcaacatatgcccgaccaccacgcggcccaggacctcctacccccgcgtgggcgaagccaactaatacgcaggcctatagcggggattacatggaacccgaaaagccaggtgcaccacttctgcctcccccccctcagaactccgtgcctcattatgctgaagcagacattgttactctccaaggcgttacaggtggcaacacgtacgcagtgcccgctctgccaccaggcgcagtaggagacggaccaccacgtgtagattttcctcgttccaggctgcggttcaaagagaagcttggggaagggcagtttggcgaggttcacctctgcgaagtagatagcccacaggacctggtctccttagacttccccctgaacgtaagaaaaggtcatccgctcctggtggctgtcaaaattcttcgcccggacgccaccaagaacgcacggaatgactttctgaaagaggtgaaaataatgagccgtctgaaagatcctaacattattcgacttctcggcgtgtgcgtgcaggatgaccccttgtgtatgataacagattatatggagaatggtgatctaaatcagttcctgtccgctcatcagctcgaagacaaggccgcagaaggtgctccaggagacggccaagccgcacaaggtccgaccatttcctatccgatgctgttgcatgttgctgcccaaattgctagcggtatgcgttacctagccactctgaacttcgtccacagagaccttgctaccagaaattgcctggtgggtgaaaatttcactataaaaatcgcggacttcggaatgtccagaaacctgtatgctggcgattactaccgtgtacagggacgcgctgtgctgccgattaggtggatggcttgggaatgcattctcatggggaagtttaccaccgcctcagatgtgtgggcatttggcgtgaccttatgggaggtgctgatgctgtgcagggcacagcccttcgggcagcttaccgatgagcaggtcattgagaatgcaggcgagtttttccgcgatcagggacgccaagtatacctcagccggcccccggcttgccctcagggattgtatgagctaatgctgcgatgctggagtcgcgagtccgaacaaagaccaccattctcacagctgcacagatttctagctgaggatgcactgaatacagtctag

SEQ ID NO: 289032 - DNA, 2742 bp, Artificial Sequence
  derived and/or modified sequence
atgggccctgaagccctgagttctcttctgttgttactcctcgtggccagcggcgacgctgatatgaaaggtcacttcgatcccgcaaaatgccgatatgcattggggatgcaggaccggactatccccgactccgatataagtgcatcaagctcctggagtgattccactgccgcacggcattcccgattggaaagtagcgacggtgatggcgcttggtgtcccgctggctctgtcttcccaaaagaagaggaatatctgcaagtggacctccagcgattgcacttagttgcgcttgtggggacacagggccgccacgccggagggctaggaaaagaattctcgagatcatatagacttcgatactcccgtgacggccggcgttggatgggttggaaagacagatgggggcaagaggtgatatcgggcaacgaagatcctgagggagtggtgctaaaggatctaggaccaccaatggtcgcaagactcgtgcgcttctatccgagagccgaccgtgtaatgtctgtttgcctccgagttgagctctacggatgcctttggcgagacgggctgctgtcttacacagctccagtcggacagacaatgtacttgtcagaagccgtgtatctcaacgattctacctacgatggccacacggttggaggactgcaatacgggggtctggggcaacttgctgacggagtggtaggcctggacgatttccgaaagtcccaggagttgagggtctggccaggctacgattatgtcgggtggtcaaaccacagtttcagtagcggatacgtcgaaatggaatttgagttcgatcgcttgcgcgcatttcaggcaatgcaggttcattgcaataatatgcacaccctgggggccagactgcctggaggggttgagtgcaggtttagacgaggcccagccatggcttgggaaggcgagcccatgaggcacaatctaggaggcaatctgggggaccccagagcaagggccgtgtcggtgcctttagggggccgggttgcccggtttctgcaatgcaggtttctgtttgctggaccttggctattattttcagaaatctccttcattagtgacgtcgttaacaattcttctcctgctttaggcggcacttttccccctgctccttggtggccccctggaccccctccaacaaattttagtagtctggaactcgagccccgcggccagcagcctgtggccaaggcggagggctctcctaccgctatcctcatcggctgtttagtggctattattctgctgttacttctgataatcgccctgatgctttggcgccttcattggcggcggcttttgagcaaggccgaaaggcgagtgttggaggaagagctcactgtccatttgtccgtgcctggtgatacgattttgatcaataacagaccaggcccccgggagccccccccgtaccaagaacctcgaccaaggggcaatccccctcatagcgccccctgtgtgcccaacgggagtgcgcttcttctgagtaatccggcctacaggctcttgctcgccacttacgctcggcctcctaggggccccgggccgcccactccagcctgggcgaagcccaccaatacacaagcttactcaggtgactacatggagcccgaaaagccaggtgcccctttattgcctccccctcctcagaatagtgtacctcactacgccgaagctgatatcgtgaccctccagggcgtcactggggggaacacgtatgccgttcccgcactccctcctggagccgtaggagatggaccacctcgggtcgactttccccgctcccggctgcgtttcaaagagaagttaggcgaagggcagtttggcgaagtgcacctctgtgaagtagatagcccccaagacctggtgtccctggattttccactcaacgttcggaaggggcaccctctgttggtggccgtgaagatcctgcgacccgatgcaacaaaaaatgcaagaaacgatttcttgaaagaagtgaagatcatgtctagactcaaggatcctaacattattagacttctgggcgtgtgtgttcaggatgacccactgtgcatgatcaccgactatatggagaacggcgatcttaatcagttcctttccgcccatcaactcgaagataaggcagccgagggggcgcccggggatggacaggccgctcaaggccccaccatttcataccccatgctgctccatgtggccgcccagatcgcctccggcatgcggtatctggccaccttaaacttcgttcacagggacctggctacacgcaattgcctcgtgggcgaaaacttcacaataaagatcgcagacttcggtatgtcacgaaacctatacgcgggtgactactacagggttcagggtcgagcagtgctgcccattcgatggatggcatgggagtgcattctgatggggaagtttaccacggcctccgacgtgtgggcctttggagttactctctgggaggtgctcatgttgtgtagagctcaaccatttgggcaacttactgacgaacaggtgatagagaatgctggcgaatttttcagggatcagggacgccaggtttacttgagccggccgcctgcgtgcccacagggtctgtatgagctcatgctccgttgttggtcgagagagagtgagcagagacctccatttagccagctgcataggttcttagccgaagacgccctgaacaccgtgtag

SEQ ID NO: 289033 - DNA, 2742 bp, Artificial Sequence
  derived and/or modified sequence
atgggtcccgaagcattgagctccctgctcttactcttgcttgtggcatctggagacgccgatatgaagggccatttcgatcccgccaagtgtcgctatgccctaggaatgcaagatcgaacaatccccgattcagatatctccgcctcgtcatcctggtccgattccaccgctgccagacactcccggctcgagtcaagtgacggcgatggcgcatggtgccctgcgggctcagttttccctaaggaggaagaatacttgcaagtggacctacaaagactacatctggttgctctcgtgggaactcagggacggcatgctgggggtctgggaaaggaattctcacgctcttacaggctgaggtacagtagagatggcagacgatggatgggctggaaagacaggtggggacaagaagtaatctctgggaatgaagatcctgaaggtgtggtgttaaaggacctggggccaccaatggttgctcgacttgtgagattttatccccgggctgaccgggtaatgagcgtttgtctcagagtggaactttatggatgcctctggcgcgacggccttctgtcttacactgcccccgtgggccagaccatgtatcttagtgaggccgtttacctgaatgattcaacttacgacggacacaccgttgggggactccagtatgggggactgggccagctggcagatggtgtcgtcggattagacgacttcaggaagagtcaggaacttcgagtttggcccggatatgactacgttggatggtcaaaccacagtttctcaagtggttacgtggaaatggaatttgagttcgatagactgcgcgcctttcaagccatgcaagtccactgcaacaatatgcacacactgggtgctcgcctgcccggaggagtcgaatgccgatttcgcaggggaccagccatggcttgggaaggcgagccaatgagacataacttagggggaaatctgggagaccctcgggcccgcgccgtgagtgtgccccttggcggaagagtagctcgtttcctacagtgtagatttctgttcgctggcccgtggttgctttttagcgaaatttctttcatctcggatgtggtgaacaacagtagccccgcacttggtggtacattcccccctgctccgtggtggcctccaggacctccacctactaattttagttcactagagcttgaaccacggggacaacaaccagtagccaaggctgagggctccccaacagccattctgatagggtgtctggtcgcaataatactgctcctgcttttgataatcgccttgatgctgtggcggctgcactggcggcgcctcctgagcaaagcagaaagacgcgtcctcgaggaggaacttaccgtgcaccttagtgttccaggagacacgattctgattaacaatagaccaggccctcgtgagcctcctccatatcaagaacctaggcccaggggcaatccacctcactccgcgccatgtgtgcccaacgggagtgctttgctattgtctaaccccgcctaccgccttttgctggccacctacgcacgacccccacgagggcctgggcctccaaccccggcttgggctaaaccaacaaacacccaggcttactccggcgactacatggaacccgagaaacccggcgcccccctactccccccacctcctcagaattctgtgcctcattatgctgaagccgatattgtcacactgcaaggcgtaacaggaggcaacacctacgcagtgcccgcactgccacccggcgcagtaggcgatgggcctccccgggttgactttcctcggtcaaggctaagattcaaagagaaactcggcgagggccaatttggggaagtgcatctctgcgaagtcgactcaccacaggacctcgtttccctcgactttcccttgaatgttagaaagggacacccattgctggttgcagtcaagatcctacggcccgacgcgacaaagaatgcccgtaacgattttttgaaggaggttaaaattatgtcaagattaaaggatcctaacattatcaggctactgggtgtgtgcgttcaggacgatcccctatgcatgatcacagattatatggaaaatggtgacctgaatcagtttttgtccgcccaccagcttgaggataaagcagcagagggcgccccaggagacggccaggccgcccagggcccaacgatttcataccctatgctcctgcacgtcgcagcccagatcgcttcagggatgagatacctggctactctcaacttcgtacaccgcgacctcgccactagaaattgtcttgttggtgaaaactttacaataaaaattgctgactttgggatgagtagaaacctgtatgccggcgattattaccgcgttcaaggtagagctgtgctgccgatcagatggatggcctgggagtgcattttgatgggaaagtttacaaccgcttcagacgtttgggccttcggggttacactgtgggaggtcttaatgttgtgtcgcgctcaacctttcggacagttgacagacgagcaagtcatcgagaacgctggtgaatttttcagagaccagggccgtcaggtctacttatcccgacccccagcttgtccacaaggcctgtatgagctcatgctgcgatgctggtcacgcgaatccgagcagcgcccccccttcagtcagttgcaccgatttctcgcagaggacgcactaaacacagtatag

SEQ ID NO: 289034 - DNA, 2742 bp, Artificial Sequence
  derived and/or modified sequence
atgggacccgaagccttaagctcccttctcttgctcctgttagtcgcttccggcgatgcggacatgaagggacacttcgaccccgctaaatgtagatacgcattgggtatgcaggatcgtactattccagattccgacatctccgccagtagtagttggtcagattcaaccgcagctcgacattcccgactcgaaagtagcgacggtgatggagcctggtgtcccgcaggaagtgttttccctaaggaagaagagtacctgcaggtggacctgcagagactccacctggtggcattagtgggaacacaggggagacatgcgggaggcttgggtaaagagttttctcgcagttatcggctgagatattccagggacggccggaggtggatgggatggaaggataggtggggtcaggaagttatttctgggaatgaagaccctgagggtgtggtgctcaaggatctggggcccccaatggtcgcgagacttgtaaggttttatcccagagccgatcgtgtaatgtcagtctgcctccgcgttgagctatatggttgcctttggcgagacggactgctatcttacactgcaccagttggccagacgatgtacttgagtgaggccgtctatttaaacgatagcacttatgacggacacacagtgggaggtctacagtatggtggtctggggcagttggcagacggcgtggtgggactggatgattttcgaaaaagtcaggaattgcgggtgtggcctgggtacgattacgtaggttggtctaaccactccttcagcagcggttacgtggaaatggaatttgagttcgatcgacttagagcctttcaggcgatgcaggtccattgtaacaatatgcatacgctgggagctcgcctgcctggaggcgtggagtgtagattcagaagaggccctgctatggcgtgggaaggcgaacccatgaggcataatctgggcggtaatctcggagacccccgggctagggcggtgagcgtgccccttggaggtcgtgtagctcgattcctgcaatgtcggttccttttcgccggaccatggcttttgttcagcgaaatctcgtttatcagcgacgtagtcaataattccagcccggcactcggcggcacattcccccctgctccctggtggcccccggggccaccaccgacaaacttttccagcctcgagctagagcctcgcggacaacagcccgtggccaaagctgagggttcaccaacagctatcctgattggctgtctagtggccataattctgctgctcctattaataatagccctgatgctgtggagacttcactggcgcaggctgctgtctaaagccgaacgaagggtgttggaagaggagctaactgtgcacctcagcgttcccggagatactatacttattaataatcgccccggccctcgcgagccaccaccataccaagagccccgaccaagaggaaacccccctcattctgctccatgcgtgccaaatggatccgcactcttattgtctaatcctgcttaccgcctgcttctggccacttacgctcgaccaccacggggacccggaccaccaactccagcttgggcaaagccaaccaacacacaggcatattccggagattatatggaaccggaaaagcccggcgcacctttgcttccacctccacctcagaactctgtcccacattacgccgaagccgatatcgtgactctgcagggagtgacgggaggcaatacctatgccgtgcctgccttgccacccggcgcagtcggagatgggccgccccgtgtggactttcccagaagtcgattgcgatttaaagagaagcttggagagggccaatttggagaggtacatctgtgtgaagtggattcaccccaggaccttgtaagcctggatttccctctgaatgtccgtaaggggcatccgttgctggtggccgtaaagattcttagaccggatgcaacaaagaacgcccgtaatgatttcctaaaagaagttaagattatgtcaagattaaaagatccaaatatcattcggctgctgggcgtgtgtgtccaggatgatccactgtgcatgattaccgattacatggaaaacggcgatctaaatcaatttctgtctgctcatcagctggaagacaaagccgccgagggggctcctggggatggccaggccgcacagggtcctaccatctcttatccaatgctcctgcatgtcgctgcacaaattgcctccggaatgcggtatctcgctacccttaacttcgtccatcgggacctggcgactcgtaattgtcttgtaggggagaatttcacgatcaaaatcgccgacttcggaatgtcccgaaatctgtatgccggcgactactatagagttcaaggtagagcagttctgcctatccgctggatggcgtgggaatgtatactcatgggaaaattcactacggccagtgatgtctgggcctttggagtgaccctgtgggaagtgctgatgttatgcagggctcaaccttttggacagctgaccgacgagcaagtgatcgagaatgccggagaattttttcgagaccagggacggcaggtgtacctctcaagaccccctgcgtgtcctcagggcctgtacgagctgatgctgaggtgttggtcccgtgaatcagagcagagaccccccttttcacaacttcatcgatttctagccgaggatgccttaaacaccgtgtag

SEQ ID NO: 289035 - DNA, 2742 bp, Artificial Sequence
  derived and/or modified sequence
atgggacccgaagccttgtcctccctcttactgcttctgctcgtcgcttccggcgatgcagacatgaaaggacattttgatcccgccaaatgcagatatgctctcggcatgcaggacagaacaatccccgacagcgacatttcagcttcaagcagctggagtgattcgacggcagcccgacatagcagattggaaagtagcgacggagatggtgcctggtgcccagctggctctgtgtttccgaaggaagaggagtatttacaggtagacctgcagagactgcaccttgtggccctcgtcgggactcagggaaggcacgccggagggctcggcaaagagttcagccggagctataggctgcgatattctcgcgatggaaggagatggatgggatggaaagatcgatggggacaggaagtgatctcaggaaatgaggaccctgaaggcgtagtactgaaagacctgggccctcctatggtggctcggctggtgaggttttatccccgtgccgatagagtcatgagtgtttgcttgcgggttgagctgtacggttgcttgtggcgggacggcctgttatcctatacagcgccagtcggccagaccatgtacttgagcgaagccgtctacttgaatgatagtacttatgacgggcacacagtaggcggcttacaatatggcggcctcggtcaactcgcggatggggtcgtcggacttgacgattttaggaaaagccaagagttacgcgtatggcctggctacgattacgtgggctggagtaaccattctttttcatccggatacgtcgaaatggaattcgaattcgacaggctgcgcgcatttcaggctatgcaggtccactgtaataatatgcacactctcggggccagactgcccggtggcgtagagtgtcgtttccgccgcggtcccgccatggcttgggaaggcgagcctatgagacataacctcggtggtaacctgggggatcccagagcaagagccgtctcagtacccctgggtggtagagtggccagatttctgcagtgccgtttcctttttgctggtccttggttgctcttctcagaaatttcatttataagcgatgtcgtcaacaactcctcaccagccctcggaggcacatttcctcccgcaccttggtggccccctggtcctcctcccaccaacttctcgagcctggagctagaacctcgcggtcagcaacccgtagcaaaagccgagggatcaccaacagccatcttgataggatgtctagtggccattattctcctcctgcttcttattattgcgctcatgctgtggcgacttcactggagaaggttattgagcaaagcagaacgtagggttcttgaggaggagctgacagttcatctctcagtgcctggcgacacaattttgatcaataatcgtcctgggccccgtgaaccaccaccatatcaagaacctcggcctcgcggaaaccctcctcactcagccccgtgcgtgccaaatggctccgccctgctgctgagtaatcccgcttatagactcctgttagcaacttacgcccggccacccagaggtccaggacccccaacacccgcttgggcaaagccaaccaatactcaagcgtattcaggcgattatatggagccagaaaagcccggtgcccccttacttccacccccaccacaaaacagcgtgccccactacgccgaagccgacatagttaccctccaaggagttactgggggcaacacatatgccgtgccagcactcccccccggcgctgtgggcgatggaccaccccgggtggactttccacggtcccggcttaggttcaaagaaaaattaggcgaagggcagtttggcgaagttcatttatgtgaagttgactctcctcaagatcttgtctctctggatttcccactaaacgtgcgaaaaggacaccccctactcgtagctgttaagatcctgaggcctgacgctaccaagaacgcccgcaacgactttctcaaagaggttaaaatcatgtccaggctgaaggatcccaatattatacggcttctcggggtttgcgtgcaggacgatcctctgtgtatgatcactgattatatggaaaacggcgaccttaaccagttcttgagcgcacatcagttagaagataaagcggcagaaggcgctcccggcgatggacaagccgctcaagggccaaccattagctatccaatgctcctacacgtggccgcgcaaatcgctagtggaatgagatacctcgccactctgaattttgtacaccgcgaccttgcaacacggaattgtttagtgggagagaattttaccatcaaaatcgcggactttgggatgtccagaaacctatacgccggcgactattatcgcgtgcagggtagagctgtgctccctatacggtggatggcttgggaatgcattctgatggggaaatttaccacagcctctgatgtctgggcattcggagtaaccttatgggaagtcctaatgctgtgtcgtgcccaacccttcggtcagctgacggacgaacaggttatagagaacgccggagagttctttcgggatcagggtcggcaggtgtatctgagcagaccgccggcatgccctcagggcttgtacgaattgatgctgcgatgctggtcacgcgagtcagaacaaagacctccatttagtcagcttcacagattcctcgccgaagacgccctgaacaccgtgtag

SEQ ID NO: 289036 - DNA, 2742 bp, Artificial Sequence
  derived and/or modified sequence
atggggcccgaggcactctcatctctcttacttctcctacttgtcgcgagtggcgatgctgatatgaaggggcattttgacccggccaagtgcaggtatgctctcggaatgcaggacagaaccataccagacagcgatatttccgcttcatcttcctggtcagacagtaccgctgcgaggcattccagactggaatcctcagatggcgatggggcatggtgcccagctggatccgttttcccaaaagaagaagaatacctccaggttgatctacaacgattgcacttggttgcgctcgtgggtactcaggggcgccatgccgggggattgggcaaggaattcagcagaagttatagattaagatactcccgtgacggtcgtaggtggatggggtggaaggatagatggggacaggaagtgataagtggtaacgaagacccagaaggtgtggttttgaaagacttaggtccgccgatggtggccaggctagtacgcttctacccacgggccgacagggttatgagcgtgtgcctccgtgtggaactttacgggtgcttgtggagggatggcctgttgtcttatactgcacccgtgggccagacgatgtatcttagcgaagccgtttatcttaacgatagtacttatgacggacatactgtggggggactgcagtacgggggcttgggccaactggcagacggcgttgtgggccttgatgactttaggaaaagtcaggagcttagagtttggcctggttacgattacgtggggtggtctaatcatagcttctcttcaggttacgtggaaatggagttcgaatttgaccggctgagagcttttcaggctatgcaagttcattgtaacaacatgcatacgctgggagccagactgccaggcggagtcgaatgtcgcttcaggagagggcccgccatggcctgggagggtgagcctatgagacataacctgggaggcaatctcggtgatccccgagcccgcgcagtgtcagttccccttggcggacgggtagcacggttcctccagtgtcgcttcctttttgccggcccctggctgctattctcagaaatttcgttcatatccgacgtcgttaacaatagttctcctgcattggggggtacattcccaccagctccatggtggccacctggtccaccaccgaccaatttttctagtctggagctcgaaccaagaggtcagcagcctgtcgcaaaagcagagggatctccaaccgccattcttattggatgcttagtggccataatcctcttgttattactcatcattgctctgatgctgtggcgcttgcactggcgtagactgttgtccaaagcagagaggcgcgtgttagaagaagagctgacagtccatctctcagtgccaggggacacaattctgattaacaatagacccggtcctcgggagccaccaccctaccaagagccaagaccccgcgggaatcctccccactctgccccttgtgtgcccaatgggtctgcactgctcttatctaatccggcgtaccgtctgctgctcgccacatacgctcgtccccctcgaggacccggtcctccgactcctgcttgggctaaacccaccaatactcaagcctactctggagactacatggaacctgaaaagcctggagctcccttgttgccgccccccccccaaaattcagtgccacactatgcagaagcagatatagtcacgctgcagggcgtcaccggcgggaatacttatgctgtgccagcgctccctcccggagcggtgggagacggcccgcccagagtagacttccccagatcaaggctgaggtttaaagagaaacttggcgaggggcagtttggtgaggttcatctttgtgaggtagactcaccccaggacttggtatctctggattttccgctcaacgtcagaaaagggcatccactactggtcgccgtgaaaatcttaagacctgatgctaccaaaaacgctcgaaacgactttctgaaagaagtgaagatcatgtcacggctaaaagacccaaacataatccgcctgttaggtgtctgtgtacaggatgatccactgtgcatgattacagactatatggaaaatggagatttgaatcagtttctgtcagctcatcaactcgaggataaggctgctgaaggcgctccgggtgacggacaggctgcccaaggccccactatttcatacccaatgcttctgcatgtggctgcccaaattgcctctgggatgcgatatctggcaactctgaacttcgtgcacagggatttggctacacgcaactgcctggtaggagaaaattttaccatcaagattgccgattttgggatgagtcgcaatctgtacgccggcgattactacagagtacagggtcgagctgttttgcctatcagatggatggcgtgggagtgtattctgatggggaaattcacaaccgcgtcagacgtctgggctttcggggtcacattgtgggaagttcttatgctatgcagggctcaaccctttgggcagctaacggacgagcaagtgattgagaatgcaggggaattttttcgagatcaagggcgtcaggtgtacctctctagacctccagcttgtcctcagggcctgtacgagttaatgctgagatgttggagtcgggaatccgaacaacggccgcctttcagtcaattgcatagatttctggccgaggacgcactgaataccgtttag

SEQ ID NO: 289037 - DNA, 2742 bp, Artificial Sequence
  derived and/or modified sequence
atgggccctgaagcattatctagcctgctgcttctccttctcgttgccagtggcgatgccgatatgaagggccactttgatccagcgaaatgtcgatacgctctgggcatgcaggacagaactattcctgatagtgatataagtgcatcatcgtcgtggagcgactctacagctgcccggcatagtcgcctcgaaagctcggacggggatggcgcttggtgccccgctggctctgtcttccccaaagaagaggagtatctgcaagtagacctccaaagactgcaccttgtggcattggtgggaacacaaggccgacatgcaggaggtttgggtaaggaattctcaaggtcttacaggctgagatatagcagagacggtaggcgttggatggggtggaaggatcggtgggggcaggaagttatctccggtaacgaggacccggagggggtggtgttgaaagatttgggcccaccgatggttgcacgattggtgaggttttaccctagagcagatcgagtcatgagtgtctgcttgcgcgtagaactgtacggatgcctgtggagggacggcctgctcagttacaccgcgcccgtagggcagactatgtacctgtctgaagccgtatatctgaacgattcaacctatgatggccacacggttggaggactccagtatgggggcctgggacaactcgcagacggggttgttggccttgatgactttaggaagagccaggaattaagggtctggcctggctatgactatgtgggatggtctaaccattcattcagctccggctatgtagagatggaattcgaatttgacagactgagagcctttcaggccatgcaagtccactgcaataacatgcatacgcttggtgcacgtcttccaggcggtgtggaatgtagatttagaaggggcccagccatggcctgggagggagaacccatgcgacacaatcttggcggcaacttaggcgatccacgggcaagagccgtttcagtgcccttgggtggacgggtggctagattcttgcagtgcagattcttattcgcaggaccttggttgctattctcagaaattagctttataagtgatgtcgtcaataattcaagcccagctcttggagggacattcccccctgcaccttggtggccaccagggcctccgcctactaacttcagttcactcgaattggaaccaagaggacagcagcctgtcgcaaaggctgaaggctcccccaccgccatcctgatcggctgcctggtcgccatcatcttactccttctcctcattattgccctcatgctgtggagactccattggagaaggctgctgagcaaagctgaaagaagagtactggaagaggaactcaccgtacacttatcagtcccaggggatacgatcctcatcaataaccgccccgggcctcgggaacccccaccttatcaagagcccaggccgcgaggaaaccccccccattctgcaccctgcgttcccaatggctcagccttgctcttgtctaaccccgcctatcgcttactcctggccacttacgcacggcccccacgaggacccggtcctccaactcccgcctgggccaaacctactaacactcaagcatatagcggtgattatatggaaccggagaaacctggcgcccccctcttgccgccacctccacaaaactcagtgccccactacgccgaagccgacatcgtcactctccaaggcgtcacaggtggtaacacatatgctgtgcccgcattaccgcctggtgctgtcggggacggaccgcctcgagtggactttcccaggagcagactacgattcaaagaaaagctaggtgaagggcagtttggagaagttcatctgtgcgaagtggacagcccacaagacctggtctcacttgatttcccactgaacgtgcgcaagggccacccattacttgtggccgtgaagatcctgaggcctgatgctacaaagaatgcgcgaaatgacttcctcaaagaggtgaagattatgtctagactcaaagacccaaatataatccgtcttctgggcgtgtgcgttcaagacgacccactctgcatgataaccgattatatggaaaacggcgatctgaatcagttcttatcagcccaccaactggaggataaagctgcagaaggtgcacccggtgatggccaggctgcccagggtccaacaatttcctatccgatgctactccatgtggccgcgcaaatagcttcaggaatgaggtatttggcaacactgaacttcgtccaccgagatctcgcaacccggaattgtctcgtaggagagaattttacaatcaagatcgctgacttcggaatgagtaggaatctatatgccggggactactatcgtgttcagggacgcgcggtgctgccaataaggtggatggcttgggagtgtatactcatggggaaatttacaaccgcttccgatgtttgggcatttggagttacattatgggaagtattgatgctctgccgcgcacagccattcggtcaactgacagacgaacaggtgattgagaatgccggcgaatttttcagagaccaaggcagacaggtttatctgagccgcccgcccgcctgcccccaggggttgtatgaactgatgctgagatgttggtctcgagagtctgagcaaagacctcccttctcccaactccaccgatttctggccgaagacgcactcaatacagtatag

SEQ ID NO: 289038 - DNA, 2742 bp, Artificial Sequence
  derived and/or modified sequence
atggggcccgaggcactatcttcactcttgctgttactgctcgtcgccagtggcgacgcggatatgaagggccatttcgacccagccaaatgcagatatgcccttggcatgcaagaccgcactatccctgactcggacatctctgcaagttcctcatggtctgactccacagcagctcgccactcaagacttgaatctagcgacggcgacggtgcctggtgcccagctggcagtgtattccccaaggaagaagagtatctccaggtggacttacagagactccatctagtggcgcttgttggtactcagggacgacacgcgggtggtctcggtaaggagttttcaagaagctacagactgaggtacagtagggacggaaggcgttggatgggatggaaggaccgttgggggcaggaagtcatttcaggcaacgaggatccggaaggcgtggttcttaaggatttaggaccccctatggtggctcgtttggtgaggttttatccgagagcggacagagtgatgagtgtgtgtcttagagtcgagttatatggctgtctgtggagagatggattactttcctatactgcccccgtggggcagaccatgtatctctctgaagctgtctatctcaacgattctacttatgacggccacacggtgggaggcctgcaatatggaggtttaggtcaattagcagatggggtggtaggattggatgactttcgaaagtcccaggaactgagggtttggccgggatatgactatgtcgggtggagtaaccactccttttcaagcggatacgtggaaatggaatttgagtttgaccggctgcgcgcattccaggcaatgcaggtacactgcaataacatgcatacactgggagcaaggctgcccggcggcgttgaatgtcggtttcgacgcggaccagcaatggcctgggaaggtgagcccatgcggcataatctcggcggcaacctgggcgacccacgggcacgcgcagtttcagtgccactggggggtagggtcgcacggtttcttcagtgtcgattcctctttgccggaccttggctgctcttctctgaaatctcctttatctcagatgtcgtcaacaactcgtcacctgctcttggcggaacattcccacctgcaccttggtggcctcccggaccacctcctactaatttttcaagtttggagttagaaccccgcggccagcaacctgtggcaaaagctgagggcagcccaactgcaatattgatcggctgcctggtcgccattatactgctactgcttctcatcattgctttgatgctgtggagactccattggagacgattactgagcaaggcggaacgaagagtgctcgaagaggaacttactgttcatttatctgtgcccggcgatactatactgattaacaacaggcccggccctcgggaaccacctccctaccaagaacctaggcctcgaggcaatcctccccacagcgccccctgcgtcccaaatggctccgctttacttttgtccaaccccgcgtatcggctcctcctggcaacgtacgctcggcccccccggggaccaggcccccccacacctgcctgggcaaaaccgaccaacacccaggcctattctggtgactatatggagcctgagaaacccggagcccctctactgccgccacccccccaaaattctgtgcctcattacgccgaagcggatattgtcacactgcagggagttaccggaggcaatacatacgctgtacccgcacttccccctggtgccgtcggagatgggccaccacgagtcgactttccccggtccaggttgcggttcaaagagaaattaggtgaggggcagttcggcgaggtacacctttgcgaagtcgatagtccacaggacctagtctcacttgatttccccctgaatgtcaggaaaggacatccattgctggttgccgtcaagatcctgcgccccgacgctactaaaaatgccaggaacgactttctgaaggaagtgaagataatgagcagattgaaggaccccaatattatcagacttctcggggtatgtgtgcaggatgatccattatgcatgatcactgattacatggagaacggagacctgaatcagttcttaagcgcacaccaactagaagataaagccgctgagggagccccgggagacggtcaggccgcacagggacccaccataagttaccccatgttgctgcatgtagctgcccagattgcctccggcatgcgctatctcgccacgctcaactttgtgcaccgtgaccttgcaacgcgtaactgccttgtgggcgaaaatttcacgatcaaaatcgctgactttggcatgtcaaggaatctctacgccggggactactatcgggtccaaggcagggctgtgttgccgataagatggatggcatgggagtgcattcttatggggaagttcacaactgcaagcgacgtgtgggcatttggcgtgacgttgtgggaggtgctcatgctgtgtcgtgcccaaccatttggacaacttacagacgaacaagtcatcgagaatgccggcgagttttttcgggatcagggcagacaggtttatctatccagaccaccagcttgtccccagggtctctacgagctaatgctgagatgttggtccagagaatccgaacagcgccctccctttagtcagttgcaccgatttctcgccgaagatgccctgaatactgtctag

SEQ ID NO: 289039 - DNA, 2742 bp, Artificial Sequence
  derived and/or modified sequence
atgggtcccgaagctctgagttctctattattactgctcttagtggctagtggcgacgcagacatgaaaggacacttcgatccagccaaatgtagatacgccctcggtatgcaggatcgaaccatccctgactccgatatatctgcttcctcaagctggtctgacagcaccgccgcgcgacacagccgactcgaatcctcagatggtgacggcgcctggtgccctgcagggagcgtgttccccaaagaggaagaatacttgcaagtggacttgcagagattgcatctcgtggctctggttggaacccagggcaggcacgcaggtggactcggaaaggagttttctcggtcgtatcggcttaggtattctagggacggcaggaggtggatgggatggaaggatagatggggtcaggaagtgatctcagggaatgaagatcccgagggagttgtactgaaagacttgggaccccccatggtcgcacgcttggtgaggttttaccccagggcggacagagtaatgtctgtatgtttgcgcgtggagttgtacggttgcctgtggcgcgatgggctactctcctacaccgcaccagttggacagactatgtatctgtccgaggccgtttaccttaacgacagcacctacgatggccacacagttgggggtctgcaatatggagggttgggccagttggccgatggcgtggtgggtctcgatgactttcgcaaatcccaggagctcagagtgtggcctggttacgattatgtgggttggagtaatcatagtttttcatctggatatgtggaaatggagttcgagtttgacagactgagggcgtttcaggcaatgcaggtgcattgtaacaacatgcatacactgggcgcccgactgcctgggggagttgaatgtcgatttcgccgaggaccagcgatggcttgggagggagagccaatgcggcataatctgggaggcaatttaggcgatccaagggctcgcgccgtgtctgtacccttgggtggaagagtcgccaggttccttcagtgcaggtttctgtttgcaggcccatggttattgttcagcgagatctcatttatctctgatgtggtcaataattcatctccagcacttggcggcaccttcccgcctgccccttggtggccccccggtcccccccctaccaacttctcatcactcgaactagaaccaagaggccaacaaccagttgctaaggccgaaggatctccaactgcaatcctcattgggtgccttgtcgcaataatcctcctgctgttgctcatcatcgctctaatgttgtggaggctgcactggcgacgactgctatcgaaagccgagaggagggtgcttgaggaagaattgacggtccatttgagcgtccctggggataccatcctcatcaataatcgccccggacccagagaaccccctccttatcaagaaccaagacctagaggaaacccacctcactccgctccttgcgtgccaaacggttctgcccttctgttgtccaaccccgcataccgtctcctactcgccacatatgcccggcctccacgcggccccggaccccccacccctgcctgggctaagccaactaatactcaagcgtattccggtgattatatggaaccagaaaaacccggcgccccgttactgcccccacctccacaaaacagcgtgcctcactatgccgaagctgacatcgtgacccttcagggcgtaaccggaggaaatacatatgccgtgccagccctgccacctggagcagtgggggatgggccaccaagggtggactttcctcggagcagattgcgattcaaggaaaagctaggggaagggcagtttggagaagtccatctgtgcgaggttgattccccacaggacttagtgtcacttgattttcctttaaatgtgcgtaagggccacccccttctagtggccgtgaagatcttgagacctgacgcaacaaagaatgcccggaacgatttcctaaaagaggtaaaaatcatgtcgagacttaaagatcccaacatcatccggcttctaggcgtttgtgtgcaggacgaccctctctgcatgattacggattatatggaaaatggagatttaaaccagtttctgtcggcacaccagttagaagataaagccgccgaaggggcgcccggtgacgggcaagcagcgcagggacccaccatctcttaccccatgctcctgcatgtagctgctcaaatagcatcaggaatgcgctacctggccacacttaatttcgtgcaccgtgacctcgccacaaggaactgcttagtgggggaaaactttacaataaaaatcgcagactttggtatgtcccgcaacctgtacgccggagactactatcgtgtccagggaagagccgttttaccaatccggtggatggcttgggaatgcatattgatgggtaaattcaccaccgcaagcgacgtgtgggcctttggtgtgaccctttgggaggtgctcatgttgtgtcgggcccagccatttggacagctgacagacgaacaggtgatcgagaacgccggcgaattctttcgagaccaggggagacaggtatatctaagccgccctccagcttgcccgcaaggcctgtacgaactcatgctgcgctgctggtctagagaatcagagcagagacccccgttcagccagctacacagatttctcgcagaagacgccttgaacacagtttag

SEQ ID NO: 289040 - DNA, 2742 bp, Artificial Sequence
  derived and/or modified sequence
atgggccccgaagctctatcctccctgcttctgttgctgttggttgcctctggagatgctgatatgaaaggccacttcgaccctgctaagtgcaggtacgcactgggtatgcaagacagaacgattcccgatagtgatataagcgcttcttcctcatggtccgacagcaccgcagcccggcattcacgcttagaaagttctgacggagatggcgcctggtgcccagctggaagcgtgtttccaaaggaggaagagtacttgcaggttgatttgcagagattgcaccttgttgcactggtcggaactcaagggagacacgccggcggcctgggcaaagaatttagcaggagttatcgcctgcgatactcccgggatgggcgtcgctggatgggttggaaagatcggtggggccaggaagtcatctctggaaatgaggaccctgagggagttgtgctaaaggacttaggaccaccaatggtagcaagattagtgagattttatcctcgggcagaccgcgtcatgtcagtctgcctgcgggtcgagctgtatggatgcctgtggagggacggccttctgagctacaccgcacccgtaggtcagactatgtacctttctgaagccgtgtacctaaacgattccacatatgacggtcacacagtcggcgggctgcagtacggaggacttgggcaattagccgatggcgtggttggccttgacgactttcgcaagagtcaggaactcagagtctggccaggctatgactatgtgggatggagtaatcattctttttctagcggatacgtggaaatggaattcgaattcgatcggctccgagcttttcaggctatgcaagtgcattgtaacaacatgcatacgctgggcgccaggctgcctggaggcgttgagtgccgattcaggagaggcccagccatggcatgggaaggagaaccgatgcgtcataacctgggaggcaatctgggcgacccccgggccagagcagtgtccgtgccactgggcggaagggtggctaggttccttcaatgtcggttcctttttgctggaccgtggttactgttctctgagatttcttttatcagtgatgtggttaataattcttcccccgccttaggaggcacattccccccagcaccctggtggcctcccggacccccccccacaaacttctcctctctggagcttgaaccacgcggtcagcaaccagtagcgaaagcagagggctcccctaccgctattctgattggctgccttgtggccatcatcctgctcctacttctgattatagccttaatgttgtggagattgcactggcgccgcctattatcaaaagctgagagaagagttctcgaggaggaattgacagttcacttatccgtgccaggagacaccatcctgatcaataacagaccaggccctcgcgaacctcccccataccaggagcctcggcctcgcggaaacccccctcattctgccccttgcgtccccaacggttccgctctccttctgtcaaaccctgcttaccgtctcttgcttgctacctatgcgcgacctcctcgaggcccaggaccccctacaccagcttgggccaaacccacaaatacacaggcctacagtggcgattacatggaaccagagaaacccggagcaccccttctccctccccctccccagaatagtgtcccccactacgctgaagctgatatcgtgactctgcaaggcgtcacgggtggaaacacctacgcagtgcccgctttgcctccaggcgccgtcggcgatggtccccctagagtggatttccccaggtccagattgcgctttaaggaaaagctcggggaagggcagttcggagaagtacatctgtgtgaagtagatagtccccaagacctcgtaagtctagacttccccctgaacgttagaaaaggccaccctctgttggtggccgtaaaaatactgcgccccgacgcgactaaaaatgccagaaacgactttctcaaagaggtaaaaatcatgtcacggctgaaggatcccaacattatccgtcttcttggcgtgtgtgtgcaagacgaccctctctgcatgattacggattacatggaaaacggcgacctgaatcaattcctgtccgcccatcaactcgaggacaaagcagctgagggtgctcctggcgatggtcaagctgctcagggacctacaatttcatacccgatgctgctgcatgttgctgcccagattgcctccgggatgcggtacctggctactttgaactttgtgcatagagatcttgcaacacgcaactgtctggttggcgagaattttacaatcaagattgctgactttggcatgtcaagaaacctctacgccggtgactactacagagtacaaggaagagctgtcttaccaattagatggatggcttgggagtgcatcttgatggggaaatttaccactgcttcagacgtttgggcttttggagtaactctgtgggaggtactaatgctatgcagggcacagccatttggccagctgactgacgagcaggtgattgagaacgctggggaattcttccgcgaccaggggaggcaagtgtatctgtctagaccgccggcttgtccacaggggctctatgaactgatgttacgttgctggagtcgggaatccgagcagcgaccccctttctctcagctccacagatttcttgccgaagacgcactgaacaccgtatag

SEQ ID NO: 289041 - DNA, 2742 bp, Artificial Sequence
  derived and/or modified sequence
atgggacccgaggctcttagctcattgcttcttcttctcctggtggcctcaggtgatgcagacatgaagggacactttgacccagccaaatgcaggtatgctttgggaatgcaggatcggaccattcctgattccgatatctccgcctcctcttcttggtcagactcaaccgctgccagacatagccgcctggaaagcagcgacggcgacggagcttggtgccctgctggctccgtgttcccgaaggaagaagagtacctgcaagtcgatcttcaacgcctccatctggtggctttggtggggacgcagggaagacacgctggtgggctcgggaaagagttctcacgctcgtatagattaagatatagtcgcgacggaagacgatggatgggctggaaggatcggtggggccaggaagtgataagtgggaatgaagacccagaaggtgttgtgctgaaggatttaggacccccgatggtggctcgactagtgaggttctacccccgcgcggatcgggtgatgtctgtgtgtttgagagtggaactgtatggatgtctctggcgtgacggacttctgtcttataccgctcccgtcggacagacaatgtatttaagcgaagccgtttatcttaacgacagcacttacgatggacatacagtcggcggtctccagtatggaggtcttggccagttagcagacggggtggttggattggacgatttccggaagagtcaggagcttagagtttggcccggctatgattatgtggggtggtctaaccattcctttagtagcggatacgttgagatggaatttgagtttgatcggctgagggcattccaagccatgcaggtgcactgtaacaacatgcataccctcggcgctaggctaccaggcggagtagaatgtaggttccgcaggggccccgccatggcatgggagggcgagccaatgaggcataacctagggggcaatctcggagaccccagagctcgggccgttagcgtgcctctgggtgggcgggtagcacgttttttacaatgcagattcctcttcgccgggccttggctgctgttttctgaaatctcttttatatctgacgtggttaataattccagtccagcattaggcggcacgtttccaccagcaccatggtggccaccgggacccccccccacaaatttctcttcgttagagcttgagccacgaggccaacagcccgtagccaaagctgaagggagtccgacagcaattctcataggctgcctggttgctatcatcttgctgctgctcttgattatcgctctcatgctgtggaggttgcactggaggagacttctctctaaggcagagaggcgggttctcgaagaagaattgactgtgcacctctccgtgcctggcgacactattcttatcaacaacagacctggaccacgcgaacctcccccatatcaagaacctcgtccgcgcggcaacccaccgcattctgccccttgcgtacccaacggttctgctcttctgttgtcaaaccccgcttatcgcttgttgctcgccacctacgcaagaccacctagaggacccggaccccccactcccgcttgggctaaacctaccaacacacaggcttattccggcgactatatggaacccgaaaagcccggagcacctctattgccgccccccccacagaattcggtcccacattatgcagaagccgatattgtcacactacagggggtcaccggtggcaatacctacgctgtgccagcattgccaccaggcgctgtgggagatggtccccctcgtgttgatttccccagatcaagactgagatttaaggaaaagttgggcgaaggtcagtttggcgaagtacacctatgtgaggttgactccccgcaggacttggtgagcctagattttcctctcaacgtcagaaaaggtcatccccttttggttgcagtcaaaattcttcgacctgatgccacaaaaaacgctcgcaacgactttctgaaggaagttaagatcatgtcacgcctgaaggacccaaacattattcgcctgctcggcgtctgtgtgcaggacgacccactatgcatgattaccgattatatggaaaatggtgatctgaaccaattcctgtccgcgcaccagctggaagacaaagccgccgaaggagcacctggcgatggtcaagcagcacaaggacctaccattagctaccccatgttactccacgttgccgcgcaaattgctagcggaatgagatatcttgccaccctgaacttcgttcaccgcgacctcgcaacccggaattgcctggtgggggaaaacttcaccatcaagatagccgatttcgggatgtcccggaacctgtatgcaggtgattactatcgtgtacagggaagagcagttctgccaatcaggtggatggcatgggaatgtattctgatggggaaatttaccactgcctctgatgtttgggcatttggagtgaccttatgggaggtgcttatgctgtgtagagcccaaccatttggccagctgaccgatgaacaagtaattgagaacgccggcgaatttttccgggaccaaggcagacaggtatatttaagcaggccacccgcctgtccccagggtctctatgaattaatgttaaggtgctggtcgagggagtccgagcagagacctccattctcgcaattgcatcgtttcttggccgaggacgctctcaatacagtttag

SEQ ID NO: 289042 - DNA, 2742 bp, Artificial Sequence
  derived and/or modified sequence
atgggtccagaagccttgtcgtcacttctgctcctgcttttagtggcgtccggagatgccgatatgaaaggacactttgatcctgccaagtgcagatatgccctgggaatgcaagacaggacaattcccgattccgacatctctgcctcctccagttggtcagatagcactgccgcaagacacagccggctcgagagttcggatggcgacggcgcttggtgtcccgccggttcagtctttcctaaggaagaagaatacctgcaagttgacctgcagcgcctgcatttggttgcactggtgggaacgcaaggacggcatgcagggggactcggaaaggagttttcacggtcatatagactacggtattcaagggatggccgccggtggatggggtggaaagaccggtggggccaagaagtaatctccggtaatgaggatcctgagggggtcgtcctgaaggatctcgggccacccatggtcgccaggctcgtcaggttctacccacgcgcagacagagtgatgagcgtatgccttagagtagagctgtacggatgtttatggcgcgacggactcctgagctataccgccccagtggggcagacaatgtacctgagcgaagccgtgtatctgaacgatagcacatatgatggacatactgtgggcggactacaatacgggggcctagggcaactggcagacggagtggtgggattagacgactttagaaaaagccaagaactaagagtctggcctggatatgactacgttgggtggtcaaatcatagcttcagcagcggctatgtcgaaatggagttcgaatttgacaggctacgcgcgtttcaagctatgcaagtacattgcaataacatgcacaccttgggcgcacggctacctgggggagtagaatgtcggtttcgccggggtcctgctatggcttgggagggagagccaatgcgacataacctgggcgggaatttaggggacccaagagcaagagccgtaagcgtaccccttggaggccgggttgctcgcttcctgcaatgccgcttccttttcgccggaccgtggcttctgttttccgaaatcagttttatctccgatgtagtgaataactctagtcctgcccttggtggtaccttcccgcccgccccctggtggccacccggtcctccccctacaaacttttctagcttagaattagagcccaggggacagcagccagtagccaaggcggagggatcccccactgcaatactcataggatgcttggtggcaataatcttgttgctgttactgattatcgccctcatgttatggaggctccactggcgaaggcttttatctaaggctgaacgtagagtactggaagaagaacttaccgtccacctttccgttcccggggatacaatcttgattaacaaccggccaggacccagagagccccccccctaccaggaaccaagaccacgaggtaaccccccacattcagccccatgcgttcccaatggatcagccttgctcctgtctaatcccgcctacaggctcctgcttgcaacatatgcccgaccaccacgcggcccaggacctcctacccccgcgtgggcgaagccaactaatacgcaggcctatagcggggattacatggaacccgaaaagccaggtgcaccacttctgcctcccccccctcagaactccgtgcctcattatgctgaagcagacattgttactctccaaggcgttacaggtggcaacacgtacgcagtgcccgctctgccaccaggcgcagtaggagacggaccaccaagggtagattttccccgatccaggttaaggtttaaggagaagctgggtgaaggccaatttggcgaagttcatttgtgtgaggtggacagcccccaggaccttgttagtctagacttcccactgaatgtgcgcaaagggcatccactccttgtagccgttaagatacttcgcccagacgctacgaagaacgcccggaacgactttctgaaggaggtgaagattatgagtcgactgaaggacccaaatatcattcgtttgcttggcgtttgcgtgcaggatgatcccctctgtatgataactgattacatggagaacggagaccttaaccagttcttatccgctcaccagctggaagacaaagctgctgagggtgcaccgggggacggacaggcggcacaaggccctactatttcttatccgatgttacttcatgtggcggcccagatcgcctccggtatgcgatacctggccactctgaatttcgtccaccgggacttagctacaaggaattgcctcgtgggagaaaatttcactataaaaatcgctgactttggcatgtccaggaacttatacgcaggagattactatcgtgttcaaggaagagcagttctgccgattagatggatggcctgggaatgtattctcatggggaaattcaccaccgcctctgacgtctgggcattcggagtgactctttgggaagtactaatgttgtgtagagcccagccattcggccagctgaccgatgaacaagtcatagagaatgctggagagttcttccgagaccaggggcgccaggtatatctcagtcgtcccccagcctgtccccagggtctttacgaacttatgctgcggtgttggagccgcgagagcgaacagagacctccgttttcccagctccaccgtttcctcgctgaagacgcactgaacactgtctag

SEQ ID NO: 289043 - DNA, 2742 bp, Artificial Sequence
  derived and/or modified sequence
atgggtcctgaagcgctctcgtccttacttctcctcttactggtggccagtggggacgctgatatgaagggccattttgatcctgcaaaatgcagatacgccctcggaatgcaagacagaactatcccagattctgacattagcgcctcaagctcttggagtgactccactgcggctaggcattccaggttagagtcgtctgatggagacggtgcttggtgtcctgcagggagcgtgtttcctaaagaagaggaataccttcaagtcgacctgcaacgcctgcatctggtagctttggtaggaacacaagggcgacacgccggcggcctaggcaaggaattctctagatcgtacaggctcagatatagtagggatggccggagatggatgggatggaaagatagatggggtcaggaggtgatcagcggcaatgaagatccagagggcgtggtgcttaaagatttgggtccccccatggtggcaagattggtcagattctatccccgagccgatagagtgatgagtgtttgtcttcgggtagaattgtatggctgtctgtggagagacggtttgttgtcctacaccgcccccgttgggcagaccatgtatctaagtgaggcagtgtatctgaacgattcaacttatgacggacacacggttggaggcctgcaatatgggggactaggtcagcttgctgatggagtggttgggttagatgattttaggaagtctcaagagctgcgcgtctggcctggctacgactatgtgggatggagcaatcactcattttctagtggctacgttgagatggagttcgagttcgacagattaagggcttttcaggctatgcaagtacattgtaacaatatgcatacactgggtgcccgtcttcccggcggtgttgagtgcaggtttagacgaggcccagccatggcttgggaaggcgagcccatgaggcacaatctaggaggcaatctgggggaccccagagcaagggccgtgtcggtgcctttagggggccgggttgcccggtttctgcaatgcaggtttctgtttgctggaccttggctattattttcagaaatctccttcattagtgacgtcgttaacaattcttctcctgctttaggcggcacttttccccctgctccttggtggccccctggaccccctccaacaaattttagtagtctggaactcgagcctcggggtcaacagccagttgcaaaggctgaggggtctcccactgctatcctaattggttgtcttgtggctattatccttttactgctgctgattatcgcacttatgctttggcgtctgcattggcgacgactgctctctaaggcagaacgaagggtcctggaagaagagctgactgttcatcttagcgtgcccggagatacgatccttataaataaccgccctggacctagagaacccccaccataccaggagccccgtccccgaggaaaccctcctcattctgcaccttgcgtgccaaacggatctgctttattactcagtaaccccgcctaccgattactcctcgctacatatgcgcgcccacccagaggccccggccccccgactcccgcttgggctaagcccaccaatactcaggcttatagtggtgattacatggagcctgaaaagccaggagcacctcttttaccacctcctcctcagaatagcgttcctcactacgccgaggctgatatcgtcactctgcaaggggttaccggtggcaatacctatgccgtgcctgcactccccccaggagccgttggcgatggcccaccccgcgtggacttcccaaggtctcgcctcagattcaaagaaaagttaggggagggccaatttggcgaggttcatctgtgtgaggtggacagcccccaagaccttgtctcgcttgatttccccctaaatgtgcgaaagggccatcccttactcgtggcagttaagattctaagaccggatgctacaaaaaatgccagaaatgattttctcaaagaagtaaagatcatgtcgagactcaaggaccctaatataatccgccttcttggggtttgcgtacaagacgatcctctgtgtatgataactgactatatggaaaacggggaccttaaccagttcctcagtgcgcatcagctcgaggataaagccgcagagggcgcgcccggcgacggacaggcggcccaaggtccaactatatcctaccccatgttactacacgtcgccgctcaaattgcatccgggatgcgctatttggccacattgaactttgtgcatcgggacctagctactcgcaattgcttagtgggtgagaactttactattaagatagctgattttggaatgtcccgcaatctctacgccggcgactattaccgagtgcagggtagagccgtgcttcctattcggtggatggcatgggaatgtatcctcatgggaaaatttactaccgcctctgatgtctgggcctttggcgtaactttgtgggaagttctgatgctgtgccgggctcagcccttcggacaactaacagacgaacaagtgatcgagaatgccggagaattcttccgagaccaaggtcgtcaggtttatttatccagaccacctgcctgcccccaaggcctgtacgaactaatgctgcgctgttggagtagggagtctgaacagcgaccccccttctcccagctacatcgatttcttgccgaggatgctctaaataccgtctag

SEQ ID NO: 289044 - DNA, 2742 bp, Artificial Sequence
  derived and/or modified sequence
atgggccccgaggccctgagcagcctgctgctgctgctgctggtggccagcggcgacgccgacatgaagggccacttcgaccccgccaagtgcagatacgccctgggcatgcaggacagaaccatccccgacagcgacatcagcgccagcagcagctggagcgacagcaccgccgccagacacagcagactggagagcagcgacggcgacggcgcctggtgccccgccggcagcgtgttccccaaggaggaggagtacctgcaggtggacctgcagagactgcacctggtggccctggtgggcacccagggcagacacgccggcggcctgggcaaggagttcagcagaagctacagactgagatacagcagagacggcagaagatggatgggctggaaggacagatggggccaggaggtgatcagcggcaacgaggaccccgagggcgtggtgctgaaggacctgggcccccccatggtggccagactggtgagattctaccccagagccgacagagtgatgagcgtgtgcctgagagtggagctgtacggctgcctgtggagagacggcctgctgagctacaccgcccccgtgggccagaccatgtacctgagcgaggccgtgtacctgaacgacagcacctacgacggccacaccgtgggcggcctgcagtacggcggcctgggccagctggccgacggcgtggtgggcctggacgacttcagaaagagccaggagctgagagtgtggcccggctacgactacgtgggctggagcaaccacagcttcagcagcggctacgtggagatggagttcgagttcgacagactgagagccttccaggccatgcaggtgcactgcaacaacatgcacaccctgggcgccagactgcccggcggcgtggagtgcagattcagaagaggccccgccatggcctgggagggcgagcccatgagacacaacctgggcggcaacctgggcgaccccagagccagagccgtgagcgtgcccctgggcggcagagtggccagattcctgcagtgcagattcctgttcgccggcccctggctgctgttcagcgagatcagcttcatcagcgacgtggtgaacaacagcagccccgccctgggcggcaccttcccccccgccccctggtggccccccggccccccccccaccaacttcagcagcctggagctggagcccagaggccagcagcccgtggccaaggccgagggcagccccaccgccatcctgatcggctgcctggtggccatcatcctgctgctgctgctgatcatcgccctgatgctgtggagactgcactggagaagactgctgagcaaggccgagagaagagtgctggaggaggagctgaccgtgcacctgagcgtgcccggcgacaccatcctgatcaacaacagacccggccccagagagccccccccctaccaggagcccagacccagaggcaaccccccccacagcgccccctgcgtgcccaacggcagcgccctgctgctgagcaaccccgcctacagactgctgctggccacctacgccagaccccccagaggccccggcccccccacccccgcctgggccaagcccaccaacacccaggcctacagcggcgactacatggagcccgagaagcccggcgcccccctgctgcccccccccccccagaacagcgtgccccactacgccgaggccgacatcgtgaccctgcagggcgtgaccggcggcaacacctacgccgtgcccgccctgccccccggcgccgtgggcgacggcccccccagagtggacttccccagaagcagactgagattcaaggagaagctgggcgagggccagttcggcgaggtgcacctgtgcgaggtggacagcccccaggacctggtgagcctggacttccccctgaacgtgagaaagggccaccccctgctggtggccgtgaagatcctgagacccgacgccaccaagaacgccagaaacgacttcctgaaggaggtgaagatcatgagcagactgaaggaccccaacatcatcagactgctgggcgtgtgcgtgcaggacgaccccctgtgcatgatcaccgactacatggagaacggcgacctgaaccagttcctgagcgcccaccagctggaggacaaggccgccgagggcgcccccggcgacggccaggccgcccagggccccaccatcagctaccccatgctgctgcacgtggccgcccagatcgccagcggcatgagatacctggccaccctgaacttcgtgcacagagacctggccaccagaaactgcctggtgggcgagaacttcaccatcaagatcgccgacttcggcatgagcagaaacctgtacgccggcgactactacagagtgcagggcagagccgtgctgcccatcagatggatggcctgggagtgcatcctgatgggcaagttcaccaccgccagcgacgtgtgggccttcggcgtgaccctgtgggaggtgctgatgctgtgcagagcccagcccttcggccagctgaccgacgagcaggtgatcgagaacgccggcgagttcttcagagaccagggcagacaggtgtacctgagcagaccccccgcctgcccccagggcctgtacgagctgatgctgagatgctggagcagagagagcgagcagagaccccccttcagccagctgcacagattcctggccgaggacgccctgaacaccgtgtag

SEQ ID NO: 289045 - DNA, 2742 bp, Artificial Sequence
  derived and/or modified sequence
atggggccggaagcactgtcatcgctcttgctcttgttgttagtggcctctggcgacgcggatatgaaaggacacttcgatcccgccaagtgtcgctacgccctcggaatgcaagatcggacaatcccggatagcgatatatcagcatcctcttcctggagtgatagcaccgctgcccggcactcccggttagaatcttcagacggcgacggggcgtggtgcccagccggttctgtgttccctaaagaggaggaatacctgcaggtggacttacaaagactgcatctggtggccttggtgggcacccagggacggcacgcagggggtcttgggaaggaattcagtcgttcttaccgtttgcgttattcaagggacggaagaagatggatgggatggaaagaccggtggggacaggaagtcataagtggcaacgaggaccctgaaggggtcgtgctcaaggacctaggccctcccatggttgcccggctggttaggttttacccacgggctgaccgggtgatgagcgtttgcctgagagtagaactgtacgggtgcttgtggcgggatggcttgctgagttataccgcacctgtggggcagactatgtatctgtctgaggctgtttatctgaatgattctacctacgacgggcacaccgtcgggggactgcagtacggggggctgggccaactggctgatggtgtcgtcgggctcgatgactttcgaaagagccaggaattgagagtgtggcccggctatgactacgtgggatggtccaaccacagcttttcctcaggttatgtcgagatggagtttgagtttgacaggttaagagcgttccaggcaatgcaggtgcattgcaataacatgcataccctgggcgctcgcctgccgggtggcgtggagtgtcgattcagacgagggccggccatggcctgggaaggggagcccatgcgccataacctcggaggtaatctgggagaccctagggcgcgtgccgtgagcgttccactgggaggtcgcgtcgcccgctttctgcagtgcagatttctcttcgccggcccttggctgctcttcagcgagatttcgtttataagcgatgtggtgaacaactcttcacccgcacttggcggcacattcccccccgccccctggtggccccccggcccacccccaaccaatttcagttcactggaactggagcctagagggcagcagccagtcgccaaggccgaggggtcacccaccgctatcctcataggttgcctagtcgccataatcctcctccttcttttgatcattgccctaatgctttggcggcttcattggagaagactgctttcgaaagccgagagaagggtgcttgaagaggaactgactgtgcatctctccgttcccggagacactatactcataaataatcgcccaggacctagagagcctccgccctaccaagaacctagaccccgcggcaacccccctcattccgccccttgcgtgcccaacggttcagctttactcctctctaatcctgcctatcgcctgctgctggctacctatgcgcggcccccacgtggcccgggtccgcccacccctgcgtgggctaagccaacaaacacccaggcctattccggcgattatatggaaccagaaaaacccggagcccctctcctgccgccccctccacagaattccgtccctcactacgccgaagccgacattgtgacactacagggagtcacaggcggcaatacttacgcagtaccagcccttcccccgggagcagtgggggatggcccccccagggtggattttcccaggtcaagattgcgcttcaaagagaagctgggagaggggcagtttggcgaagttcacctctgtgaagtcgatagtccgcaggacctggtgtctctagacttccctctcaatgtgcgcaaggggcatcctctgctggtggcggtgaaaatccttcgccccgatgccaccaagaacgcccggaacgacttcttgaaagaggtgaagatcatgtcccggctcaaggaccctaacataattcgactattaggagtatgcgtccaagacgatcccctgtgcatgatcactgactacatggaaaacggcgatctgaatcagttcctatcagcacaccagttggaagacaaggctgcggagggagctcctggtgatggccaggcagcacaaggcccaacaatttcttatcccatgctcctgcacgtggctgcccagatagcttcaggcatgaggtatctggccacactgaattttgtgcatcgggacttggctacacggaactgcctcgttggcgaaaacttcacgatcaaaatcgccgactttgggatgagtcggaatctgtatgccggagactactatcgcgtccaaggtagagctgtactccccattcggtggatggcttgggaatgcatactaatggggaagtttactaccgcttccgatgtgtgggccttcggggtcaccctctgggaggtacttatgctctgtagggctcagccgtttggacagctgactgatgagcaggtgattgaaaatgctggcgagttctttcgcgatcagggaagacaggtttacctgtcccgcccacctgcatgcccacagggcctgtacgagcttatgctccgctgctggtcccgcgagtccgagcagaggcctcctttcagtcagctgcacaggtttctggccgaggacgccctgaacacagtgtag

SEQ ID NO: 289046 - DNA, 2742 bp, Artificial Sequence
  derived and/or modified sequence
atgggacctgaggcactctcaagcctgctgctgttgttgctcgtggctagtggggacgctgatatgaagggccacttcgaccccgcgaagtgcaggtacgctctagggatgcaggaccgaaccatccctgactccgatatcagtgcttccagcagctggagcgactcgacggcggcccgccacagtcgcctagagagcagcgacggcgatggcgcctggtgccccgccggcagcgtgtttcccaaggaggaggagtatcttcaggtggacctgcagcggctgcacttggtggcgttggtgggcacacagggccgacacgccggtggattagggaaagagttctcgagatcttatcggctcaggtacagccgcgacggccggagatggatgggatggaaggaccgttggggtcaggaggttatctccgggaatgaggaccccgagggcgtcgtgttaaaggacttgggtcctccaatggtcgcgaggctagtcaggttttatccccgtgcagatcgggtaatgtccgtgtgcctgcgcgtcgaactctacggttgcttgtggcgagatgggctcttgagttacacagcacccgtcggtcagaccatgtatttaagcgaagcagtgtatctgaacgatagtacctatgacggccacacagtgggcgggctgcaatacggcggcctcggtcagcttgctgatggagtggtgggcctcgacgatttccgcaaatctcaggaactgcgagtgtggcccggttacgattacgtgggctggagcaatcatagtttttcatcgggatatgtcgaaatggagtttgagtttgatcgcttacgggcttttcaagctatgcaggtccattgcaacaatatgcataccctcggtgcaagattaccaggtggcgtcgagtgcagattcagaagaggccccgctatggcttgggagggggagccaatgaggcataatctgggcggaaacctgggggaccctagggctcgcgcagtatcggtccctctgggagggagagtagccaggtttctgcagtgccggtttctgtttgccggaccgtggctactgtttagcgagatctcttttatttcagatgttgttaataactcctcgccagcactcgggggcactttcccacccgccccttggtggccaccggggcccccccccactaatttttccagtctcgaactggagccacgtggccagcagcctgttgcgaaagctgaggggtcccctacggctatcttgattggctgtctggttgccattatcttgctgctgctgctgatcattgccctgatgttgtggagattacactggagaagactcttgtccaaggccgagcgccgcgtcttggaggaagaattaactgtccacctgtccgtgccaggggatactattcttatcaataatcggccaggacctcgcgaacctcctccgtaccaggagccacggccgagaggtaaccccccgcactccgctccatgtgtgccaaacgggagtgccctcctcctttctaacccggcctaccgcctactattagccacctacgcccgtcctcctagagggccagggcccccaactcccgcctgggccaagcccacaaatacgcaggcgtactccggggactacatggagcccgagaagcccggtgcaccattgctccctccacccccccagaactctgtgcctcattatgctgaggccgatatcgttacgctgcagggggtcacggggggaaacacttatgcagtacccgctctgccaccaggtgccgtcggagatggtccccctagggtggatttcccccggtctaggttgcggttcaaggagaagttgggggagggccaattcggggaggttcacctctgcgaggtggactctcctcaggatttggtaagcctggacttccccctgaatgtgcggaagggccaccctctactagtggccgtgaagatcctgagacctgacgccaccaaaaacgcccgaaacgatttccttaaggaagtgaaaatcatgtcacggcttaaggacccaaacatcattcgactgcttggcgtctgcgtccaggatgatccactgtgtatgataactgattatatggaaaacggtgacctcaaccagtttctgtccgcccaccaactggaagacaaggccgccgaaggagcccctggcgacgggcaggcagcacaaggacccacgatcagttaccccatgctgctgcacgttgcagcccagatcgcctcgggcatgaggtaccttgcaactctaaatttcgtgcacagagacttagccacgaggaattgtctggttggggagaactttacgatcaaaattgccgacttcggcatgtccagaaacctgtacgctggagactactaccgggttcaggggcgcgctgtgctcccaatccggtggatggcatgggaatgcatcctgatgggcaaattcactaccgccagcgatgtctgggcatttggggtgacactgtgggaggtactaatgctgtgtcgtgcacaaccgttcggccagttaacagatgaacaggtgattgaaaatgccggcgagttcttccgggaccagggtcgtcaggtttacttgagccgccctcccgcctgtccccagggactgtacgagcttatgctgagatgctggtctagagagagcgagcagagacctccattttcacagctgcacagatttctggcggaagacgcccttaataccgtatag

SEQ ID NO: 289047 - DNA, 2742 bp, Artificial Sequence
  derived and/or modified sequence
atgggaccagaggccctaagttcactgctccttctactactagtggcctcgggggacgctgacatgaagggtcatttcgatccggctaagtgtaggtatgcattaggcatgcaagaccgcactatccccgactctgatatcagcgcttcctcatcctggagcgatagtactgctgcaagacactccagactcgagagctccgacggtgatggtgcttggtgccccgcaggcagcgtgttcccgaaagaggaggagtaccttcaggtggacctccagcgtctgcacttggtggctctggtgggcactcaggggcggcatgccggaggtctgggcaaggaattttctcgatcgtataggcttcgatattcacgtgacggccgcagatggatgggatggaaggaccggtgggggcaggaagtaatttcagggaatgaggacccggaaggcgttgtgttgaaggaccttggcccccctatggtcgcacggctcgtgagattttatcctagggcggatcgggtgatgtccgtatgccttagggttgagctgtacggctgcttgtggcgagacggacttttgtcctacaccgctcccgtagggcagacaatgtatctgagcgaagccgtctacctcaacgactctacatacgacggccatactgttgggggcctacagtacgggggtctcggccaactcgcagacggggtggtggggttagacgacttccgcaaatcacaggagctgcgggtctggccgggatatgactacgtggggtggtcaaaccacagcttctcaagcgggtatgtggaaatggagttcgagtttgaccgcctcagggcattccaggcaatgcaggtgcactgcaacaacatgcatactctcggggctcgcctcccaggtggcgtagaatgtcgcttcagacgagggcccgcaatggcctgggagggagaaccaatgcgccataatctgggaggcaacctcggggacccgcgtgccagggcggtgtcagtccctcttggcggacgggttgctcgcttcctgcagtgccgcttcctattcgccggaccctggcttctcttttccgaaatttcctttatcagcgatgtggtgaataattcttcaccagcccttggcggtactttcccgccagctccctggtggccacctggacccccacctaccaacttcagcagcctggaactggaaccccggggacagcagcctgtcgccaaggcagagggcagccctacggctatactcatagggtgcctagtggccatcattcttctcctgctgctgatcattgccctgatgctttggagattacattggagaagactgctgtcaaaggctgaacgtagggtgctggaggaagagttgactgttcatctttcagtgcccggcgacaccattctcatcaacaaccgtccaggcccccgcgaaccgccaccataccaggagccaaggccacgaggtaacccaccacattcagccccatgcgtacccaatggcagcgctctcctgttgtcaaacccggcataccgcctcctcctggccacatacgcaaggcctccccgcgggcccggtcccccaacacccgcttgggctaagccaaccaacactcaggcctactccggtgattacatggagccagagaaacccggggcaccgctactgccaccccccccccagaattcagtgccccattatgctgaggccgatattgtcaccttacagggtgtgaccggcgggaatacctacgccgtacctgcccttccccctggggctgtgggcgacggacctccccgggtcgattttccacgctcccgtctgagatttaaagagaagctcggcgagggccagttcggagaggtacacctgtgcgaagtggattctccccaggacctggtttccctcgacttccccttgaatgttcggaaaggccatccgctgctggtggccgtgaaaattttgaggcccgacgcgacaaagaacgctcggaatgacttcctgaaggaggtgaagatcatgtctagattgaaagaccctaatatcatacggttgctgggggtgtgcgtccaggatgatccgctgtgtatgattacggactacatggagaatggtgacctgaatcagttcttgagcgctcaccagctggaagataaggcagctgagggtgcgccgggcgatggccaagccgctcaggggcctacaattagttaccccatgctcctccatgttgccgctcagattgcctctggcatgcgatatctggccacacttaactttgtccatcgcgatctcgctactaggaactgcctggtaggggagaactttacaattaagatcgcagactttggcatgtcccgcaatctctatgcaggggattattacagggtgcagggacgggccgtcctgcctattaggtggatggcttgggaatgtatattgatggggaagtttaccacggcgagcgacgtgtgggcatttggcgtaacgttatgggaagttctgatgctctgccgggctcagcccttcgggcagctgacagacgagcaagtaattgaaaatgcgggggagttcttccgtgatcagggaaggcaggtttacctttctcgccctcccgcttgtccgcaggggctttacgaactgatgcttaggtgctggtcccgagagtcagagcagcgcccacccttctcccagctccatcggtttctcgccgaagacgcgctgaacaccgtgtag

SEQ ID NO: 289048 - DNA, 2742 bp, Artificial Sequence
  derived and/or modified sequence
atgggtccagaggccctcagcagcctgctgctcctgttattggtcgcatctggtgatgccgatatgaaaggccacttcgacccagcaaaatgccgctacgcactgggcatgcaggataggactatccctgactccgacatctcagcttcctcctcctggtcggactcaacagccgcccgccactcccgccttgaatcgtcggatggagacggcgcctggtgccccgctggtagtgtgtttccgaaggaggaagaatacctccaagtggatctgcagcgcctgcacttggtcgctcttgtcgggactcagggccggcatgccggaggacttgggaaggagttctctaggagctatcgccttcgctacagccgggacggaagaaggtggatggggtggaaggatcgctggggtcaggaagttatctctgggaacgaggatcctgagggtgttgtcctgaaagacctagggccacctatggtggccaggcttgtaagattctaccctagagctgacagagttatgtcagtatgcctgcgcgtggaattgtatgggtgcctctggcgggacggattactttcctacacagccccagtggggcaaacaatgtacctgagcgaggcagtgtatctcaacgactccacatatgatggccataccgtgggcgggctgcaatacggggggctcggccagctggccgatggcgtagtgggacttgacgatttccgaaagtcccaagagctgagggtgtggccaggttacgattacgtgggatggagtaatcattcgttctccagcggatatgtagagatggagtttgagtttgaccggctaagggctttccaggccatgcaggtacactgtaataacatgcataccctcggtgcacgtcttccgggcggggtggaatgcagattcaggagaggtccagcaatggcgtgggagggcgaacccatgcgtcataatctgggcgggaatctcggcgatccaagggctagggctgtgagcgttcccttaggcggacgcgttgcccggtttttacagtgcagattcctgtttgcaggcccctggctgctatttagcgagatcagctttatttcagatgtggtgaacaactcatcaccggcgctgggtggcacgtttcctcctgcaccttggtggccgcccggtcctccgcccacgaacttttcaagtctagagctggaacccaggggccagcagccggtggctaaagctgaaggcagcccgactgccatcctgattggttgcctagtggcaataatactcttgctactccttatcatagccctgatgctgtggaggctgcactggcgcaggttactgtcaaaggcggagcgcagagtgctggaggaagagttgactgttcatctgtctgtgccaggcgacaccatcctgataaataatcggcccggtcccagggagcctccgccttatcaggaaccacgcccaagaggcaaccctccacacagcgctccctgcgtgcctaatggatcagctctcctgttgtcaaacccagcttacaggttgctgctagccacttacgctcgaccccccagagggcccggcccccccacacccgcctgggctaagcccaccaatactcaggcctatagcggagactacatggaacccgagaagcccggggcccctttgctgccacctccgcctcagaattccgtgcctcactatgccgaggctgatatcgtgaccctgcagggggtcaccggtggaaacacctacgcagtgccagctcttcctccaggcgcagttggagacggccctcctcgggtggattttccacgttctcggctgcgatttaaggagaaactaggcgaaggccagttcggggaggtccacctctgtgaggttgactccccacaggatcttgtgtccctcgacttcccgctgaacgttcggaagggacatccccttctcgtggctgtaaaaatcctaagacctgacgcaacaaagaacgcccggaatgacttcctgaaggaagtgaagattatgtcacgattgaaggatcctaacataatacgcctgctgggcgtttgcgttcaagatgatccactatgcatgattactgactacatggagaacggagatctgaaccaattcttatcggcgcatcagcttgaggacaaggccgcagaaggcgccccaggcgatggccaggccgcccaggggcccacaatctcttaccccatgctactccatgtggccgcgcagatagcttctggtatgcggtaccttgccacactcaatttcgttcacagggacctagcaacacggaactgcctcgtaggagaaaacttcacaatcaaaattgccgatttcggtatgagcaggaacctttacgcaggcgactactaccgggttcaggggagagcggtcttgcccattaggtggatggcttgggagtgtatccttatgggcaaattcacaactgccagcgacgtttgggcattcggcgttaccctttgggaagtgctgatgctttgccgggcccagccgttcggacaactcactgacgagcaagtaattgagaacgcaggagaattttttcgggatcagggccgccaggtctatctgtctcggccccccgcgtgcccacagggcctgtacgagctgatgctccggtgttggtctagggagtctgaacagcgaccccccttttcccagcttcaccgctttctcgctgaggacgcactcaataccgtctag

SEQ ID NO: 289049 - DNA, 2742 bp, Artificial Sequence
  derived and/or modified sequence
atgggccccgaggccctcagctctcttctgctgctgctgctggtcgcttctggagatgccgacatgaaaggacattttgaccctgcaaaatgcaggtatgccttggggatgcaggaccgcactattccagactctgatatcagcgcctcctcctcctggtctgattcaacagccgcacggcacagtcgcctggagtcttccgatggagacggcgcttggtgccccgcaggcagcgtgtttccaaaagaggaggaatatctccaggtggatttgcaacggctgcacctcgtggctctggttggcacccagggacggcatgctggggggctgggcaaggagttcagcaggagttacagactaaggtattctcgcgatggccggaggtggatgggctggaaggacaggtggggccaggaggttatctccgggaacgaagatcccgagggggtggttctgaaggatctgggtccccctatggtggcaagactggtgcgattttaccctcgcgcggacagggtgatgagcgtgtgcctgcgggtcgaactgtacggatgtctctggagggatggattattaagctataccgcccccgttgggcagacgatgtacctctctgaagccgtgtacctcaacgacagtacttatgacggccatactgtgggtggcctgcagtacggaggactgggacagttagcagatggcgtcgtggggctagatgattttaggaagtcccaggagctccgcgtttggccagggtacgattatgtcggctggagcaatcattcatttagctccgggtacgtggaaatggagtttgagttcgaccgcctgcgggcattccaggccatgcaagtgcactgtaataacatgcacacactaggcgcccgcctcccagggggagtggagtgcagattcagaagggggcccgctatggcgtgggagggtgaaccaatgcgacataacctcggtggaaatctcggagaccccagagccagggctgtgtcggtccccctgggtggaagggtggcacgtttcttacagtgtcgctttctgtttgccgggccttggttactgttcagtgagataagctttatcagtgatgttgttaacaattcctccccagcacttggaggcacgtttccgccagccccttggtggccccccggtcctccacccactaattttagttcactggaactggagcctcgtggccagcaacctgttgccaaagccgaaggttccccaacggccatactcatcggttgtttggtggcaattattttgcttctgctgctcattatcgcactgatgttgtggagacttcactggagacgcctccttagcaaagctgaacgacgggtactggaggaagagctgacagttcacctgtcagtgcccggcgatactatcttgataaacaaccggcctggcccgagagagcctccgccatatcaggagccacgcccccgggggaacccacctcattcagctccttgtgtgccgaatggaagcgcattacttctctcgaaccccgcctatcggctgctccttgccacgtatgcgcggccacctaggggccccggtccaccaacacccgcttgggcaaagccaacaaacacccaggcatacagtggcgattatatggaacctgagaagccgggcgccccacttctaccacctccgccgcaaaacagcgtgccccattatgccgaagccgacatagtgactttacaaggtgtcacaggtggaaatacttacgcagtgcccgcattgcctccaggcgctgtgggcgacgggccgccaagggtggactttccaaggagcaggctgcggttcaaggagaagctgggcgaaggccagttcggagaggtccatctgtgcgaagttgattctccacaggacctggtgtccttagacttcccactcaatgttagaaagggccacccccttctcgtagccgttaaaattctgcgcccggacgccacaaaaaatgccagaaatgatttcttgaaagaagtgaagattatgagccgactcaaggaccccaatataattagactgctgggggtgtgtgttcaggatgaccctctctgcatgattactgactatatggagaatggtgatctaaatcaatttctgtctgcgcatcagcttgaagataaagcggcagagggcgcacccggagatggacaggccgcccaaggtcccacaatctcctatccaatgttgctgcatgtagccgcccagatagcctcggggatgcggtaccttgccactctgaacttcgttcatcgggatctcgcaacccgaaattgcttggtaggggagaactttacaattaagatagctgatttcgggatgtccagaaatctctacgctggcgattactaccgggtgcagggaagggcggtactccccatcaggtggatggcttgggagtgcatcctgatgggcaagttcactacagcctcagatgtgtgggcttttggtgtgactctctgggaggtcctgatgctgtgtagagctcaacctttcggccagctgactgacgagcaagtgattgaaaatgccggagagttctttcgcgatcagggacggcaagtgtacttatctaggccgccagcatgtcctcaaggtctgtatgagctgatgcttagatgctggagccgcgaatctgaacaacgcccacctttctcccagctccaccgctttctcgccgaagatgcgcttaataccgtttag

SEQ ID NO: 289050 - DNA, 2742 bp, Artificial Sequence
  derived and/or modified sequence
atgggccccgaggctctctcttccctacttctgttacttcttgtagcttctggtgatgccgacatgaaaggccacttcgacccagctaagtgcaggtatgccctgggtatgcaggatagaacaatccccgatagcgatatctccgcttcgagcagttggtccgattcgaccgccgctaggcactctcggcttgaatcctccgatggcgacggagcttggtgtccagccggaagcgtctttccaaaggaggaggaatacctgcaggtcgatctacagcgcctgcacctagttgcactcgttggtacacagggacgccacgctggcggtctgggcaaagagttttcacgctcctacaggcttaggtattcccgagacggcaggcgttggatgggctggaaggatagatgggggcaagaggtcatctctggtaacgaagacccagagggcgtggtgcttaaggacctaggtccaccaatggttgcacgtctcgtgagattctatccccgtgccgaccgagtgatgagcgtctgtcttagggtggagctttacgggtgcctgtggcgggatggtttgctctcatacactgcccccgtcggccaaaccatgtacctgagcgaagctgtttacctgaatgacagcacttacgatggacacaccgtggggggcctgcagtacggtggactcggccaactcgcagacggcgtggtggggctggatgattttcgaaagtcgcaagaactcagagtttggcctgggtatgactatgtaggatggtccaaccactcattttcatctggttatgtggaaatggagttcgaatttgatcggctcagagcattccaggctatgcaggtgcattgcaataacatgcataccttgggtgcccgactgccaggcggtgtggagtgccgctttagacggggtcctgctatggcgtgggaaggtgaacccatgcggcataatttggggggaaacctgggagatcctcgggcgcgcgctgtcagcgtgcctctgggggggagagtggctcgctttctgcagtgccggtttctgtttgcaggcccatggttgctgttctccgagatcagcttcatctccgatgtggttaataacagttctccggccctggggggaacatttccccccgctccatggtggccaccaggccctccgccgactaacttttcatcccttgagcttgagcctcgcggccagcagccagtggctaaagccgaagggtcccctacagcaatattgatcggctgcctggtggctattatcctccttctgctgttgattattgccctgatgttatggagactgcactggcgcaggttactcagtaaggccgaaagaagggtgttagaggaggagctgacagtgcatctatccgtaccaggggatacaatactcattaacaaccggcctggtccacgggagccaccaccttaccaggaaccaaggcccagaggcaacccaccacacagcgctccctgcgtgcctaatgggtctgccttgctgctcagcaatcccgcttacaggctgctgctggcaacttatgctcggcctccacgggggccagggccacccactcccgcctgggcaaaacctactaacacacaggcttatagcggagactatatggaacctgagaagccaggcgccccactgctgccacctccaccccagaactccgtgcctcactatgctgaggcggacatagtcacactccagggcgtgactggcggaaatacatacgccgtgccagcacttccaccaggcgcggtgggtgacggccccccccgagtcgactttccaagaagccggttacggtttaaggaaaaattgggggaggggcagttcggagaggtgcacctttgcgaagtcgattctccccaggatctggtgagcttggacttccctttgaatgtgcgcaaaggccatcccctgcttgtggccgttaagattcttcgaccggatgccacgaaaaatgcccggaacgatttccttaaggaggttaagattatgtcaaggctgaaagatcccaacattatcagactgctaggagtctgcgttcaagacgaccccctgtgcatgatcaccgattacatggaaaacggagatttgaatcagtttctgagcgcccatcagctggaggataaagcagctgagggagcaccaggcgacgggcaagcagcccaggggcccaccataagttaccccatgctcctccatgttgcagcccagatcgcgagcggaatgagatatcttgcaacccttaacttcgtccacagggacctggctacccgcaattgtttagtcggtgagaactttaccataaagattgcggattttggaatgtcgaggaacctctacgcgggagactactaccgtgtgcagggcagagccgtgctacccattaggtggatggcatgggagtgtattctgatggggaagttcaccacagcctcagatgtgtgggcttttggggtcactctatgggaggtgttgatgttatgccgcgcccagcccttcggccagctgaccgatgagcaggtaatagaaaacgccggggagttctttagagaccaggggagacaggtatatctgtcccgtccaccagcttgtcctcagggcctctacgaattaatgcttaggtgctggtcacgggaaagcgagcagcgtcccccattttcgcaactccacagatttttagccgaggacgcattgaatacagtttag

SEQ ID NO: 289051 - DNA, 2742 bp, Artificial Sequence
  derived and/or modified sequence
atgggcccagaggccctatcctccttactgcttctcctgctggtggcttccggtgacgcagacatgaaggggcatttcgacccagccaaatgccggtacgctctggggatgcaggatagaaccatccccgactcagatatatccgcaagcagttcctggagtgacagcactgcagctcgccactctcgcctagagtccagcgatggggacggcgcgtggtgccccgcaggctctgtgtttcccaaggaggaggagtatctgcaggtcgacctacagcgtctgcacctggtcgctctggtgggaactcagggaagacacgccgggggtttggggaaagagttcagccgatcctaccggcttcggtatagccgcgacggacgacggtggatgggctggaaagacaggtggggccaggaagtgatcagtggcaacgaggatcccgagggggtggtgctcaaagatctaggcccaccaatggtcgcgcgtctggtgaggttttaccctcgggccgaccgtgtgatgagcgtgtgccttcgtgtcgaactgtacggctgtttatggcgagacggcctgctgagttacacagctcccgtgggccaaaccatgtacctttccgaagctgtatatctgaacgatagcacctacgatggacacacagtaggtgggcttcaatatggcggcctagggcagctggcagatggtgtcgtcggccttgacgattttaggaagagtcaggaactaagggtttggcctgggtacgactacgtcggatggagcaatcattcatttagctccggctatgtggaaatggagttcgagttcgataggctcagagcttttcaggcaatgcaggtacactgcaacaacatgcatactctcggtgctaggctgcctgggggtgtggagtgccggtttcgtaggggccccgccatggcgtgggagggggagcccatgcggcataatctgggaggaaacctcggtgatccaagggcgcgagctgtatcagtgcctctgggaggacgcgtggcacgcttcctgcagtgcaggtttctctttgcagggccttggctgctcttctctgaaatatcctttatctctgatgtcgttaacaattcctcccccgccttgggcggcacctttccccccgcaccttggtggcccccgggccctccccctactaatttcagcagccttgaactggaaccccgggggcaacagcccgtcgctaaggccgaaggatccccaactgctatcttaatcggttgtctggtggccattatcctactgctcctgctgattatcgcactgatgctctggcggctgcactggcgtcggctcctttcaaaagctgagaggagagtgttagaggaggaactgacggttcacctgagcgtacccggcgacaccatactgatcaacaacagacctgggcctcgagaacctcccccctaccaggagccacgacccaggggaaatccaccgcactccgcaccctgtgttccaaatgggtccgccttgctgttaagtaatcctgcgtatcggttgttgttagcgacctatgccaggccacctcgtgggccggggccacccacccctgcttgggcgaagcctaccaatacccaggcttactcgggagactatatggagcccgagaagccaggtgctcccctgttgccacccccacctcaaaatagcgtgccgcactacgcagaagccgatattgtcactctgcaaggagttaccggaggcaatacctacgctgtacccgccttgcccccgggcgcggtgggcgatggtccccctcgggtggatttccctcgaagtaggctgcgttttaaagaaaagctgggtgagggacaatttggcgaagtgcacttgtgcgaagtcgattctccccaagatctcgtgtctttagactttccactgaacgtaagaaagggacaccccctcctcgtggccgtcaagattctgcgcccagacgccacgaagaacgctcgcaatgacttccttaaagaagttaagatcatgagccgcctcaaggatcccaatattattaggctcttgggtgtctgtgtccaggacgaccctctgtgtatgatcaccgactacatggaaaatggggacctgaatcagtttctctctgcacaccagctggaagacaaggcagctgaaggggcaccaggagacggccaggccgcccaagggccaacgattagctaccctatgttgctacacgtggccgcccaaattgcgtctggaatgcgttatctggcgacactgaatttcgtccatcgggacttggccacaaggaattgtctggtgggggagaattttacgatcaagattgcggatttcggaatgagccgcaatctatatgcaggagactactacagggtgcaggggagggccgttctacctatccgctggatggcatgggaatgtatcctaatgggcaagttcaccacggcatccgacgtgtgggctttcggtgtgactctatgggaagtgctgatgctgtgcagagcacaacccttcgggcaattgacagacgagcaggtgatcgaaaatgccggagaattcttccgtgaccagggcaggcaggtgtatttgtctagacctcctgcatgtccacagggcttgtatgagctgatgcttcgttgctggagccgggagtcagaacagcgccctcccttctctcagttgcaccgtttcctagccgaagacgccctgaataccgtgtag

SEQ ID NO: 289052 - DNA, 2742 bp, Artificial Sequence
  derived and/or modified sequence
atggggcctgaggctctatccagtcttcttctcctgttgctcgtggcctccggagatgccgacatgaaaggccactttgacccagccaagtgccggtatgcgctgggaatgcaggataggactattcccgatagcgacatctccgccagctccagttggtctgacagcactgcagccaggcactcgagactggaatcatcagatggggacggagcatggtgtccagccggatccgtgttcccgaaggaggaagagtacctgcaggtggacttacagcggctccacctggtcgcattagttggtacccaaggccgccacgcggggggccttggcaaagagttttcccgtagctaccgtctgaggtacagccgggatgggcggaggtggatgggttggaaagatcgttggggccaagaggtcatttcaggtaacgaagatcctgaaggagtggtgctaaaagatttagggcctccaatggtcgccaggttagtccgcttttaccccagagccgaccgcgtgatgagcgtgtgcctgcgggtggaactgtacgggtgtctgtggcgcgacggactgctgtcatacaccgcacccgtcggtcagacaatgtacctgtccgaagcagtgtatcttaatgactcgacgtatgatggccacacggttggtggtctacaatatggcggcctgggccagctggcggatggagtagttgggcttgatgatttcaggaagtcacaggaactgagagtgtggcccggctatgactatgtgggatggtctaaccattccttcagctctgggtatgttgaaatggagtttgaatttgatcgcctgcgtgccttccaagcaatgcaagtccactgtaacaatatgcacaccctcggagctagattgcccggtggagtcgagtgtagattcagaagaggccccgctatggcctgggaaggagaaccgatgcgccacaacttaggcggaaacttgggggatccccgggcaagggccgtgtcagtcccacttggggggagggtggcccgcttcctacaatgcaggttcctatttgccgggccctggctcctttttagcgaaatatccttcatctctgatgtggtgaacaacagcagcccagccttgggggggacgtttccccctgctccctggtggccaccggggcctcccccaactaatttctcatctctggagctggaaccccggggtcagcagcctgtggccaaggccgagggatcccccaccgccattctgattggttgcctagtggccatcatccttcttttgctgttgatcatagctctgatgctctggagactgcactggaggagactactcagtaaagccgagcgcagagtgttggaggaagagctgaccgtccacctgagtgtgccaggagatactatcctgatcaataatcgccccgggccgcgcgagccccccccctatcaagaacctcgccccagagggaacccaccccattccgccccctgcgttcctaatggcagtgccctgttactgtccaatccagcataccgcctcctcctcgctacctacgctaggcccccacgcggaccggggccacctactcctgcctgggccaaacctaccaatacccaggcatactccggagattatatggagcccgaaaaacccggagcccctcttttacctccacccccacagaattccgtaccacactacgcagaggcagacatcgttaccttgcagggggtgaccggcggaaatacctacgctgtccctgccctgcctcctggtgcagtaggcgacgggccccccagagtggactttcccaggagccggttgaggtttaaggagaaactgggagaaggtcagttcggcgaggtgcacctgtgcgaggtggactccccccaagatctggtctccctagactttcccttgaacgtccggaaaggacatcctctcctcgtggcagtcaagatccttcgacccgacgctacaaagaatgcacgcaacgacttcctcaaggaagtgaagataatgtcacggctcaaagaccctaatatcatcaggcttttgggagtttgtgtccaggatgatccactctgtatgatcacagattacatggagaacggagatttgaatcagtttctttctgctcaccagctggaggacaaagcagcagaaggtgcacctggagacggtcaggctgcccagggtcccacaatatcttatcccatgctcctgcacgtggccgcacagatcgcttccggtatgcggtatctcgccaccctgaattttgtgcatagggacctggcgactcggaattgtctggtcggcgagaacttcaccataaagatagctgatttcggcatgtcccgaaatctgtacgccggcgactactacagggtgcagggcagggctgtgttgcctattaggtggatggcctgggaatgcattttgatggggaaatttaccacagccagcgatgtgtgggccttcggggttacactgtgggaggtgcttatgctgtgtcgggcccaaccattcggccagctcactgacgagcaagtgattgaaaacgccggtgagttcttcagggaccaaggacggcaggtgtacctttcccggccccctgcttgcccgcaggggctatacgagcttatgctgaggtgttggagtagagagagcgagcagcgccctccattcagtcagctgcacagatttctcgcggaagatgccttaaataccgtgtag

SEQ ID NO: 289053 - DNA, 2742 bp, Artificial Sequence
  derived and/or modified sequence
atgggccccgaggcgctgtccagcctgcttcttctgctcctggtcgcatcaggagatgcagacatgaaaggtcactttgatcccgctaagtgccgttatgcccttgggatgcaagataggacaattcccgactcagacataagcgcctcaagcagttggtctgactccaccgccgctcggcactcccggctcgagagcagcgacggtgatggcgcgtggtgccccgccggctctgttttcccaaaggaagaggagtatctccaggtagacctgcagcgtctgcatctcgtggcgttggtcggcacacagggaaggcatgctggaggcttaggcaaagaattctcccggtcatacaggctaagatattctagggatggtagacgctggatggggtggaaagaccgttggggtcaagaggtcatctctgggaatgaggacccagaaggtgtggtcttgaaagatctcggtccccccatggtggctcggcttgtgcgcttttacccccgcgctgacagggtaatgtccgtctgcctcagggtcgaactgtacggctgtctttggagggacgggttactgagttataccgccccagttggccagaccatgtacttatctgaggcagtgtacttaaatgatagcacttatgacggacacacagttggcggtttgcaatacggaggcctgggccaactggcagacggggtggtgggactggacgactttaggaagagccaggagcttagggtgtggccagggtacgactacgtggggtggagcaaccactccttttccagtggctacgtggagatggagtttgagttcgaccgcctgcgtgccttccaggccatgcaggtccattgtaataatatgcacacactgggagccaggctgcccggcggcgtggaatgtagattccgaagaggtcccgctatggcctgggagggagaaccaatgcgccacaatctcgggggcaacctgggggacccccgtgcccgagccgtcagtgtgccgctgggcggaagggtggcaaggttcctgcagtgcaggttcctatttgccggcccttggctcctgttctccgagatctcattcatttcagacgttgtgaacaattcctcacccgccctgggcggcacatttcccccagcaccatggtggcctcctgggcctccacctactaatttttcctctctggagttggagcccagaggccagcagcccgtggccaaagcagaagggagcccgactgcgattctcattgggtgtcttgttgcaatcattctcctgcttctcttaatcattgccctgatgctctggcggctccactggaggcgccttttgtccaaggctgagcgcagggtgttggaggaggaattgaccgtccatcttagcgttcctggcgataccatcttgattaacaatcgacccgggcctagagaacctcctccatatcaggaaccacgcccccgcggcaacccgccacatagtgctccctgtgtgcccaatggatctgccctcctgctgtcaaatccggcctacaggcttctgttggcaacttatgcaagaccccccagaggtcccggcccgccaactccagcttgggccaagcccacaaatacacaggcatatagtggagactacatggaaccagaaaaaccaggcgcccctttactccctccaccgccccaaaattccgttccccattacgccgaggccgacatagtgacgttgcaaggcgtaacaggtggcaatacctacgctgtgccagctctgcccccaggagccgtgggcgatgggcccccacgggtggactttcctaggtcccgactcagatttaaggaaaagctgggggaaggccagttcggggaagtgcacttgtgcgaagtggattccccccaggacctcgtgtctctggacttccccctgaacgtgcgcaaaggacaccccctgttggtcgccgtaaaaatcctgcggccggacgcaacaaagaacgcacggaacgattttctcaaggaggttaagataatgtcccggttaaaggaccccaatattatcaggttactgggcgtctgtgtccaggatgaccctctctgtatgattacagactatatggagaacggcgacctgaaccagttcctcagtgcacaccagctggaagataaggctgccgaaggtgcccctggggatggccaggcagcacaggggcccaccatctcctaccctatgttgcttcatgtcgcagcacagatagcttctggtatgcgctacctggcaacccttaatttcgtacacagggacctggctactcggaactgcctggtgggagagaatttcaccattaaaattgctgatttcggtatgagtcgcaatctatacgccggagattattatagggtgcagggtcgggccgtcctgcccattcgttggatggcatgggagtgtatcctcatgggcaagtttactacggcctcagatgtctgggccttcggggtaactttgtgggaagtgcttatgctctgtagagcccagccctttggtcagctgaccgacgaacaggtgattgaaaacgccggcgagttctttcgtgaccaggggcggcaagtttatttgtcaaggccccccgcttgccctcaaggcttgtacgaattgatgcttcgctgttggagccgcgaatctgagcagcgacctcccttttctcagctgcatcgttttctggctgaggacgctctcaatacggtatag

SEQ ID NO: 289054 - DNA, 2742 bp, Artificial Sequence
  derived and/or modified sequence
atgggacctgaagcactctcctctctcttgttattactcctggtggcatctggggacgccgacatgaaaggccattttgatcccgccaaatgccgttacgccctcgggatgcaggatagaactatccctgattcagatatctcagcctccagctcctggtccgacagtacggcagctcggcatagcaggctggagtcttcagatggcgacggggcgtggtgcccagctgggtctgtgtttcctaaagaggaagaatacttacaggtggatttacaaagactgcatctcgtggcgcttgtggggactcagggcaggcacgctggcgggctagggaaggagttctcacgaagttatcgtctcagatacagccgcgacggcagaaggtggatgggctggaaggatcgctggggccaagaggtgatttccggaaatgaggacccggaaggcgtggtgctcaaggatcttgggcccccaatggtcgcaagattggtgcgcttttatcccagagccgatagagttatgtcagtctgccttagagtcgagctgtacggctgtctctggcgcgacggcctgttatcatataccgccccggtgggccagactatgtacctgagcgaagctgtttacctgaacgattctacctacgatggacatacagtggggggactacagtacggcggactgggccagctggccgacggggtcgtgggtttggacgattttcgtaagtctcaagagctgcgggtgtggcccgggtacgattacgtgggttggtctaatcattcttttagcagcggttatgttgagatggagttcgagttcgatcgcttacgggcgttccaggctatgcaagtgcactgcaacaatatgcacacattgggtgctaggcttcccggcggagtggagtgcaggtttcggaggggacccgccatggcctgggagggagagcctatgcgccacaatctgggtggaaacctgggcgatcccagagcaagggcggtgtctgtgcctctgggtggaagggtggctcggttcctccagtgccgttttctgttcgcagggccttggttactcttctccgaaatctccttcattagcgatgtcgtcaacaactcaagccccgctcttggagggacatttccacccgcaccctggtggccccccggacctcccccaacaaatttctcatcactcgagctcgagcccaggggccagcagcccgtggcaaaggccgaaggcagccccacggcaattctcattgggtgtctggtggctatcatcctccttctgctgttgatcatcgctctgatgctgtggcgactccactggaggagattgctgtccaaggcggagagaagggtactagaggaggaacttaccgtgcatctttccgtgccaggcgacactatactgatcaataaccgccccggaccacgggagcctcctccctatcaggagccacgacctcgcgggaatccacctcactctgctccttgcgttccaaatggctctgcccttctgttgagcaatcctgcctacaggcttctgctcgccacatacgctaggcctccccgtgggcctggcccccctacacccgcctgggcaaagccaaccaacactcaggcttattctggcgactacatggagcctgagaaacccggggcaccactgctcccaccacctccccagaatagcgtgcctcattacgccgaggcagacatcgtgaccctgcaaggagtcacgggagggaatacatatgcggtcccagccttaccccctggtgcggtcggcgacggtccacctcgagtcgattttcccagatctcgtctcagatttaaggaaaagctgggagagggacagttcggcgaagttcacttgtgcgaagtggacagccctcaggacttggtgtcccttgacttcccacttaacgtcagaaaagggcacccactcctggtcgcagttaaaatcctgcggccggacgccaccaaaaacgcccgaaacgatttcctgaaggaagtcaagataatgtccaggcttaaagatcccaatatcattaggcttctgggcgtatgcgtgcaggatgatccactgtgcatgatcactgactacatggaaaatggcgatctaaatcaatttctgtcagcacatcagctggaggacaaagccgccgaaggtgcacccggcgacgggcaggccgctcaagggcccacgatcagctaccctatgttgcttcatgtagctgcgcagatcgcctcgggaatgaggtacctggctactctaaactttgttcatagagacttagcaactcggaactgcctcgtgggcgaaaactttacaatcaagattgcggactttggcatgtctagaaacttatacgccggcgattactatcgagtacagggtcgtgccgtgctgccaataagatggatggcatgggaatgtattttgatggggaagtttacaactgcctccgacgtgtgggcttttggcgtgactctatgggaggtactgatgctctgtagagcccagccctttggacagctcactgacgagcaggtgatcgagaacgcaggggagttcttccgagaccagggccggcaagtgtatttaagtaggccacccgcctgccctcagggactgtacgaactgatgctgagatgctggagcagagaatccgaacagcgcccacccttcagtcagcttcaccgctttctggccgaagacgctctgaacactgtgtag

SEQ ID NO: 289055 - DNA, 2742 bp, Artificial Sequence
  derived and/or modified sequence
atgggaccggaggccttatcatcactccttttgctgttattagtggcctcaggagatgccgatatgaaaggtcactttgatccagccaaatgccggtacgcgctgggcatgcaagaccggaccatcccagatagtgacatctccgctagttctagctggagcgatagtaccgccgcacggcactcccggctggaatctagtgacggagacggagcctggtgtcctgccggcagtgtattcccgaaggaggaagaatacctgcaggttgacctccagagactgcatctggttgctctggtcggaacacagggcagacatgccggcgggctgggcaaggagtttagtcgcagttataggctcaggtacagcagagacggtcgcagatggatgggatggaaagatcgctggggacaggaggtaatatccggaaacgaggaccctgagggagtggtcctgaaggacttgggcccccccatggtggccagactggtcaggttttacccacgggctgatagggtgatgagcgtgtgcctgcgtgtggagctgtacggttgtctatggcgcgatggactgctatcctacactgccccagtggggcagacaatgtaccttagtgaggctgtctatctgaatgatagtacatatgatggtcataccgtgggcgggttgcaatatggcggtttgggacagctggctgatggcgtagttggcctggacgactttagaaagagccaggagttgagagtgtggcctggatacgattacgtgggctggagcaatcacagtttctcatcgggttatgtcgagatggagtttgagtttgacagacttagagcttttcaggccatgcaggtgcattgtaataacatgcataccctaggggcccggctgcccggaggtgtcgagtgcagattccgtcgcggccccgcaatggcttgggaaggcgagcctatgcggcataaccttggcggcaacctcggagatcctcgggcccgcgctgtgagcgtacctctcggggggagagttgcaagattcctgcaatgccgattcctgttcgctggtccctggctactcttcagcgagatctcattcatatccgacgtagtaaataattcctctcccgcactcggaggcactttcccaccagctccctggtggcctcccggcccacctcccacgaacttcagcagcttagaacttgagccacgggggcagcagccagttgccaaagccgagggaagtccgaccgcaatcttgatcgggtgcctggtggccatcattctgctactgcttctcatcattgccctgatgctgtggagacttcattggagaaggctgctcagcaaagccgaacgccgggtgcttgaggaagaattgactgttcacctgtcagttcccggggatactatcttaattaataaccgccccggccccagggagccgcctccgtatcaggaacccagacccaggggtaaccccccacattctgccccatgcgtgccaaatgggtcagctcttctattgagcaatccggcatacagattgcttctggccacatacgcccgtcctcccagaggcccagggcctcctacccccgcatgggccaaacccaccaatacccaggcctactccggcgactatatggagccagagaaaccaggcgcccccctgcttccaccccctccacagaatagcgtgcctcattacgccgaagccgacattgtaactctgcagggggttactggtgggaatacctatgcagtccctgcgctccccccgggtgcagtcggtgacgggcctcctcgcgtcgactttccccgtagtcgactgcgctttaaagaaaagttgggggaaggacagttcggcgaagtgcatctgtgcgaggtcgacagcccacaagatctggtttccctagacttcccgcttaatgtgcggaagggtcatcccctgctggttgcagtgaaaatcctccgaccggacgcgaccaagaacgcccgaaatgacttcctgaaagaggtcaaaataatgtctcgtctgaaagacccgaatataattcgtctgttgggagtgtgcgtgcaagacgaccccttgtgcatgataaccgactatatggaaaacggggacttgaaccagtttctgagcgcccaccagctggaggataaagccgccgaaggcgcccctggtgacggccaggccgcacaggggccaaccatctcttaccccatgctgctccacgtagctgcccagatcgcctccggtatgaggtatctggcgacactgaactttgttcaccgagatctggccacccggaattgtcttgtcggcgaaaatttcaccatcaaaattgccgactttgggatgtctcggaatctgtacgctggagactactaccgggtgcaaggccgagctgtgctaccaatcaggtggatggcgtgggagtgcatactcatggggaagtttactactgctagcgatgtgtgggcattcggagtgactctgtgggaggtcctcatgctctgccgggcccagcctttcgggcagctcacggatgagcaagttatagaaaacgcaggagagttctttagggatcaggggcgtcaggtttacctctctaggcctccagcctgcccacagggcctgtatgagctgatgctgagatgctggagtcgagagtccgaacaacgccctccttttagtcagctgcacaggtttctggcagaagatgccctgaacaccgtgtag

SEQ ID NO: 289056 - DNA, 2742 bp, Artificial Sequence
  derived and/or modified sequence
atgggccctgaggccctgagcagcctgctgctgctgctgctggtggccagcggagatgctgacatgaagggccactttgatcctgccaagtgccgctatgccctgggcatgcaggacaggaccatcccagacagcgacatcagcgccagcagctcctggagcgacagcacagctgcccggcacagccggctggagagcagtgatggagatggagcctggtgcccagctggcagcgtcttccccaaggaggaggagtacctgcaggtggacctgcagaggctgcacctggtggccctggtgggcacccagggcagacatgctgggggcctgggcaaggagttcagccgcagctaccgcctgcgctacagcagagatggaagacgctggatgggctggaaggaccgctggggccaggaggtgatctctggaaatgaagatcctgagggcgtggtgctgaaggacctgggcccccccatggtggcccggctggtgcgcttctaccccagggctgacagagtgatgtctgtgtgcctgcgggtggagctgtatggctgcctgtggagagatggcctgctgagctacacagcccctgtgggccagaccatgtacctgtctgaggccgtgtacctgaatgacagcacctatgatggccacacagtgggcggcctgcagtatggaggcctgggccagctggctgatggagtggtgggcctggatgacttcaggaagagccaggagctgcgggtgtggccaggctatgactatgtgggctggagcaaccacagcttcagcagcggctacgtggagatggagtttgaatttgaccggctgcgggccttccaggccatgcaggtgcactgcaacaacatgcacaccctgggcgcccggctgcccggcggcgtggagtgccgcttccggcggggccctgccatggcctgggagggggagcccatgaggcacaacctgggcggcaacctgggggacccccgggcccgggctgtgtctgtgcccctgggcggccgggtggcccgcttcctgcagtgccgcttcctgtttgctggcccctggctgctcttcagcgagatctccttcatcagtgatgtggtgaacaacagcagccctgccctgggcggcaccttccccccagccccctggtggcccccaggccccccacccaccaacttcagcagcctggagctggagccccggggccagcagcctgtggccaaggccgagggcagccccacagccatcctgattggctgcctggtggccatcatcctgctgctgctgctgatcatcgccctgatgctgtggaggctgcactggaggcggctgctgagcaaggccgagcggcgggtgctggaggaggagctgactgtgcacctgtctgtgcctggggacaccatcctgatcaacaaccggcccggcccccgggagcccccaccctaccaggagccccggccccggggcaaccccccccacagcgccccctgtgtgcccaacggcagcgccctgctgctgagcaacccagcctaccgcctgctgctggccacctacgcccggcccccccggggccctggcccccccaccccagcctgggccaagcccaccaacacccaggcctacagcggggactacatggagcctgagaagccaggggcccccctgctgcccccaccaccccagaacagcgtgccccactacgccgaggccgacatcgtgaccctgcagggcgtgactggaggcaacacctatgctgtgcctgccctgcccccaggagctgtgggagatggccccccccgggtggacttccccaggagccggctgcgcttcaaggagaagctgggggagggccagtttggagaggtgcacctgtgtgaggtggacagcccccaggacctggtgtccctggacttccccctgaatgtgaggaagggccaccccctgctggtggccgtgaagatcctgcggccagatgccaccaagaatgccagaaatgacttcctgaaggaggtgaagatcatgagccggctgaaggaccccaacatcatccggctgctgggcgtgtgtgtgcaggatgaccccctgtgcatgatcacagactacatggagaatggagacctgaaccagttcctgagcgcccaccagctggaggacaaggctgctgagggcgcccctggagatggccaggccgcccagggccccaccatctcctaccccatgctgctgcacgtggccgcccagatcgccagcggcatgagatacctggccaccctgaactttgtgcaccgggacctggccaccaggaactgcctggtgggggagaacttcaccatcaagattgctgactttggcatgagcaggaacctgtatgctggggactactacagagtgcagggccgggctgtgctgcccatccgctggatggcctgggagtgcatcctgatgggcaagttcaccacagccagtgatgtgtgggcctttggagtgaccctgtgggaggtgctgatgctgtgccgggcccagcccttcggccagctgacagatgagcaggtgattgaaaatgctggggagttcttccgggaccagggccggcaggtgtacctgagccggcccccagcctgcccccagggcctgtatgagctgatgctgcgctgctggagccgggagagcgagcagaggcctcccttcagccagctgcaccgcttcctggctgaagatgccctgaacacagtgtag

SEQ ID NO: 289057 - DNA, 2742 bp, Artificial Sequence
  derived and/or modified sequence
atgggccccgaggccctgagcagcctgctgctgctgctgctggtggcatctggagacgccgatatgaagggtcactttgatccagccaaatgccggtacgcgctcggcatgcaagataggactatcccggattccgatatcagcgccagcagcagctggagcgatagtacagccgcccggcacagtcgtttggagtccagcgatggagatggagcctggtgccctgcagggagcgtatttcctaaggaagaggagtatctgcaggttgatctgcagcggctccaccttgtagcactggtgggaacccagggtcgacatgccgggggattagggaaagagttcagtagaagttacagattaagatacagtagggatggaaggagatggatgggctggaaggaccgttgggggcaggaggttatttctggtaatgaagatcctgagggagttgtccttaaggatcttggaccacccatggtcgccagactggtgcgtttttaccctagagctgaccgggtcatgagcgtgtgcctgcgcgttgagctatacggctgtctgtggagggatgggctgctgtcatacaccgctcccgtgggacaaactatgtacctctccgaggcagtttatcttaatgacagcacatatgacggacatacagttggaggcttgcaatacggtgggctggggcagctggctgatggagtggtgggattggacgatttcagaaagtctcaagaactgagggtgtggcctggttacgactacgtcggctggtctaaccattcttttagcagcggttatgtggagatggaattcgagtttgacagactcagagctttccaggcaatgcaagtgcattgcaataatatgcatacactaggggcccggctcccaggcggagtcgagtgccgatttagaagaggcccggccatggcctgggaaggtgaaccgatgcgtcacaacctcggcggcaatttaggagacccccgagcccgtgccgttagcgtgcctctcggcgggcgcgtggctcgcttcctacagtgccgattcctattcgccggaccatggctcctgttctcagagatctcttttattagcgatgtggtcaacaacagttctcccgccttgggggggaccttcccaccagcaccgtggtggcctccgggtccaccacccaccaacttttcctctctcgagctcgagccacggggccagcagcctgtcgcaaaggccgagggttcccctaccgccatcctcattggatgcctagtggcaattatactcctgctgctcctgattatagccctcatgttatggaggctccattggaggagactgctgagtaaagctgagcgccgcgtacttgaggaagaattgacagttcatctgtcggtgcctggagacaccatcctgatcaacaacaggccggggcctcgcgagccccccccttatcaggaacccaggcctcgcggaaatcccccacattctgccccctgcgttccgaatgggtccgccctcctgctctcaaacccagcctaccgcctgcttcttgccacctacgcccgacctcccagaggaccagggccccctactcctgcttgggccaagccaaccaatactcaagcttacagcggcgactacatggagcctgagaagccaggtgcgcctcttttgccccctccccctcaaaactccgtgccccattacgccgaggctgacattgtcacactgcagggcgttaccggtgggaatacctatgcagttccggcccttccacccggagctgttggcgatggaccaccacgggtagactttcccagatctagactgagattcaaggaaaaacttggcgaaggccagttcggtgaagtccacctgtgcgaagtggactcaccacaggacttggtgagtctggatttccccctgaatgtcagaaaagggcaccccctccttgtggcagttaagattctaagacccgacgctaccaaaaatgccaggaatgattttctgaaagaagtcaagatcatgagcaggttaaaggaccccaatatcatacggctactgggggtgtgcgttcaagatgatcctctgtgcatgataacggattatatggagaacggtgatctgaatcagttcctgagtgcccaccagttggaggacaaggcagctgagggggcaccaggagatggtcaggccgctcaggggcccactattagctaccctatgctcctacatgtcgcagcacagattgcttctggcatgcgctacttggcaaccttaaattttgtacacagagatctggccacaagaaattgcttggtaggcgaaaattttactattaagattgcggattttggtatgagcaggaacctgtacgctggtgactattatagagttcaaggacgggctgtcctcccgatacgctggatggcctgggaatgcattctcatggggaagtttacgactgctagtgacgtttgggcctttggcgtgactctgtgggaggtgctcatgttgtgccgcgcacaacctttcgggcagttgactgacgagcaggttattgaaaacgccggcgaattcttcagagatcagggtagacaggtgtatttgtcccgtcccccggcatgcccacagggtctatacgaactgatgctgcgctgctggtcaagggaatcagagcagaggccaccttttagccagctgcaccgcttcttagcagaggatgcccttaacaccgtgtag

SEQ ID NO: 289058 - DNA, 2742 bp, Artificial Sequence
  derived and/or modified sequence
atgggccccgaggccctgagcagcctgctgctgctgctgctggtggccagcggggatgctgatatgaaggggcacttcgacccggccaagtgccgttatgcgctcgggatgcaggacagaaccatccccgattctgacatttcggcgagttcctcctggtccgattccaccgcagcccgccactctaggctcgagagctctgacggcgacggagcttggtgtcccgccggctctgtgtttccaaaagaggaggaatatctgcaggtggatctccagcgcctgcacctcgtcgcccttgtgggaacgcagggacgacacgccggagggctcgggaaggagttctctaggtcctaccggctccgctacagcagggatgggcggagatggatgggatggaaagatcggtggggacaggaagtgatttccggaaacgaagacccggagggagtcgtattgaaagacctcggtcctcccatggtggccaggctggtcagattctatccccgggccgaccgcgtcatgagtgtgtgcctgagagtagaactctatgggtgtctctggagagatggtctgctttcttacactgctccagttggccagactatgtacctttcggaggccgtttacttaaacgacagcacctacgacgggcacacggtaggagggctccaatacggaggattagggcagcttgcagatggcgtggtggggctcgacgatttcagaaagtcccaagagcttcgcgtctggccgggatacgactacgtgggttggtccaatcacagcttctcatcaggatatgtggagatggaattcgaatttgatcggctcagggcctttcaagcaatgcaggtgcactgcaacaatatgcataccctgggggcaagactgcctggcggagtggagtgccggtttcggcggggacctgcgatggcttgggaaggggaacccatgagacataacttaggaggaaatctcggcgaccccagggcaagagcggtcagtgtgcctttaggaggacgcgtggctcggttcctccagtgtcgattcctctttgctgggccctggctcttattcagtgagatttctttcatctccgatgtggtaaataacagtagtcctgcccttgggggcactttcccgccagctccctggtggccccctggccctccccccaccaatttcagcagcctggagctagagcctcgggggcagcagcccgtcgctaaagcagagggatccccaacagctatccttatcggctgccttgtcgccatcatcctgctgttgcttctgatcatcgcccttatgctatggaggctgcactggaggagactattgtctaaggccgagcgaagggttctcgaagaggagctgacagtacacttgagcgtacccggggatacaattctcatcaacaatcgtccaggacccagggaaccccccccctatcaggagccgagaccgaggggaaaccctccccactccgctccttgtgtgccaaatggttccgccttattgctcagcaatccagcatataggctgctcctcgccacctacgccaggccgcctagggggcccggcccaccaacccctgcatgggccaagcctaccaatacgcaggcctatagtggggactacatggagccagagaagccaggcgcacccttgttgcctcctccccctcagaactcagtccctcactacgcagaggctgatatcgtcacgctgcagggggtaactggcggcaatacctacgccgtcccagcgctgcctcctggagccgttggagatggcccgccaagagtagattttcctcgcagccgactcaggtttaaggagaaacttggggagggacagttcggtgaggtgcacttatgtgaagtcgattcccctcaggatctcgtcagcctggacttccccttaaatgtccggaaaggtcacccactcctggtggctgtgaagatcctgagacctgatgctaccaagaatgctcgcaacgactttctgaaagaagtgaaaattatgtcacggctgaaagaccccaacattattagactgctcggagtgtgtgtgcaggacgatcccttgtgtatgattaccgactacatggagaacggagacctaaatcaatttctctccgctcaccagttggaggacaaggccgccgaaggtgcccccggtgatgggcaagccgcacaaggacccaccattagttacccaatgcttttacatgtggcggcccaaatagcaagcgggatgcgttatcttgctactctgaactttgtgcatcgcgatctcgcaactcgtaattgcctagtaggggagaacttcactatcaaaattgcagacttcggaatgtcaaggaatctctacgccggggattattaccgagtccaagggagggccgtcctccccatacgttggatggcctgggagtgtatcctgatggggaagttcactactgcttcggacgtttgggccttcggcgtgaccttgtgggaagtgctcatgttatgccgggcacaaccgttcgggcagctgacagacgaacaagtgatcgaaaacgctggtgaattttttcgcgatcagggcaggcaggtgtacctgagcagacctcctgcctgccctcaagggctctacgagttgatgctgaggtgttggtccagggaatccgagcagagacccccctttagccagttgcatcgctttcttgccgaagacgccctgaacactgtctag

SEQ ID NO: 289059 - DNA, 2742 bp, Artificial Sequence
  derived and/or modified sequence
atgggccccgaggccctgagcagcctgctgctgctgctgctggtggcaagcggggatgctgatatgaaaggccattttgacccagcaaagtgtcggtatgccctaggcatgcaggatcgcactatccccgactccgatatctccgcatcctcttcttggtctgacagcacagctgccagacactctcgactcgaatcttcagacggagatggggcctggtgtcccgccggctctgtgtttcctaaagaggaggagtatctccaggtagatctgcagaggctccaccttgttgctttagtgggtactcagggacgacatgctggcggactcggaaaagaatttagcagatcttacaggttgagatattcacgggacggtcggagatggatgggttggaaggatagatgggggcaggaagtgatctctggcaatgaagacccggagggcgtggtgttgaaggacctcggcccacccatggtggctaggctcgtccggttttatcctagggcagaccgcgtgatgtctgtgtgcctccgtgtggagctgtacggatgcttgtggcgggacggtctgctgagctacacggcgcccgtgggtcagactatgtatctgtctgaggccgtgtacttgaacgattccacttacgatggacatactgttgggggtctacaatatggtgggctaggtcagttggctgatggcgttgtgggacttgacgactttcgcaagtctcaggaactccgagtctggccaggttatgattacgtgggatggagtaaccactccttctctagcggatacgtggagatggagtttgaatttgaccgccttcgtgcatttcaggccatgcaggtccactgcaacaacatgcatacactcggagcacgcctacctggcggcgtggaatgcagattcaggcgtgggccagctatggcgtgggaaggcgagcccatgaggcacaatctgggcggcaatttgggggatccgagggccagagcagtgagcgtgccgctcggcggaagggtcgctagatttctgcagtgccggtttctgttcgcaggcccttggctgcttttttctgagatttcattcatcagtgacgtagtaaacaactcctcccccgccttgggggggaccttcccgccagccccctggtggcctcctggcccaccgccgacgaatttttcatccctcgagctcgagcccaggggccaacaaccggtagcaaaggccgaagggtcgccaacagcgattctcatcggctgccttgtcgcaatcattctgctcctcctgctgatcattgccttgatgctgtggcggcttcattggcggaggcttttatctaaagccgagcgcagagttctcgaggaggagctgactgtgcacctttccgtgcccggggatacaatcctcatcaacaaccgacccggaccaagggagccgccgccctaccaggaacccaggcccagagggaatcctcctcattcagcaccttgcgtgcccaacggaagcgccctactccttagtaatcctgcttaccgactgctgctcgccacctatgcccggcccccacgcggtcccggccccccaacacctgcctgggccaaacctactaacactcaggcctatagtggggactacatggaaccagagaagcctggcgcccccctgctcccgccgcccccgcaaaactcagtaccacattacgccgaagcagacattgtcactctccagggcgtcaccggcggtaacacctatgccgtccccgctctgccacctggggcggttggagatggcccaccccgggttgacttccctcggtcacggctgcgcttcaaggagaagctcggggagggccagttcggagaagttcacctatgtgaggtagattcgccacaagacctggtgagcctggactttcctctgaatgttagaaagggacaccctttgttggttgccgtcaaaatcttgcggcccgacgcaacaaaaaacgcgcggaacgacttcctgaaagaggtgaagataatgtctaggctgaaagaccccaatattatacgtttgcttggcgtgtgcgtgcaagatgacccgctgtgcatgatcacagattatatggaaaatggggacctgaatcaattccttagcgctcaccagctcgaggacaaagccgccgagggagctcctggagatgggcaggcagcacaggggccaacgatcagttaccctatgctgctgcacgtggctgcccagatcgcttcgggcatgcggtacttagccacactcaatttcgttcaccgggatctcgcaacacgcaactgcctcgtgggagagaactttacaatcaaaattgccgactttggaatgagccggaacctgtacgcaggcgactactatagggttcaaggcagggcagtgcttcctatcaggtggatggcctgggagtgtatcctgatggggaagttcacgacagcaagcgatgtgtgggcattcggagtcaccttatgggaagtgctcatgttgtgtagagcccagcccttcggccagcttacagacgagcaggtgattgaaaacgcgggcgagttcttccgtgatcagggccgccaagtttatctttccaggcctccagcctgtccacagggactctacgagctgatgctgcggtgttggtcacgagagagtgaacagcggccccccttcagccaactccaccgatttctggcagaagatgccctgaacaccgtgtag

SEQ ID NO: 289060 - DNA, 2742 bp, Artificial Sequence
  derived and/or modified sequence
atgggccccgaggccctgagcagcctgctgctgctgctgctggtggcctcaggggacgccgatatgaaaggccacttcgacccagctaaatgccgatatgccctgggcatgcaagacagaactatccctgactctgacatttcagcgtcaagctcttggtcagactctaccgccgccaggcatagtcgcctggagagcagtgacggagacggcgcctggtgtcccgctggcagtgtatttccaaaagaagaagaatatctgcaggtggacttacaacgcctgcatcttgtcgccctggtggggacccagggcagacatgctggcggattagggaaagaatttagtaggtcttaccgactgcgctacagtcgggatggtagacgttggatgggttggaaagatcggtgggggcaagaggtgataagcggaaatgaggacccggagggagtggtcttaaaggacctcgggccacccatggtggccagactcgtaagattctacccgcgagctgaccgcgtgatgagcgtgtgtttgagagttgagttgtacggttgcctgtggagggacgggctgctgagctacaccgcccctgtggggcagaccatgtatctcagtgaggccgtgtatctaaatgactccacctacgacggccacactgtgggaggactccagtacggaggactgggccagttggctgatggcgtggtgggtctcgacgactttaggaagtctcaagagctccgggtctggccagggtatgactatgtcggctggtcgaaccattcctttagctctggctacgtcgaaatggaatttgagtttgatagactgcgggcctttcaagctatgcaggtccactgtaacaacatgcacaccctaggagcgagactgcctgggggggtcgagtgtcgtttccggcgcggtcccgcaatggcttgggagggcgaaccaatgcgccataatttgggaggaaaccttggtgatcctagagctcgggctgtatcagtccccctcgggggcagggtcgcaaggtttttgcagtgccggtttcttttcgccggaccatggctgctcttctcggaaatctcctttatcagcgacgttgtaaacaactcctcccctgcactgggaggaaccttcccacccgcaccctggtggccacctggacccccaccaacaaattttagctctttggagctggagcccagaggccagcagcctgtggcaaaagccgaaggctccccaacggcaattttaattggttgcctcgtggccatcatactgctcttgctgcttatcatcgctttgatgctgtggcgccttcactggcggcgactcctcagcaaagctgagcgacgcgtcttggaagaggaactcacggtgcacctgagcgtgcccggcgacaccattctgattaacaaccggccgggtccccgcgagcccccaccgtaccaagaaccgcggcctcggggcaatccaccacattcagccccttgtgtacctaacggtagcgctctgcttctgtccaaccccgcatatagactgcttctagctacctacgctcgcccccctcgcggtcccggtccacccactccggcttgggcaaaaccgactaatacccaggcatactcaggcgactacatggaacccgaaaagccaggagccccgctactacccccccctccccagaattctgtcccgcactatgctgaagccgatatcgtgaccttgcagggcgtgacgggcggtaatacttacgccgtacctgcactccctccaggggctgtgggtgatggcccaccgcgggtggatttccccaggagcagactgaggtttaaggagaagttgggcgaaggacagtttggagaggtgcacctctgcgaagtggactccccacaggatttggtgtcattggatttcccacttaatgtccgcaaaggacacccgcttctggttgccgtgaagattcttcggcccgatgcaaccaaaaacgcacgaaatgatttcctcaaagaagtgaagattatgtcaagactcaaagatccaaacattatccggctcctaggggtgtgtgtgcaggacgatcctctgtgcatgatcaccgactacatggagaatggggacctgaaccagtttctaagtgcacatcaactcgaagataaagccgccgagggcgcccccggggacggtcaggcagcacaagggccaacaattagctaccctatgctgctgcatgtggcagcccaaatcgcaagcggcatgcgatacctggcaactctgaacttcgttcaccgagacctggctacaaggaattgtctcgtgggggagaactttacaatcaaaatagcagactttggaatgtcccgtaatctttacgcgggcgactactaccgcgtgcaggggagggctgtccttcccattcgctggatggcatgggaatgtatcctgatggggaaattcaccacggctagtgacgtgtgggcctttggggtgaccctttgggaggtgttaatgctgtgtagggcacagccctttgggcagctcaccgacgagcaagtcattgaaaacgctggggaattctttcgcgaccaggggcgacaagtgtatctgtcgaggcctccggcctgtccacagggcctgtatgagctaatgctcaggtgttggagccgagagtcagaacagcgaccgcccttcagccaactgcatagattcctggccgaagatgccctgaatacagtgtag

SEQ ID NO: 289061 - DNA, 2742 bp, Artificial Sequence
  derived and/or modified sequence
atgggccccgaggccctgagcagcctgctgctgctgctgctggtggcctccggcgatgccgacatgaagggtcattttgatcctgccaaatgtcgctacgccctaggcatgcaggaccggaccatcccggactccgatatctcagctagctcttcctggagtgacagtaccgcggccaggcacagtcggttggaatcatccgacggcgatggcgcttggtgtcctgctggcagtgtgttccccaaagaggaggagtacctgcaggttgacttacaacgcctgcacctggtggccttggtcgggacccagggccgtcatgcggggggtctgggaaaggaatttagcagatcataccgccttcgctatagtcgagacgggcggcggtggatgggctggaaagaccgctgggggcaggaagtcatcagcggcaacgaggaccccgagggagtagtgctgaaggatctcggcccaccgatggttgcccgcttggtgcggttctatcctagagccgaccgagttatgagtgtctgcctcagggtagaactgtatggctgcctttggagagatggactgctgtcttacacagctccagtcgggcagacaatgtatttgagcgaagccgtgtacttaaatgactctacttatgacgggcacacagtcggtggtctgcaatatggcggcctggggcagctcgccgatggagtggtgggactcgatgatttccggaagtcacaggaattgcgggtttggccaggctacgattacgtgggatggtctaatcacagcttttccagcggctacgtcgagatggagttcgagtttgacaggctgcgcgcctttcaggcaatgcaagttcactgcaacaatatgcacaccctgggtgctaggctgccaggaggggtcgagtgtcggttccgaagagggccagccatggcctgggagggcgagcctatgcgccacaatctgggcggtaacctgggagatccgagggcgagagccgtctctgtcccgctcggaggtcgagtggctagatttctgcagtgccgcttcttgttcgcggggccatggctgctgttcagcgaaatctcattcatttcagatgtggtgaataactcctcccccgccctcggcggtactttccctccagctccttggtggccccctggcccccctccgacaaacttcagctcactggaattagagccacggggacagcagccggtcgccaaggctgaaggctctccaactgcaatccttatcggttgtttagtcgccatcatactgctgttgttattaatcatcgccctcatgctctggagactccactggcgaagactgttgagtaaagccgaaaggcgggtgctggaggaagaattaaccgttcatctgtctgtgccaggggacacaatactgattaataacaggcccgggcccagggagccacccccgtatcaggaacccagaccccggggtaatccgccccactcagcgccatgtgtacccaatggaagcgccctactgctttcaaacccagcctatcgtctccttctcgctacctatgctagaccacctcggggccccggacccccaacccccgcatgggcgaaacccactaatacgcaagcctatagcggggattatatggaacccgaaaagcctggagccccactgttgcctcctcctcctcagaactccgtgccccattatgctgaggccgatatcgtgacgcttcagggcgtaacagggggtaatacctatgccgtgcccgcactcccccccggagcagtaggagatggacccccccgggtcgacttccctaggtctagattgaggttcaaggaaaagctgggagagggtcagttcggagaagttcacctttgtgaggtagacagtccacaggacctggtgtcgttggactttcccttaaatgtgaggaaaggacacccgctgctcgtggccgtcaagattttgcggcccgatgcaaccaaaaacgcccgcaacgacttcctgaaagaggtgaagataatgtcacgcttgaaggaccctaatattatcagacttctcggagtgtgcgtgcaagatgatcctctgtgcatgatcacagattatatggagaatggcgacctgaatcagtttctttccgcacatcagctcgaggacaaagccgccgagggtgcacccggcgatggccaggctgcgcaggggcccacaatcagctatccaatgctgctgcacgtggccgcacagatcgccagcggtatgcggtacttggccactctcaattttgtacaccgagacctagctacaaggaattgtttggttggggagaatttcacaatcaaaatcgcagactttggcatgagccggaacctgtacgccggcgattactatcgggttcaaggaagagcagtgcttcctatacggtggatggcctgggagtgtatcctgatgggaaagtttaccaccgcttcggacgtgtgggcgtttggcgtcacgctctgggaggtcctcatgctctgccgcgcgcagcctttcggacagctaactgacgagcaggtgatcgagaatgcaggggaattctttcgcgatcaggggagacaggtgtacctgagccggccacccgcctgtccacagggtttgtacgagttgatgctgcgctgctggagccgagagtcggagcagaggcctccgttttctcagttacatcgattccttgcagaagacgcgttgaatacggtgtag

SEQ ID NO: 289062 - DNA, 2742 bp, Artificial Sequence
  derived and/or modified sequence
atgggccccgaggccctgagcagcctgctgctgctgctgctggtggcttctggcgatgcggacatgaaaggtcatttcgaccctgcaaagtgcaggtatgcccttggcatgcaggacaggactatccctgactcagacatcagcgccagctcgagttggtccgacagtacagcagcccgacacagccgactggagagctcggatggcgatggagcatggtgcccggcaggaagtgtgtttcccaaagaggaagagtacttacaggtcgacttgcagcggttgcacctagtagcattagttgggacacagggccgccacgccggcgggcttggaaaggagttctcaaggagctatcgacttaggtacagccgagacggcagacgctggatgggatggaaagatagatggggtcaagaagtgatctccgggaacgaggatcccgaaggcgttgtcctgaaagatttaggacctcctatggtcgcgaggttggtgcgtttctacccacgggccgatcgggtaatgagtgtatgtctcagagtcgagctgtacggttgcttatggagggacgggctcctttcttatacggcacccgttggccagacgatgtatctgtcagaggctgtgtatcttaacgattctacctatgacggacacaccgtcggaggactgcagtacggtggcttaggccagttggcagatggcgtggtaggactggatgactttcgaaagagccaggaattgcgcgtatggccaggatatgattatgttggatggagcaatcacagcttcagcagcggttatgtcgaaatggagttcgagttcgacaggctaagagcgttccaagcaatgcaggtacactgtaataatatgcacacactgggggcacggctgcccggaggtgtcgagtgtcgtttccgtcggggtccggccatggcttgggagggcgaacccatgcgacataacctcgggggtaacctcggggacccgcgagccagggctgtctccgtgcctttgggcgggagagttgctcggttcctgcaatgtcggttcctctttgcaggcccctggttactgttttccgagattagcttcatctctgatgtggtgaataattcaagcccagctcttgggggcacattcccgcccgccccatggtggccccctggcccaccgccgacgaattttagctcgctggagcttgagcctaggggtcagcagccagttgctaaagcagaagggagcccaacagctattcttattggttgcctggtggctataatcttgctcctgctgctgatcattgccttaatgctgtggagactgcattggagacgcctccttagtaaggccgagcgacgcgttctggaggaagagctgactgtgcatctttccgtcccaggggacaccatcctaattaataacaggcccgggccccgagaacccccaccttaccaagagccacggccccgcggcaatccacctcattctgcaccctgtgtgccgaacgggagcgctctcttgctcagcaatcccgcgtataggttattgttggccacctacgcccgtcccccgaggggacccggaccaccaacacctgcctgggcaaagccaacgaacacccaggcctacagcggagattatatggaaccggaaaagccaggagcccctctcttgcctccaccccctcaaaacagcgttccacattatgcagaggccgatatcgtcactcttcagggcgtcaccgggggcaacacttatgccgtgcctgcactgcctcccggtgcagtaggggacggacccccacgcgtggacttccccaggtcgcggctgagatttaaggagaagttaggagaggggcaattcggcgaagttcatttgtgcgaagtggactccccccaagacctagtgtcgcttgactttccgctcaatgtacggaagggccacccactgctggttgccgtaaagatccttagacccgatgcaacaaaaaacgcccggaatgacttcctcaaagaggtgaagatcatgtcaaggttgaaggaccccaatattattcgcctacttggtgtctgcgttcaggatgacccactctgtatgattaccgattatatggagaacggagacctgaaccagttcctcagtgctcaccagctggaggataaggccgcagaaggcgctcctggagatggacaagcagcccagggccccacgatttcgtaccccatgctgctgcacgtggcagcccaaatagctagcggcatgcgctacctggccaccctcaatttcgtccacagagatttagccacccggaactgtctcgtgggcgaaaattttacaatcaagatcgccgacttcggaatgtccaggaacctgtatgcgggggattattaccgtgtccaggggcgcgcagtcctaccaataaggtggatggcgtgggaatgcatcttgatgggcaagttcacaactgcaagtgatgtgtgggccttcggcgttactttatgggaggtgctgatgctgtgccgcgctcaaccttttggccagctaaccgacgaacaggtcattgagaacgctggtgagttctttcgagatcagggaagacaggtctatcttagccgtccacccgcttgtcctcagggtttatacgagcttatgctgaggtgctggagccgggagtccgaacaacgacctccctttagccagctgcacaggtttctcgctgaggacgccctcaatacggtgtag

SEQ ID NO: 289063 - DNA, 2742 bp, Artificial Sequence
  derived and/or modified sequence
atgggccccgaggccctgagcagcctgctgctgctgctgctggtggcatctggcgacgctgatatgaagggtcattttgatccagccaaatgtcgttacgcattggggatgcaggacaggacaattccagacagcgatatctctgcatcctcttcttggagtgatagtaccgccgccaggcattcaagactggaaagttccgacggggatggggcttggtgtcccgcgggttccgtattcccaaaagaggaagaatacctgcaggtggacctgcagaggctgcacttagtcgccctcgttgggacacaaggacgtcacgcagggggactgggtaaagaattttccagaagctataggcttcggtacagccgcgacgggagacgctggatgggctggaaagatcgatggggtcaagaggtgattagcgggaacgaggatccagagggcgtagtgctgaaggacctcggccctccaatggtagcaaggctcgtgcgcttctatcctagagcagacagagtgatgagcgtatgtttaagggtcgaactgtacgggtgcctgtggcgcgatgggctgttgtcttataccgccccggtgggtcagacaatgtacctgtcagaggctgtttaccttaacgactcaacttacgacggacatacagtcggaggcttgcaatatggggggctgggtcagctggccgatggtgttgttggcttggatgatttccggaagtctcaggaactgcgggtttggcccgggtacgattacgtcggatggtccaatcattccttttccagcggctacgtggagatggagttcgagttcgatcgcttaagggcattccaggccatgcaggtgcactgcaataatatgcatacacttggggcacgcctcccggggggcgtggagtgtcgtttccgaagggggcccgcaatggcttgggaaggagagccaatgcgccacaacctcggtggaaatctcggagatccacgcgctagggcagttagcgtgcctcttggaggtcgcgtcgcaagattcctgcaatgcagatttctttttgcgggaccatggttactgtttagcgagatcagcttcataagcgatgttgtcaataactcaagccctgcccttggagggacatttcccccagccccttggtggcctcccggaccacccccaacgaattttagttcacttgaacttgagcctaggggccagcagcctgtcgcaaaagcagaaggcagtcccacagccattctaattggctgcctcgtggcgattatcctactgctcctgctgattatcgccctgatgctgtggcgcttacactggagacggctcctgtctaaagccgaacgcagggtcttagaggaggagcttaccgtacatctatccgtgcctggggataccattctgatcaataacagacccggtcccagagaacctcctccttaccaggagccacgcccaaggggtaatcctccacactctgcgccctgcgtccccaatggcagcgccctcctcctatcgaatcctgcctataggctattattagctacatacgctcgcccccccaggggtcccgggcctccaactcctgcttgggctaagccgacgaatacccaggcttattctggcgactacatggagccagaaaagcccggtgccccactcctgcctcccccaccacagaatagcgtcccacattatgccgaggcggatatcgtaacccttcagggtgtcaccggaggtaacacttatgcagtgcccgccctgccacccggcgctgtgggcgacggaccaccccgcgtagactttccacggtcccgactacgtttcaaggagaagcttggagaagggcagttcggcgaggtccacctgtgcgaggtggacagtccccaggacctggtaagcctcgatttcccgcttaacgtgagaaaggggcaccccctactcgtggcagtcaaaatattgcggcccgatgctactaagaatgcgaggaacgatttcctcaaagaggtcaaaataatgtctcgattgaaagatcctaacattatcaggttgctaggcgtctgtgttcaggatgatccgctgtgcatgattaccgactatatggagaacggcgacctgaatcagtttttgagcgcccaccagctggaggataaagccgctgagggggcccctggggacgggcaggccgctcagggtcccacaatcagctatccaatgctgctgcatgtggcagcacagatcgctagcggtatgaggtatctggccactctgaattttgttcacagagatcttgccaccaggaactgtcttgtgggcgagaattttacaattaagattgccgacttcggcatgtccagaaacttatacgctggcgactattaccgagtccagggacgagccgtgctcccaatcagatggatggcctgggagtgtattttaatgggtaagtttactaccgcaagcgatgtgtgggcttttggcgttactctttgggaagtcttaatgctttgtcgcgcacaaccctttggtcaactcaccgacgagcaggtgatcgagaatgccggggagttcttcagagaccagggcagacaggtgtacctctctcggccccccgcctgcccccaggggttgtacgaattaatgctcaggtgttggtccagggagtccgaacagaggccccctttctcacagctccatcggttcctggccgaggatgctttaaatacagtgtag

SEQ ID NO: 289064 - DNA, 2742 bp, Artificial Sequence
  derived and/or modified sequence
atgggccccgaggccctgagcagcctgctgctgctgctgctggtggcctctggggatgccgacatgaagggacactttgacccagctaagtgccggtacgctcttggtatgcaggatcgtactattcctgactcagacatcagcgcttcctcctcgtggtctgattcaactgctgcccggcactccagactggagagctctgatggagacggtgcatggtgtcctgctggctcagtgttcccaaaggaggaggaatatctgcaggtggatctccaaagacttcatctggtggcactggtgggtactcagggacggcatgccgggggcctgggcaaagaattctctaggagctatcgacttagatacagtagggacggtcgccggtggatggggtggaaggaccgatggggacaggaagtaatctctggaaatgaagaccctgaaggcgtggttcttaaggatctgggcccccccatggtcgctcgcctggtaagattctatccaagggctgatcgggtgatgagcgtgtgcctccgggtggaactctacggttgtctgtggagggatggtttgttaagctatacggccccagtcggacagacgatgtacctgtccgaggctgtgtatcttaatgattcgacatatgacggtcacaccgtgggcgggctccagtacggtgggctcggacagctcgcggatggggttgttgggcttgacgattttcgtaagtcacaggagttgagagtgtggcccggctatgactacgtggggtggagtaaccatagctttagctcagggtacgtagagatggagttcgaattcgataggctgcgggcctttcaggcaatgcaagttcattgcaataatatgcacaccctgggcgccagattacccggtggcgtggagtgccgttttagacggggcccagcgatggcttgggagggggagcctatgagacacaacctgggtggcaatctgggcgatcctagggcgcgcgcagtgagcgtgcccctgggtggacgggttgcgcgcttcctgcagtgtcgattcctctttgcggggccatggctcctttttagcgaaatcagttttatctctgatgtggtgaacaactctagccctgcccttggaggtacttttccccccgcaccctggtggccccccgggcccccacccacaaacttttcctcactggagctggagccgcgtggccagcaacccgttgccaaagccgagggtagccccacggcaatactgattggatgcctggtggccataattttgctcctcctcctgattatcgcacttatgttgtggcggctccactggaggagattgctgtctaaggccgagcgaagggtcctggaagaggagctaacggtgcacctatcagtcccgggagacactattctcataaacaatcggcctgggccccgtgagcctccaccttaccaggaacctaggcctcgaggcaacccacctcattcagcaccatgcgtgcctaatggttcggccttgctgctgagtaacccagcctaccgcttactccttgcgacttacgcccgtccaccacgtggcccaggtccaccaactcccgcatgggctaagcccacgaatacccaggcgtatagtggcgactatatggaacccgagaagcccggcgctcccctcctgccccctcccccccagaactcagtcccgcactatgcagaagctgacatcgtaactcttcagggagtcaccggaggaaatacttatgctgtcccagcacttccaccaggcgctgttggggacgggcccccacgggttgacttcccacggtcaaggctaagattcaaagagaaactgggggaagggcagttcggagaggtccacctttgcgaggtcgactccccacaggacttagtcagcctagacttccccctcaatgtgcgcaaaggacatccgctgctggtcgcagtaaagatcctgagacccgacgcaaccaaaaacgcgcggaacgactttctgaaagaggttaagattatgagcagactgaaggacccaaacatcatccgcctcctgggagtatgtgtacaggatgacccactctgtatgatcactgactatatggagaacggtgatctgaaccagttcttgagcgctcaccagctcgaagacaaagctgccgagggggcccctggggacggtcaggcggcacaagggccgacaattagttaccccatgcttctgcatgttgcagcgcagatcgcgtccggaatgagatatctggcgacgcttaacttcgttcacagggatctcgctactcggaactgtctggtgggagaaaacttcaccatcaagatcgctgactttggaatgtcgcgtaacttgtatgccggggactactaccgcgtgcagggccgggctgttcttcccattagatggatggcatgggaatgcatcctcatgggcaagttcaccacagccagcgacgtgtgggcgttcggagtcaccttgtgggaagttctgatgctgtgccgcgctcaaccattcggccaacttaccgacgaacaggtgattgaaaatgcgggagaattctttcgtgaccagggcaggcaggtgtatctctcaaggccccccgcgtgcccccagggcctatacgagctgatgctgcgatgttggagcagagagtctgagcagcgccctccttttagccaattgcacagatttctggccgaagacgccctcaacaccgtgtag

SEQ ID NO: 289065 - DNA, 2742 bp, Artificial Sequence
  derived and/or modified sequence
atgggccccgaggccctgagcagcctgctgctgctgctgctggtggcttccggggacgccgatatgaaaggccacttcgacccggctaagtgccgctatgctttaggtatgcaggacagaaccattcctgatagtgacattagcgctagctccagctggagtgattcaactgccgccaggcattcacgtctggaatcatctgatggagacggcgcctggtgccccgcaggctccgtgttccccaaagaagaggagtatctgcaggtggatcttcagaggcttcacctggtagctctggtcggcacccaagggcggcacgcaggagggctgggcaaggagttctcgagaagttaccggctcaggtatagccgagacggaagacgctggatgggctggaaggatcgatggggccaggaagtgatctccggcaacgaggatccagagggcgtagtcctgaaggacttggggccacctatggtggcacggttagtaagattctatcctcgggcggatagggtaatgtcagtctgcttaagggtggagttgtacggctgtctgtggcgggatggtctgctttcctacacagctccagttggtcagacaatgtatctcagtgaggccgtgtaccttaatgacagcacctatgatggacatacggttggaggtctgcaatatggcggtctggggcagctcgcagatggcgttgtgggccttgatgacttcaggaagtcacaggagctgcgggtgtggcccggttatgactacgtgggctggagcaaccatagtttctctagcggatacgtggaaatggagtttgaatttgatcgcctgagagcatttcaggccatgcaagtgcattgtaacaatatgcatacactgggagccaggctgccaggtggagtggaatgccgctttaggcggggaccagccatggcctgggaaggtgagcctatgaggcacaatctggggggaaacctgggtgaccccagagcgcgggccgtctccgtgcccctaggaggcagagtcgcccgatttctccaatgccgctttttgtttgctgggccttggctcctgttttcagagatttccttcatcagcgatgtggtgaataacagtagtcctgcgttgggggggacatttccccctgccccttggtggcctcccgggccacccccgacaaatttctcatcattggagttagaaccacggggccagcaaccagtggccaaagcggaaggctctccgacggcaatcctcatagggtgtcttgttgccatcattctgctgctgctgctgatcatcgccttgatgctctggagattacactggcgcaggctgctttccaaagctgaacggagagtgctggaggaggagctgacagtgcacttaagcgttcccggcgacacaattctcattaacaatcgtcctggcccccgcgaacctccaccataccaggagcctagaccacggggaaacccccctcattccgcgccttgcgtgcccaacggaagcgccctcctgctcagcaaccctgcctaccgcctgttacttgcaacttacgcgagaccacccaggggaccagggccaccgactccagcttgggctaaacccacaaacactcaggcttatagcggcgactacatggaacccgagaaaccaggagcacctctcctccctcctcctccgcagaactccgtgccccattacgcagaggccgacatagttaccctgcaaggagtgacaggcgggaatacttacgctgtgcctgctctgccaccgggtgctgtgggtgacggacccccacgggtggacttccctcgcagccggctcaggtttaaggaaaagctgggggagggacagttcggcgaagtccacttgtgcgaggtggactccccacaggatctcgtctccctcgactttccactgaacgtgagaaagggccaccccctactggtcgctgttaagattctgagacccgacgccactaaaaacgccaggaatgactttcttaaagaggtaaaaataatgagccgtctcaaagaccctaatatcattcgcctgttgggcgtatgcgtgcaagacgatcctctttgcatgattaccgactatatggaaaatggagacctgaaccagtttcttagcgcccatcagttggaagataaagccgccgaaggcgcgcccggagatggtcaggcggcacaagggccgaccatcagttatccgatgctcctgcacgtggcagctcaaatagcttccggcatgagatacttagcgacgctcaattttgtccacagggatttggcgaccaggaactgtttggttggagaaaatttcactattaaaatcgcagatttcgggatgtctcgtaacctgtacgcaggtgattattaccgtgtgcagggacgcgcagtgctcccaatcaggtggatggcttgggaatgtatcttaatgggcaagttcactaccgcatctgatgtttgggccttcggagtgacattgtgggaagtgctgatgctgtgccgggcgcagccctttggacaattgaccgatgagcaagtgattgagaatgccggcgaatttttccgcgatcaaggccgtcaggtgtatttatccaggccaccggcctgtccccaaggcttatatgagctcatgcttcgctgctggtcacgggagtccgagcagcgcccacctttcagccagttacaccgctttctcgccgaagacgcccttaacaccgtctag

SEQ ID NO: 289066 - DNA, 2742 bp, Artificial Sequence
  derived and/or modified sequence
atgggccccgaggccctgagcagcctgctgctgctgctgctggtggcctctggagacgcagacatgaagggacacttcgacccggctaaatgccgctacgccctgggcatgcaggatcggaccattcccgacagtgacatctctgcaagctcatcctggagcgattccactgcagctcgccattctaggttggaatcttcagatggcgatggcgcttggtgccccgccggttctgtgttccccaaagaggaggagtatctgcaagtcgacctgcagaggcttcacctcgtagcgctggttgggacacagggtagacacgcaggtggcttgggcaaggagttttctcggtcctatcggctgaggtattcccgggacggtcgtaggtggatgggatggaaagatcgttggggccaggaggtcatctcaggcaacgaagatcccgaaggtgtcgtcctgaaagatctcggccctccaatggtggcccgattggtccggttctatccccgcgctgacagagttatgagcgtgtgtcttagagtggaactgtacgggtgcctgtggcgagacggtctgctcagctacaccgctcctgtgggccaaaccatgtaccttagcgaagcagtgtacctgaatgattctacgtatgacggtcacacagttggcggtctgcagtatggaggccttgggcagctagcagacggagtcgtcggcttggatgacttcagaaagagtcaagaactgagggtttggccaggctatgactacgttggatggagcaaccatagtttcagctcagggtatgtcgaaatggagttcgagtttgaccgactgagggcatttcaagccatgcaggtgcactgcaataacatgcacactctcggcgctagactgcccgggggcgtggaatgccgatttagacgcggccccgctatggcctgggagggggagcccatgcggcataacctcggcggtaatctgggggatcccagagcaagagccgtatccgtgccgctgggcggacgagtcgccaggtttctgcaatgtaggttcctcttcgccgggccctggttgctgtttagcgaaatcagctttatatccgatgttgttaacaattctagtccggcacttggaggtacctttcccccagcaccttggtggcccccgggtccccccccgacaaacttcagtagcttagaactggagccaagaggccaacagccggtggcaaaagccgaggggagccctaccgccatcctcattgggtgtctggttgccatcatcctgctgctgttgctgatcatcgccttaatgctgtggagactgcactggcgccgcctgctttccaaagccgagcggcgggtactcgaggaggagctcacagttcatttaagcgtgccgggcgacacaatcctgataaataataggccaggcccccgcgagccacccccatatcaggaacctagacctagaggcaaccctccccattccgctccatgtgtccccaatggttctgctctgctcctgagcaatcccgcctatagactgcttcttgccacctacgcgagacctccccgaggaccagggcctccaacacccgcttgggcaaagcctacaaacacccaagcctactcgggggactacatggaacccgagaagccaggcgccccacttctgccaccccctcctcagaattctgtgcctcactatgctgaagctgatatagtaacactacagggagtgactggtggtaatacatatgcagtgcccgcccttccgccaggcgccgtcggtgacgggccccctagagttgatttccctagaagcagactgaggtttaaagaaaaactgggcgaagggcagttcggggaggtacacctgtgcgaagtcgactccccacaagatctggtgtccctggatttcccacttaacgtcaggaaagggcacccactgctggtcgctgtgaagattctccggcccgatgccacgaagaacgctcggaacgatttcttgaaggaagtgaaaatcatgagtcggctcaaggatccgaatatcattaggttgttaggtgtgtgcgtccaggatgaccctctgtgcatgatcacagattatatggaaaatggagacttgaatcagttcctttctgcacaccagctggaagataaggctgcagaaggcgctccaggagacggacaagctgcacagggtcccactatctcctaccccatgcttttgcatgtggctgcccagattgcaagtggtatgcggtatctggctaccttaaacttcgtgcatagagatctggccacgagaaactgccttgtgggcgagaactttaccattaaaatcgccgattttgggatgagtaggaatctttacgctggggactattaccgtgttcaaggccgcgcggtgttgcccattaggtggatggcatgggaatgcatactaatggggaaattcaccactgcctccgatgtgtgggccttcggtgtcactctgtgggaagttctgatgttatgccgggctcaaccttttggtcagttgaccgacgagcaggtgatcgagaacgcgggtgaatttttcagggaccaggggcgccaagtctacctgtcacggcctccagcatgcccacagggcctgtacgaacttatgctcagatgttggtctagggagtcggagcagcggccgcctttctcacagctgcaccggttcctagctgaagacgcactgaataccgtgtag

SEQ ID NO: 289067 - DNA, 2742 bp, Artificial Sequence
  derived and/or modified sequence
atgggccccgaggccctgagcagcctgctgctgctgctgctggtggcatccggtgatgccgatatgaagggacatttcgatccagccaagtgtaggtatgccctgggcatgcaagataggactattcccgactctgacatttccgcctcttcatcctggagcgattccacagccgccagacattccagactcgagtcttccgatggagatggggcctggtgccccgccgggtctgtgttcccgaaggaagaggagtatctgcaggtggacctgcaacgactgcaccttgtcgcgctggtgggaacacagggacggcacgcggggggcctgggtaaggagttctcccggagttaccgactgcggtactcaagagatggtcgccgctggatgggatggaaggataggtggggacaggaggtcatatcagggaacgaggaccccgaaggagttgtgctgaaggacttgggacccccaatggtggcccgcctcgtgcgcttttatcccagggccgaccgcgtgatgtccgtgtgtcttcgggtagagctctacgggtgtctctggcgtgacggactactgagttatacggcccccgtggggcagactatgtacctctcagaagccgtatacctcaatgatagcacatatgatggacacacagttggcggactgcagtacggtggactaggccagttggccgacggggttgttggattagacgattttagaaaaagtcaggagttgcgggtatggcccggatatgactatgttgggtggagcaaccattccttcagctcaggctatgtcgaaatggagttcgagtttgatcgcctccgcgcgtttcaagctatgcaagtacactgcaacaacatgcacaccctaggggccagactgcctgggggagttgaatgccgattcaggagaggaccagctatggcctgggagggcgaacccatgagacacaatctgggcggcaacctgggcgacccaagagcccgtgccgtgtccgttcccctgggcggacgcgtggcccgattcctgcagtgccgcttcttgttcgccggaccatggctcctcttcagcgagatctcattcatcagcgatgtagttaataattcctctcccgccctgggggggacattcccaccagccccttggtggccacctgggcctcctcctaccaactttagtagcttagaactggaaccaagaggtcagcagccagtggccaaggccgagggttcaccgaccgcaatcctcatcggatgtttggttgctataattcttttacttctactgattattgcattgatgctatggagactacattggaggcggctcctgtcaaaagctgaacgcagggtgcttgaagaggagctcactgtccatttgtcagttccaggcgataccatcttgataaataaccggcctgggcctcgggagccgcccccatatcaggagcccaggcctagaggaaatcctccccattccgccccttgcgtgcccaatggttcagcactgttgctgtcaaatccagcatatagactgctcttagccacgtatgcccggcctccacgcggacctgggccgcctacccctgcgtgggccaaacctacaaacacccaggcctactctggggattacatggagcccgagaagccgggtgctcccctgctgccacccccgccccagaactcagtacctcattatgcagaggctgacattgtgacgttgcagggagttactggaggtaatacttacgctgtgccagccctgcctcccggcgccgttggagatggccccccaagagtggacttcccgcggtcaaggctgcggtttaaagagaagttgggtgagggtcagttcggcgaggtacacctgtgcgaggtggattccccccaagaccttgtgtccctggactttccactgaatgtgcgcaagggccatccgctgctcgtggccgtcaagatcttacgccccgacgctacgaagaatgctcgaaacgatttcctaaaggaagttaagatcatgtctaggctcaaggaccccaatattatcagacttcttggggtctgcgtccaagacgaccccctctgcatgattacagactacatggagaacggcgatctgaaccaattcctctcagctcaccagcttgaagataaggcggcggagggcgcacccggggatggacaggccgcacagggccccacgattagttatccgatgctgcttcatgtagccgcccagatcgcctctggaatgcgatacctggctacactgaacttcgtccatcgcgacctggcgacacgaaattgcctcgtgggcgaaaactttactatcaagattgcagatttcgggatgagtcgcaatctgtacgccggtgattattatcgtgtgcaggggcgggctgtcctgcctattcgttggatggcgtgggaatgtatcctaatggggaaattcaccaccgcatcagacgtctgggcctttggcgtgactctctgggaggtcctgatgctgtgtcgtgcccaaccttttggccagctaaccgatgaacaggtcatcgagaacgcaggggagtttttccgcgaccagggtaggcaggtgtacctatcacggccccctgcgtgtccccaggggttgtatgagctgatgcttcgctgttggtcacgtgagtccgaacagcggccaccattctctcaactccaccggtttctggcagaggatgccttaaatactgtgtag

SEQ ID NO: 289068 - RNA, 2742 nt, Artificial Sequence
  derived and/or modified sequence
auggguccugaagcccuaucuagcuuacucuuacuacuucugguggccucaggagaugccgauaugaagggacacuuugauccagccaaaugccgauaugcucuggguaugcaagauagaaccauuccugacagcgauauuucagccuccucuucuuggucagacagcacugccgcuaggcauuccagacucgaaagcagugauggcgauggcgcauggugcccagcaggcagcguguuccccaaagaggaagaauaucuccagguugaccuucagcgccuccaucugguagcccugguggguacgcagggacggcacgcgggaggacucgggaaggaguuuucucggucuuacagguugcguuauucccgugacggacgcagauggaugggcuggaaagacagauggggacaggaagucaucagugguaaugaggacccagaaggugugguccugaaggaucugggcccuccuaugguggcgaggcucgugcgcuucuacccgagagccgaccgugugaugucugugugucugcggguggagcuguacggcugcuuguggagagauggauuacugucauauaccgccccaguggggcagaccauguaccucuccgaggccguuuaucugaaugacagcaccuacgauggacauacugucggaggacuacaguacgguggucugggccagcuggcagacggcgucgucggauuagacgauuuuaggaaaagccaggaguugcgaguguggccaggcuacgacuacguuggcuggucuaaucacucuuuuucaaguggauauguggaaauggaauucgaguuugacagacugcgcgcuuuccaggcuaugcaggugcacuguaacaauaugcauacacucggugcccgacugcccggagggguagaaugccgcuuuagaaggggaccugccauggcaugggagggagagcccaugcgucacaaccugggcggaaaccucggugauccacgggcccgggccgugucagugccacuugguggacgaguugcaagguuccugcaauguagauuucuguuugccgggcccuggcuccuuuuuagugagauuuccuucauauccgauguggugaauaacagcagcccugcccugggcggaacauucccgccugcucccugguggcccccuggaccaccgcccaccaauuucucuagucuggagcuggagccacggggccagcaaccggucgcaaaagccgagggcaguccuaccgccauccucauugggugcuugguggcuaucauccugcuucuguuacuuaucauugcccugaugcuguggcgacugcauuggaggaggcuucucuccaaagcugaacggcgcgugcuggaggaggagcucacugugcaucugagcguaccuggagacaccauccugauaaacaaccgcccuggccccagagaacccccgccuuaucaagaaccccgcccaagaggcaacccaccacacucagcuccuugcguccccaauggcagcgccuuguuguuauccaaucccgcuuaccgucucuugcuggccaccuaugcccggcccccccggggucccggcccccccacuccugcgugggcaaaaccuacuaacacgcaagcuuacuccggugacuacauggagccugaaaaaccgggggcaccccugcuaccucccccuccccagaauagcgugccacauuacgccgaggcagauaucgucacauugcagggcguaaccggaggaaacaccuaugcggugcccgcucucccuccgggugccgucggugauggcccuccccggguugacuuuccucggucaaggcuaagauucaaagagaaacucggcgagggccaauuuggggaagugcaucucugcgaagucgacucaccacaggaccucguuucccucgacuuucccuugaauguuagaaagggacacccauugcugguugcagucaagauccuacggcccgacgcgacaaagaaugcccguaacgauuuuuugaaggagguuaaaauuaugucaagauuaaaggauccuaacauuaucaggcuacugggugugugcguucaggacgauccccuaugcaugaucacagacuacauggagaacggggauuugaaucaguuccugucagcccaucagcuggaggacaaggcugccgagggcgcucccggcgacgggcaagcugcccaaggcccuaccauuaguuaucccauguuacugcauguggcugcgcagaucgccagcgggaugagguaccucgcuacccugaacuucguccaccgggaucucgcuacaagaaauugccuagugggugagaacuuuaccauaaaaaucgcagacuucggcaugagccgcaaucucuacgcaggcgacuauuaucgggugcaaggaagggcaguguuacccauuagauggauggccugggagugcauacugauggggaaauuuacuaccgccuccgacguuugggccuucggugugacacuuugggaaguuuugauguugugccgggcucagcccuuuggccagcucacagaugagcaagugauugaaaacgcuggugaauucuuccgagaccaggggcgacagguguaucugucccggcccccugccugcccucagggucuguaugagcucaugcuucgcugcugguccagagagucagaacagaggcccccauucagccagcugcaucgguuccucgccgaggacgcccuaaauacugucuag

SEQ ID NO: 289069 - RNA, 2742 nt, Artificial Sequence
  derived and/or modified sequence
augggacccgaggcuuugucguccuuacuuuuacucuugcuuguagcuagcggugaugcagauaugaaaggccauuucgaccccgccaaaugcagauaugcgcuugggaugcaagaucggacuauuccugauucugacauaucagcuuccuccucuugguccgacuccacugcagcaaggcauucucgccucgaaaguucagauggcgacggcgcuuggugcccagccggcagcgucuucccgaaagaagaggaauaucugcaaguggaccugcagagacugcaccugguagcacuggugggaacacaggggcgccaugccggcggucuggguaaagaauucucaaggagcuaccggcuacgcuauaguagggauggaaggcgcuggaugggguggaaagaccgcuggggucaggaagugaucucugggaaugaggaccccgaaggggucgucuugaaggaucugggcccacccaugguggcacggcuggugcgauucuauccucgugcugaucgcguuauguccguuugccuacgcgucgaacuguauggaugccuauggcgggauggauugcucagcuacacugccccaguagggcaaaccauguaucuuuccgaagcaguguaucugaaugauaguacauaugacggucacaccgucgggggucugcaauaugggggacuuggacaguuggcagacggugucguggggcuggacgauuucagaaaaagucaagaacugcgcguauggccuggcuacgauuacguuggcuggagcaaccacuccuucucuucgggcuaugucgaaauggaguuugaguuugaccgacuccgugccuuucaagccaugcagguucacuguaacaacaugcauacccugggggcucgccuuccaggcgggguggaaugcagguucaggcgcggcccugcgauggccugggaaggugaacccaugagacauaacuugggcgggaacuugggugauccccgggcgcgagccgugucagucccgcuuggagggcgaguggcccguuuucuccagugucgcuuccuguucgcgggacccuggcugcuuuucuccgaaauuucuuucaucucugacguggucaauaacuccucuccugcucuaggcgggacuuuuccaccugcuccuugguggccacccgggccccccccgaccaacuucagcucucuggaacucgagccaagagggcaacagcccgucgcgaaagcugagggguccccuacugcaauuuuaauuggaugucuuguugccauuauacuguuguuacugcuaaucauugcucuaaugcuguggcgccugcauuggcggcgccuccucucuaaggcagagaggcgugugcucgaagaggagcugacaguacaucuauccgucccaggagacacaauacuuauaaauaaucgaccaggcccacgugagcccccuccuuaccaggaaccaagaccaagagggaauccaccccauuccgccccuugcgugccuaacggaucugcucuguuguuaagcaauccagcauauaggcugcucuuggcuacuuaugccagaccgcccaggggacccggccccccuacccccgcaugggcgaagccgaccaauacucaggcauacucaggagacuacauggaaccugaaaaacccggggcuccacugcugcccccucccccacagaacuccgucccucacuacgccgaagccgauaucgucacuuugcaaggcguaacuggcgguaacacguacgccgugccagcgcugccuccgggcgccgugggcgauggacccccuagaguggauuucccccgguccagacugcgguucaaagaaaaacugggagaagggcaauuuggagaaguccaccugugcgagguagacucaccacaggaucuugucagcuuggauuucccacugaacgucaggaagggccauccucugcucguggcagucaaaaucuuacgccccgacgcgaccaaaaacgcacgaaacgacuuccuuaaggaggucaagaucaugagccggcucaaggauccaaauauuauuaggcuguugggugugugugugcaggacgauccccugugcaugauuacagacuacauggaaaacggcgauuuaaaucaguuccuuucagcccaccagcuggaagacaaagcggcggaaggagcacccggcgacggacaggccgcccagggccccacaaucagcuacccuaugcugcuucaugucgcugcacagauagcauccggaaugcgauaucucgcgacccucaacuucguccauagggaccuugccacccgaaauugcuuagucggggagaauuucacuauuaaaauugcugacuucggaaugucaagaaaccucuacgcaggcgacuauuauagagugcagggacgggccguacugccaauacguuggauggccugggagugcauccucauggguaaguuuaccacggcuucagaugugugggcuuuugggguaacacucugggaagucuuaaugcuguguagagcucagccuuuugggcagcugaccgacgaacaggugauugagaaugcuggcgaguucuuccgggaccaggggcggcagguguauuuaagccgaccucccgcaugcccgcaaggccuuuacgagcuuauguugagaugcuggagucgggaaucagaacagcgaccacccuucucacagcuucaucgguuucucgcugaggaugcccuuaauacuguguag

SEQ ID NO: 289070 - RNA, 2742 nt, Artificial Sequence
  derived and/or modified sequence
augggacccgaagcccuaucuagucugcuacuucuccuccucguggcaaguggggaugcagauaugaagggccauuucgauccagcuaaguguagauaugcacugggcaugcaggauaggacaauccccgauucugacauaucugccucauccagcuggucugacagcaccgcugcuagacauucuagauuggaguccucagauggagauggcgccuggugcccagcagguuccgucuuuccuaaagaggaagaguaucugcaaguggaucuccagagguuacaucugguugcccuggucggcacccaggguaggcacgccggcgggcuagggaaggaguucucaagaaguuauagacugagauauucacgggacggcaggcgauggaugggcuggaaggauagauggggacaggagguaauuucaggcaacgaggaccccgaaggcgugguacucaaggacuuagggccacccaugguggcucggcuggugagauucuacccucgggccgaccgcguaaugagcgucugucuaagaguggaauuguacggaugucuguggagggacggacugcuuucauauaccgccccugugggacagaccauguaucucagcgaggccguguauuuaaacgauagcacguaugauggacauacugugggaggacuucaguacgguggucugggucaacuggccgacggugugguuggccucgacgacuuuagaaaaucccaagagcugagaguguggccuggguacgauuauguggguuggaguaaccauucuuuuucaagcggcuacguggagauggaguucgaauucgauagacugcgggcuuuucaggccaugcagguucacugcaauaauaugcauacccugggcgcccgucuuccaggagguguggaauguagauuccggcgcggcccagcgauggccugggagggggagccuaugcgccauaaucuggguggcaaucugggcgacccgcgcgcucgcgccgugagugugccucucggcggacguguggcccgguuccugcaaugucgcuuucuguuugcugggcccuggcuccuguuuagcgagaucucauucaucagcgacgugguaaacaauucauccccggcauuaggcggaacauuuccuccugccccuugguggccaccaggcccaccaccuacaaauuucaguucacuggagcucgaaccaagggggcaacagccaguugccaaagcagaaggcagccccacagcaaucuugaucgggugucugguggccaucauucuucuccugcuucugaucaucgcacucauguuauggcgcuugcauuggaggcgucugcugucgaaggcugaaagaagaguuuuggaggaggaguugacugugcaccucuccguaccuggcgauaccauacucauuaauaaccgcccagggccuagagagcccccucccuaccaggagccucggccacgggggaaccccccucauucugcacccuguguuccaaacggaagcgcccuccuguuaucaaauccggccuaccggcuacuauuagccaccuaugcaagaccacccaggggaccaggucccccuacgccagcaugggcuaagcccacgaacacucaagcauauucuggcgacuauauggagccugagaagccaggcgcaccccugcugccucccccaccucagaacuccgugccccauuaugccgaagccgauaucgugacccugcaaggagucaccggggguaauaccuaugcugugcccgcucucccuccuggagcugucggagauggaccaccccggguggacuuuccacggucccggcuuagguucaaagaaaaauuaggcgaagggcaguuuggcgaaguucauuuaugugaaguugacucuccucaagaucuugucucucuggauuucccacuaaacgugcgaaaaggacacccccuacucguagcuguuaagauccugaggccugacgcuaccaagaacgcccgcaacgacuuucucaaagagguuaaaaucauguccaggcugaaggaucccaauauuauacggcuucucgggguuugcgugcaggacgauccucuguguaugaucaccgacuacauggaaaacggggaucuuaaccaguuccucagcgcucaccagcuggaagacaaggcugcugagggagccccuggggacggacaagccgcucaggguccgaccaucucguaccccaugcuacuacacguggcagcacagaucgcaucagguaugcguuaccuggcuacccucaacuucguucaccgcgaccucgcuacacgcaauugccuugucggagagaauuuuacaauuaagaucgccgauuucggcaugucuagaaauuuguaugccggagacuauuacagagugcaggguagagcaguccugccgauccgguggauggcuugggaaugcauccucaugggcaaauucacuacggccuccgacgugugggccuuuggugugacauugugggagguccuuaugcucugucgcgcacagcccuuuggucagcugacugacgaacagguaauugaaaaugccggagaguuuuuuagagaccagggccgccaaguguaccuuagccggccuccagcgugcccgcagggacuguaugagcuuaugcugcgguguuggaguagggaaagugaacagagaccaccauucagccaguuacaucguuucuuggccgaggacgcauugaacacaguauag

SEQ ID NO: 289071 - RNA, 2742 nt, Artificial Sequence
  derived and/or modified sequence
augggcccagaagcacugucaucccugcuucuuuugcuccucguggcuagcggugaugcagacaugaaggggcacuucgacccugcuaagugucgguaugcuuuaggcaugcaagaccgaacaauucccgauucagauauuucugcuucaagcagcuggagcgacagcacagcagccagacauucucgucuugaauccagcgacggugauggcgcauggugcccagcgggaucaguguuuccuaaggaagaagaguaucuccaggucgaccuacaacgucuucaccugguugcccuuguggguacccaggguagacacgcaggaggcuugggcaaggaauuuucacggagcuaucgccugcguuacagccgggaugggcgacguuggaugggcuggaaggaucgcugggggcaagaggugauuagcggcaaugaggaccccgaagggguaguacucaaagaucugggcccgccaaugguugcaaggcucguccgauuuuauccccgagccgacagagugaugucaguuugucugcggguugagcuguauggcugucuguggcgagauggacuguugagcuauacagcuccagugggccaaacaauguacuuaucugaggccguguaccugaaugauagcaccuaugacgggcacacggugggcgggcugcaauacggaggccuaggacagcuugcugauggagucguggggcuggaugacuucagaaagucacaggaacuucggguguggccgggauaugacuacguuggcuggaguaaucauuccuuuagcagcgguuacguggaaauggaauuugaauucgauagacucagggccuuucaggcaaugcaaguacauuguaauaacaugcauacucugggugccagacuacccgggggagucgaaugucgcuucaggagagggcccgccauggccugggagggugagccuaugagacauaaccugggaggcaaucucggugauccccgagcccgcgcagugucaguuccccuuggcggacggguagcacgguuccuccagugucgcuuccuuuuugccggccccuggcugcuauucucagaaauuucguucauauccgacgucguuaacaauaguucuccugcauugggggguacauucccaccagcuccaugguggccaccugguccaccaccgaccaauuuuucuagucuggagcucgagccgagaggccaacagccaguggccaaagcagagggcucuccgaccgccaucuuaaucgggugccucgucgcaauuauucugcuucugcuucucaucaucgcgcugaugcuguggcgacuucauuggagaaggcuauuaaguaaggccgagcgccgggugcuggaagaggagcugacaguccaucugagcguacccggcgacaccauccuuaucaacaacagacccggaccccgcgagccuccaccauaccaggaacccagaccucgcggcaauccaccccacucggcacccugcgucccaaacggaucggcucugcugcugaguaaccccgccuaccggcugcugcuggccaccuaugcacgcccgcccagaggccccgguccaccuacaccagccugggcuaagccuacuaacacucaagccuacaguggugacuacauggagcccgagaagccuggcgccccccuacucccuccuccgccccagaacucuguaccacacuacgcagaggccgauaucguaacacugcagggcgugacgggaggcaauacauacgccguuccagcucucccuccaggagcuguuggugauggcccacccagaguagacuuccccagaucaaggcugagguuuaaagagaaacuuggcgaggggcaguuuggugagguucaucuuugugagguagacucaccccaggacuugguaucucuggauuuuccgcucaacgucagaaaagggcauccacuacuggucgccgugaaaaucuuaagaccugaugcuaccaaaaacgcucgaaacgacuuucugaaagaagugaagaucaugucacggcuaaaagacccaaacauaauccgccuguuaggugucuguguacaggaugauccacugugcaugauuacagauuauauggagaauggagaccugaaccaguucuugucugcccaucagcuggaagacaaggccgccgagggcgccccuggcgacgggcaagcugcgcaaggaccaacgauuagcuacccuaugcugcuacacguggccgcucagauagcaucuggaaugagguaucuagcaacacugaacuuugugcaccgcgaucuggcuacuagaaacugucugguaggggaaaacuucaccauuaaaauugccgauuuuggaaugucaagaaauuuguacgccggcgauuauuaucgaguacaagggcgagccgugcugccaauuagauggauggccugggaauguauccugaugggcaaguucaccacugcaagcgacgucugggccuucggagugacucuuugggaagugcugaugcugugucgcgcccagcccuucggccagcucacggaugagcaggucauugagaaugcgggagaauuuuuccgcgaccaggguaggcagguguacuuaucacgcccgccugcgugcccccaggggcuguacgagcugaugcugcgguguuggaguagggaguccgaacagagaccacccuucucucaacuccaucgcuuucucgcugaagaugcuuugaauacuguuuag

SEQ ID NO: 289072 - RNA, 2742 nt, Artificial Sequence
  derived and/or modified sequence
auggggccagaagcccuguccucucugcuguuacuguugcugguugcuagcggugaugccgauaugaaagggcacuucgauccggcaaaaugucgguaugcccuuggcaugcaagaucggacaaucccugauucagacauuucugcuagcucuucuugguccgauucuacggcagccaggcauagucguuuggagucgucugauggcgacggugcuuggugucccgcugguucuguguucccuaaggaagaagaguaccuacaagucgaucuccagcgccuccaccugguggcccugguugguacgcagggucggcaugcgggaggccucggcaaggaguucaguaggagcuacaggcugcgguauagucgagauggacgccgguggaugggcuggaaggacagauggggccaggaaguuaucucaggcaaugaggaucccgaggguguagugcuuaaggaccuggggccuccaauggucgccagacucgugcgcuuuuauccaagagcagaucguguuaugucugugugccuaagggucgagcuauacggaugccuguggcgggacggccuguugaguuacacugcgccugugggacagacuauguaccugucugaggcuguguauuugaaugauagcaccuacgacggucauacuguugggggacuccaguaugggggccuagggcagcuggcggacggugucgucggguuagaugacuuucguaagucucaagaauuaagggucuggccuggcuacgauuacgugggguggagcaaccauucuuucagcuccggcuaugucgagauggaguuugaguucgaccggcuuagagccuuccaggccaugcagguucacugcaauaauaugcauacucucggcgcaagacuccccggaggggucgagugccgguuucgcaggggccccgccauggcaugggaaggcgaaccgaugagacacaaccugggcggcaaccugggugacccgagagcuagggcugugucugucccacucggcggccggguugcucgguuccuucagugccgauuucuguuugcaggcccauggcugcucuucucugagauuucauuuauauccgaugucgugaauaauucuuccccugcucucgguggaacauucccccccgcuccaugguggccaccaggcccuccuccuaccaauuucagcaguuuagaacuagaaccaaggggccagcagcccguggcaaaagccgagggaucccccacagcuauacucauuggaugucugguggcuauuauccugcuucuacuccugauuauagcucucaugcucuggcgacuccacuggagaagauuacugucgaaggccgagaggagaguacuggaggaagagcucacagugcaccugaguguucccggagacaccauucugaucaauaauagaccaggcccaagggaacccccccccuaccaagagcccagaccuagagggaauccaccccauucugcaccuugcgucccaaacggcucagcucuccugcugucaaaccccgccuacagacugcuccuggcuacguaugcgagacccccaaggggaccagguccccccacacccgcuugggcuaaaccaaccaacacacaggccuacaguggugacuacauggaacccgaaaaaccuggcgcuccccucuuaccaccuccaccucagaacucaguuccccacuacgcagaggcagauauugucaccuuacagggagucacugggggaaacaccuaugcugugccagcccucccuccaggugccguaggcgaugggccuccaagagucgauuucccgagaucuagacugcgauucaaggagaaacuuggggagggccaguucggggaaguccaucugugcgaagucgacuccccucaggaccuggugucccuggacuuuccacugaauguccgaaagggccacccccucuuaguagccgugaagauccuuagaccagaugccacuaaaaacgcacggaaugacuuucugaaggaagucaaaauuaugucccgguuaaaagaccccaacauuauccggcuucuuggaguauguguucaggaugauccccuuuguaugaucaccgacuauauggaaaacggggacuuaaaucaguuccugucagcacaucaacucgaagacaaggccgcugagggugcaccuggagacggccaggcagcccaggggccuacuauuagcuacccuaugcucuuacacgucgcagcccagaucgcaucugggaugagguaccucgcuacccugaauuucguucaucgcgaccuugccacucgcaauugucucgucggugaaaauuuuacaauuaagaucgccgacuuuggcaugucccgaaaucuguacgcaggagacuacuauagagugcaggguagagcuguucugcccauccgguggauggcuugggaguguauacucaugggaaaauuuacuacugcuagcgacgugugggccuucggugucacccugugggagguccugaugcuaugccgugcacagccauucggacaacucacugaugagcagguuauugaaaaugccggugaguuuuuucgcgaucaggggcgucagguuuaccucucccgcccuccagccuguccccaaggacuguacgaauugaugcugcgcugcuggucacgcgagagcgaacagagaccacccuuuucacaguugcaucgcuuccuggcugaggacgcccugaacacaguguag

SEQ ID NO: 289073 - RNA, 2742 nt, Artificial Sequence
  derived and/or modified sequence
augggacccgaggcccucucuucacuucugcuucugcugcuaguggccucgggagaugccgacaugaaagggcacuuugacccugcaaagugcagguacgcacuuggaaugcaggaucggacaauccccgacagugauaucucugccuccucaucuuggucugauagcacugccgcccgccacucacggcuagaaagcucagacggagacggggcuuggugcccggcaggaaguguguuuccuaaggaggaagaguaucuccagguggaccuucaacgcuuacaccucguggcccugguggggacccaaggaagacaugccggcggccuggggaaggaguucucuagauccuauaggcugagguacaguagagacggacguagauggaugggguggaaggacagguggggucaggaggugauauccgguaacgaagacccagaaggugugguccugaaagauuuaggcccaccuaugguggcaaggcuggucagauuuuauccgcgggccgaucgaguaaugucuguguguuugagagucgaguuguacgggugucuauggcgggauggacuuuuaucguauacggcgccggugggucagacuauguacuuguccgaagccguguauuugaacgacuccaccuacgacgggcauaccguagggggcuuacaguacgguggacugggacaacuggccgauggagucguaggccuagaugauuuucgcaaaucacaagaauuaaggguguggccaggcuacgauuacgugggguggucuaaucacucuuuuuccucuggguauguggagauggaguucgaguucgaucggcugcgggccuuccaggcuaugcagguucacugcaauaacaugcacacccucggugcaagacugcccggcggcgucgagugucguuucagaagagggccugcuauggcuugggagggugaaccuaugcgccauaaucuuggaggcaaccucggggauccccgcgcccgagcuguuucagugccccuggguggucggguugcuagauuccuacagugucgguuucucuuugccgggccguggcugcuuuuuucagagauuaguuuuauaucggacguggugaacaauucaucaccugcacucgggggcaccuucccuccugccccgugguggcccccgggacccccucccaccaauuuuagcaguuuggagcuggagccaagggggcagcaaccgguggcuaaagcugagggcucucccacggccaucuuaauuggcuguuuaguggccauaauccuucuucucuuauugaucauugcccugaugcuguggcgacugcacuggcggcgacugcucucuaaagcagaacguagaguuuuagaagaagagcucacugugcaccucucagucccgggagauaccauacucauaaauaauagaccugguccucgcgaaccgccuccuuaccaggagccaagaccgcgagggaacccaccacauagugccccuugcgugccuaacggcagugcucuccugcuguccaaccccgcguacagacugcuccucgcaacauaugccagaccaccacgggggcccggcccgccaacuccagcaugggccaagcccacaaacacgcaggcuuacucuggagauuauauggagccagagaagccaggagcaccacuacucccgcccccuccccaaaauucugucccgcacuaugcagaggccgacaucguuacccuccaaggugugacugguggaaauaccuaugccguacccgccuuaccucccggugccguaggugaugggcccccaagagucgauuucccgcggucaaggcugagauucaaggagaaacugggagagggucaguucggggagguucaccugugcgagguggacaguccucaggaccuugugucucuggacuucccucucaacguaagaaaaggucacccccucuuaguggccgugaagauucugagaccggacgcgacuaagaacgccagaaacgauuuucucaaagagguuaagaucaugucccgacugaaagauccaaacaucauacgccugcuuggagugugcgugcaagacgauccacuguguaugauuacagacuauauggaaaauggcgaccuaaaccaguuucuuuccgcccaucaguuagaggacaaagcagccgaaggugcaccaggcgauggccaggcagcccaggggccuacaauuucuuacccaauguugcuccacguugccgcacagauugcuaguggaaugcgguaccuugccacacuuaacuucguccaccgggaccuggcaacgaggaacugucuggugggagagaacuuuacaauaaagauagccgauuucggaauguccaggaaccucuacgcaggugacuacuacaggguccagggcagggcagugcuuccaauccguuggauggcaugggaguguauauugauggggaaauucaccacugcaagcgaugucugggcuuuuggagucacacucugggaaguucugaugcuuugucgugcgcaaccauuuggccagcugacagacgaacagguaauugagaaugcuggggaguuuuuuagagaccaagggcgucaggucuaccucucucguccuccagccuguccucaggguuuguaugagcugaugcugagaugcuggucacgggagagugagcagaggccuccuuuuucacagcugcacagguuccuagccgaggaugcacuuaauacuguuuag

SEQ ID NO: 289074 - RNA, 2742 nt, Artificial Sequence
  derived and/or modified sequence
auggggccagaggcccugagcucucuacuuuugcuguuauuaguugcuaguggcgacgcggacaugaagggacacuucgacccugcuaaaugccgguaugcuuuaggcaugcaggacagaacuaucccugauucugauauaagugccucaucaucauggagugauucuacagccgcuagacauucccgacuggaaagcagugacggagauggagccuggugcccggcuggaagugucuuuccuaaagaagaagaauacuuacagguagaucugcagcgucugcaucuaguggcccuuguaggcacucagggacggcacgcgggaggacuggguaaggaguucucucguaguuacaggcugagguauuccagagacggcaggcgguggaugggguggaaggaccgcuggggacaggaagucaucuccggcaacgaagauccugagggaguugugcugaaagacuuggggccccccaugguggcgcggcuuguuagauucuacccaagggcugaccggguuaugagcgugugccucagaguggagcucuacggaugucuguggagagacggacuucucaguuauacagcgcccgucggucagaccauguaucugagcgaggccguguaucugaacgacucuacguacgaugggcacacugucggggggcuccaguacggaggauugggacaacucgcagacggagugguaggcuuggaugacuucaggaagucucaggaauugcggguuuggccuggguacgacuacgucgggugguccaaucacagcuuuuccucaggauacgucgagauggaguucgaguucgacagguuaagggcuuuccaggccaugcagguccacugcaacaacaugcacacuuuaggggccagacuucccgggggaguugaaugucgauuucgccgaggaccagcgauggcuugggagggagagccaaugcggcauaaucugggaggcaauuuaggcgauccaagggcucgcgccgugucuguacccuuggguggaagagucgccagguuccuucagugcagguuucuguuugcaggcccaugguuauuguucagcgagaucucauuuaucucugauguggucaauaauucaucuccagcacuuggcggcaccuucccgccugccccuugguggccccccgguccccccccuaccaacuucucaucacucgaacuagagccucgaggacaacagcccguggccaaagccgaaggauccccuacugcaauauugauuggcugccucgucgcuauuauacuguuacugcuucugauuauugcgcugaugcuuuggcggcuccauuggaggagacugcugucuaaggcugagcgcaggguacuggaagaagagcuuacaguccaccuguccgugccaggugacacaauccugaucaacaacaggccaggucccagagaacccccaccuuaccaggagcccagaccuagaggaaauccaccacauagugcuccgugcgugcccaauggaagcgcucugcuuuugaguaaccccgcuuaucgcuuacuucuagccacuuaugcccggcccccccgcggaccagggccaccaaccccagccugggccaagccuaccaauacucaagccuacaguggugacuauauggaacccgagaagccuggcgccccgcuucucccaccccccccucagaacaguguaccccacuacgccgaggccgauaucgugacccuccaaggagugacaggcggcaauaccuacgcaguaccugcacugccaccaggagccguaggggacgguccccccagaguggacuucccacgaucuagauugagauuuaaagaaaagcugggagaaggacaguuuggggagguucaucugugcgaaguagauucuccccaggaccugguuucucuggauuucccccucaauguccgaaaaggccauccucuucuagucgccguaaaaauucuccggccugacgcuacaaagaacgcccggaaugauuuccugaaagaaguuaagaucaugagccgccucaaagaucccaacaucaucagacuccuggggguguguguacaggaugacccgcuuuguaugauuacugacuacauggagaacggcgaccucaaucaguucuuguccgcccaccagcucgaagacaaggccgcggagggggcuccuggcgacgggcaggccgcgcaggggccuacuauuaguuacccaaugcuucugcacguugccgcccagaucgcuaguggaaugagguaucucgcuacucuuaacuucguccauagggaucuugccacccgcaauugccucgucggugaaaauuuuacgauuaagauugccgauuucgguaugucgcggaacuuauaugccggcgacuacuacagggugcagggccgggcugugcugccaauccgcuggauggcaugggaaugcauccuuaugggcaaguuuacuacugcuucugacguaugggcuuuuggugugacucucugggagguauugaugcugugcagggcacaaccguuuggccaauugacggaugagcaggugauagagaacgcaggcgaguucuucagggaucaggguaggcagguguaucucagccggccccccgcuugcccccagggccuguacgagcugaugcugagguguuggucccgcgaaagugagcagaggccuccauuuucccaguuacacagauuccuugcagaagaugcccucaacacaguguag

SEQ ID NO: 289075 - RNA, 2742 nt, Artificial Sequence
  derived and/or modified sequence
auggggccugaggcccuguccucauuacuccuucugcuccugguggcaagcggcgaugccgacaugaagggccacuuugauccugccaaaugucgcuacgcccuuggaaugcaggaucggacaauuccagacucugacauaagcgccucaaguagcuggucugacagcacagccgcccgccauucuaggcuugaauccagugacggcgacggcgccuggugcccggccggcaguguguucccgaaggaagaagaguauuuacagguggacuuacagaggcuacaucugguagcucucguugguacccagggacgacacgcuggcggacucgggaaagaguucagccgcagcuaucgccuacgguacucuagagaugggaggcgcuggaugggauggaaagacagguggggucaagaaguaauaagcggaaacgaagaucccgaaggaguuguccugaaagaucucgguccuccgaugguugcacgguuagugagauucuauccuagagcagacagagucaugucuguaugucuacgcguagagcucuacggcugucuuuggcgcgacggccuucugucuuacacugcgccagugggacaaacuauguaccucagcgaggcaguguaucugaaugacaguacuuaugacggccacaccguaggaggucugcaguauggaggacuggggcaguuggcugauggaguggugggccuugacgacuuuaggaagagccaggagcuuagggucuggccgggcuacgacuacguuggguggaguaaucacuccuucaguaguggcuacgucgaaauggaguucgaauuugaucgacugcgagccuuucaggcaaugcaggugcacugcaauaacaugcauaccuugggcgcccgcuuaccaggggggguugaaugcagauuuaggagaggcccagcaauggcgugggagggcgagccaaugcggcauaaucuggggggcaacuugggcgauccccgugcuagagcggugucugugccuuuagguggucgcguagcgagauuccuacaaugccgguuccucuucgcugguccuugguugcucuucagugaaauauccuuuauauccgacguugugaacaauuccucccccgcgcuagguggaacguucccacccgcgccaugguggccgccuggacccccccccacuaacuuuuccucgcuggaacuugaaccccgaggccagcagcccguagcaaaggcggaaggcagcccaaccgccauccucaucggaugccuaguggcuaucauccuccuucuguuacucauaauugcacugauguuguggcggcugcacuggcggcgacugcucucuaaggccgagagacggguauuggaggaggaacugaccguucaucuguccgugccaggugacacaauacuaaucaauaauaggccuggccccagagaacccccccccuaucaagaaccgagaccacgcgggaaucccccucauagcgcacccugcgugccgaacggaucugcccugcugcuuucuaaccccgccuaucgccuguuacucgccacuuacgcccggccaccccgcggacccggaccaccaacacccgcuugggccaaaccaacaaauacacaggccuacuccggugacuauauggaacccgaaaagccuggcgccccucugcugccccccccgccccagaacagcgugccccauuacgcugaagccgacaucgugacucugcaggggguaacaggggggaacaccuacgcaguacccgcccuuccacccggggcggucggggacggcccuccacgggucgauuucccucggucacgccugcgcuuuaaggaaaaguugggugagggccaguuuggcgagguacaccuuugugaaguggacagcccucaagaccuggugucguuagacuucccccucaauguccguaaaggacauccccugcugguggccgucaagauccugcggccugaugcaacaaaaaacgcucgcaaugauuuucugaaagaaguaaagaucaugagcaggcucaaggauccaaauaucauacgacugcuugggguguguguccaggacgacccguugugcaugauuacggauuacauggaaaacggcgaccugaaucaauuccuguccgcccaucaacucgaggacaaagcagcugagggugcuccuggcgauggucaagcugcucagggaccuacaauuucauacccgaugcugcugcauguugcugcccagauugccuccgggaugcgguaccuggcuacuuugaacuuugugcauagagaucuugcaacacgcaacugucugguuggcgagaauuuuacaaucaagauugcugacuuuggcaugucaagaaaccucuacgccggugacuacuacagaguacaaggucgagcagugcugcccauccgguggauggcuugggaaugcauacugaugggcaaauuuaccacggccagugacgucugggccuucggcgugaccuugugggagguccugauguugugccgggcccaacccuucggacaacucaccgacgaacaagugaucgagaaugcuggagaauuuuuccgggaccagggucggcaagucuauuuauccaggcccccugcaugcccucagggccuguacgaguugaugcuccggugcuggaguagagaaagcgagcaacgcccccccuucagucagcugcacagguuucucgcagaagacgcuuugaauacuguuuag

SEQ ID NO: 289076 - RNA, 2742 nt, Artificial Sequence
  derived and/or modified sequence
augggcccagaagcacuaagcucccuguugcugcucuuacugguggcaagcggcgacgcagauaugaaaggccauuucgauccugcuaaaugccgguacgcccugggcaugcaggaccguaccaucccagauucagacauaagugccucuaguucuuggagugacucaaccgcugcaaggcacucccgauuggaguccucagauggcgauggggccugguguccagcaggcucgguguuccccaaagaggaggaguaucuccaggucgaucuccagcgacuucaccuggucgcauugguugguacccagggcaggcacgcaggcgggcugggaaaagaguucucucgaaguuacaggcucagguacucaagagauggacgccgguggaugggauggaaggauagguggggucaggaggugauaagcgguaacgaggaucccgagggaguggugcucaaggaucuggguccacccaugguggcacggcuagugcgauuuuacccuagagcugaccgcguaaugucugugugucugaggguugaauuguacggcugccuuuggagagauggucucuugaguuacacagccccugugggccaaacaauguaucugagugaggcaguguaccugaacgauucaacauaugauggacauaccgugggggggcuccaguacggcggacugggccagcuggcagacggaguggugggucucgaugacuuccgaaaaucacaggaauugcggguguggccaggcuacgacuauguggguuggucuaaucauaguuucucuuccgguuacguggaaauggaauuugaguuugacaggcuccgagccuuucaagcuaugcaggugcauuguaacaacaugcacacacugggugcuaggcugccaggcggaguagagugccgcuuccgcagaggacccgcaauggcaugggagggagagcccaugcggcacaaccuuggcggcaaucuaggcgacccuagagccagggcggucucagucccucugggagguaggguggcccgcuuucugcaguguagguuucuguucgccgggccguggcuucucuucuccgaaaucuccuuuaucucagacguugucaacaauaguagucccgcucucgggggaacguucccccccgccccaugguggccuccuggaccacccccuacuaauuuuucuucucucgagcuagaacccagaggacagcagccaguggcaaaggcugaggggucaccuacugcaauuuuaaucgggugccugguggcuaucauucugcuccugcugcuuaucaucgcccugaugcuguggaggcuucauuggcggaggcuuuuaagcaaagccgaacgcaggguacuugaggaagagcugaccgugcauuugucugugccaggagacacaauccuuaucaacaacaggccuggcccaagggaaccaccaccauaucaggagcccagaccaagaggcaauccgccacauucagccccaugugucccaaaugguucugcccuucuccuuaguaauccagcuuaccgguuacuucuugcuacauacgccaggccuccgcggggaccggggccuccuaccccugcaugggccaagccaacaaauacccaagcuuacucuggcgacuauauggagccggagaagccuggagccccccugcucccucccccaccgcaaaauucagugccgcacuacgcugaggcggauaucguaacacugcaaggagucacaggcggaaauacuuaugccguucccgcucuucccccuggcgccgugggcgacggcccgccgagaguggauuuccccagaucucgcuugagauuuaaggaaaaauuaggagagggccaauuuggagagguucaucugugcgaaguggauucuccucaagacuugguuucccuggacuuuccacugaacguaaggaagggccacccucuucuggucgcuguaaagauucugagacccgaugccaccaagaaugcccguaaugacuuccugaaggaaguuaagauuaugucucgacugaaagacccaaacaucauuagguuacugggagucuguguucaggaugacccucuguguaugaucacugacuacauggaaaacggcgaccuuaaucaauuccucuccgcucaccaguuagaagauaaggcagccgagggcgccccaggagacggucaggccgcccagggacccacaauaagcuaccccaugcuccugcacguggccgcacagauugcuuccggaaugcgauaucuggccaccuugaacuucguccacagagaucucgcaacuagaaauugucuggugggagagaacuuuaccaucaagauugcugauuucgguaugucacggaaccuguacgcaggcgacuauuaccgcgugcagggacgggccguccugccaauacgcuggauggcaugggagugcauacuaaugggcaaauuuaccacugccagugaugucugggcauuuggagugacccugugggaggugcugaugcuaugcagggcacaaccauucggacagcugacggaugagcagguaauugaaaacgcaggcgaauuuuuccgcgaccaaggacgacagguauaucuuucccgaccccccgccugcccccagggacucuacgaacucaugcuuagaugcuggagccgagagagugagcagaggccccccuuuagucaacuccauagguucuuggccgaggaugcccugaauacaguguag

SEQ ID NO: 289077 - RNA, 2742 nt, Artificial Sequence
  derived and/or modified sequence
auggguccagaggcauugagcucauuauuauuacuucuccugguggcaagcggagacgccgauaugaaaggacauuuugacccugccaaaugccgcuaugcucugggaaugcaggaccgcaccauccccgauucggauaucuccgcaagcuccagcuggucugacucuaccgcggcucgacauucuagguuggaguccuccgauggcgauggugcaugguguccggcaggcucugucuuuccuaaagaagaggaguaucugcaaguugaccuccaacgacugcauuuaguagcucuggucggcacccaggguaggcacgccgggggucucggaaaggaauuuagccggucuuacagauuaagauauucgcgugaugggcgaagguggaugggauggaaggaccgcuggggccaggaagugaucaguggaaacgaggacccagaaggaguuguucugaaagaucuggguccccccauggucgcgcguuuaguucgguucuacccuagggccgaucgagucaugucagugugucugcggguugagcuauacggguguuuauggcgagacggccuauugagcuauacugcacccgucggucaaacuauguaccuuucugaggccguguaccugaacgauagcacauaugauggccacacagucggaggacugcaauacggagggcugggacaacuugcagacggaguuguuggccuggaugauuuucgaaaaucgcaggagcugaggguuuggcccggcuacgauuauguuggauggucaaaucauagcuuuucaucuggcuacguggagauggaguucgaguucgaccgccuucgugcuuuucaggcaaugcaggugcauugcaauaacaugcauacucucggugcucgacucccugguggaguggagugucgcuucaggcggggcccugcaauggcgugggaaggagaaccuaugcgucauaaccuuggcggcaacuuaggagacccccgugcgcgagcugucucugugccucugggcgguagaguggcaagauuucugcagugccgcuuccuuuuugcaggccccuggcugcucuucuccgagauuucuuucaucuccgacguggugaauaauucaagcccugccuugggcggaaccuuuccaccugcccccugguggccccccgggccaccccccaccaauuuuaguagcuuggagcuggagcccaggggucagcagccuguagccaaagccgaggggaguccuaccgcuauuuugaucgggugucuggucgcaauuauauuguugcuacugcuaauuaucgcccuaaugcuguggcgauugcacuggagacgacuguuauccaaggcggaacggcggguacuggaggaagaacugacugugcauuuguccgugccuggcgauacuaucuuaaucaauaacagaccaggcccucgggagccacccccuuaucaggaaccccguccgcgcggaaauccaccccacucagccccgugcgugcccaauggaucagccuugcuccugucuaaucccgccuacaggcuccugcuugcaacauaugcccgaccaccacgcggcccaggaccuccuacccccgcgugggcgaagccaacuaauacgcaggccuauagcggggauuacauggaacccgaaaagccaggugcaccacuucugccuccccccccucagaacuccgugccucauuaugcugaagcagacauuguuacucuccaaggcguuacagguggcaacacguacgcagugcccgcucugccaccaggcgcaguaggagacggaccaccacguguagauuuuccucguuccaggcugcgguucaaagagaagcuuggggaagggcaguuuggcgagguucaccucugcgaaguagauagcccacaggaccuggucuccuuagacuucccccugaacguaagaaaaggucauccgcuccugguggcugucaaaauucuucgcccggacgccaccaagaacgcacggaaugacuuucugaaagaggugaaaauaaugagccgucugaaagauccuaacauuauucgacuucucggcgugugcgugcaggaugaccccuuguguaugauaacagauuauauggagaauggugaucuaaaucaguuccuguccgcucaucagcucgaagacaaggccgcagaaggugcuccaggagacggccaagccgcacaagguccgaccauuuccuauccgaugcuguugcauguugcugcccaaauugcuagcgguaugcguuaccuagccacucugaacuucguccacagagaccuugcuaccagaaauugccuggugggugaaaauuucacuauaaaaaucgcggacuucggaauguccagaaaccuguaugcuggcgauuacuaccguguacagggacgcgcugugcugccgauuagguggauggcuugggaaugcauucucauggggaaguuuaccaccgccucagaugugugggcauuuggcgugaccuuaugggaggugcugaugcugugcagggcacagcccuucgggcagcuuaccgaugagcaggucauugagaaugcaggcgaguuuuuccgcgaucagggacgccaaguauaccucagccggcccccggcuugcccucagggauuguaugagcuaaugcugcgaugcuggagucgcgaguccgaacaaagaccaccauucucacagcugcacagauuucuagcugaggaugcacugaauacagucuag

SEQ ID NO: 289078 - RNA, 2742 nt, Artificial Sequence
  derived and/or modified sequence
augggcccugaagcccugaguucucuucuguuguuacuccucguggccagcggcgacgcugauaugaaaggucacuucgaucccgcaaaaugccgauaugcauuggggaugcaggaccggacuauccccgacuccgauauaagugcaucaagcuccuggagugauuccacugccgcacggcauucccgauuggaaaguagcgacggugauggcgcuuggugucccgcuggcucugucuucccaaaagaagaggaauaucugcaaguggaccuccagcgauugcacuuaguugcgcuuguggggacacagggccgccacgccggagggcuaggaaaagaauucucgagaucauauagacuucgauacucccgugacggccggcguuggauggguuggaaagacagaugggggcaagaggugauaucgggcaacgaagauccugagggaguggugcuaaaggaucuaggaccaccaauggucgcaagacucgugcgcuucuauccgagagccgaccguguaaugucuguuugccuccgaguugagcucuacggaugccuuuggcgagacgggcugcugucuuacacagcuccagucggacagacaauguacuugucagaagccguguaucucaacgauucuaccuacgauggccacacgguuggaggacugcaauacgggggucuggggcaacuugcugacggagugguaggccuggacgauuuccgaaagucccaggaguugagggucuggccaggcuacgauuaugucggguggucaaaccacaguuucaguagcggauacgucgaaauggaauuugaguucgaucgcuugcgcgcauuucaggcaaugcagguucauugcaauaauaugcacacccugggggccagacugccuggagggguugagugcagguuuagacgaggcccagccauggcuugggaaggcgagcccaugaggcacaaucuaggaggcaaucugggggaccccagagcaagggccgugucggugccuuuagggggccggguugcccgguuucugcaaugcagguuucuguuugcuggaccuuggcuauuauuuucagaaaucuccuucauuagugacgucguuaacaauucuucuccugcuuuaggcggcacuuuucccccugcuccuugguggcccccuggacccccuccaacaaauuuuaguagucuggaacucgagccccgcggccagcagccuguggccaaggcggagggcucuccuaccgcuauccucaucggcuguuuaguggcuauuauucugcuguuacuucugauaaucgcccugaugcuuuggcgccuucauuggcggcggcuuuugagcaaggccgaaaggcgaguguuggaggaagagcucacuguccauuuguccgugccuggugauacgauuuugaucaauaacagaccaggcccccgggagccccccccguaccaagaaccucgaccaaggggcaaucccccucauagcgcccccugugugcccaacgggagugcgcuucuucugaguaauccggccuacaggcucuugcucgccacuuacgcucggccuccuaggggccccgggccgcccacuccagccugggcgaagcccaccaauacacaagcuuacucaggugacuacauggagcccgaaaagccaggugccccuuuauugccucccccuccucagaauaguguaccucacuacgccgaagcugauaucgugacccuccagggcgucacuggggggaacacguaugccguucccgcacucccuccuggagccguaggagauggaccaccucgggucgacuuuccccgcucccggcugcguuucaaagagaaguuaggcgaagggcaguuuggcgaagugcaccucugugaaguagauagcccccaagaccuggugucccuggauuuuccacucaacguucggaaggggcacccucuguugguggccgugaagauccugcgacccgaugcaacaaaaaaugcaagaaacgauuucuugaaagaagugaagaucaugucuagacucaaggauccuaacauuauuagacuucugggcguguguguucaggaugacccacugugcaugaucaccgacuauauggagaacggcgaucuuaaucaguuccuuuccgcccaucaacucgaagauaaggcagccgagggggcgcccggggauggacaggccgcucaaggccccaccauuucauaccccaugcugcuccauguggccgcccagaucgccuccggcaugcgguaucuggccaccuuaaacuucguucacagggaccuggcuacacgcaauugccucgugggcgaaaacuucacaauaaagaucgcagacuucgguaugucacgaaaccuauacgcgggugacuacuacaggguucagggucgagcagugcugcccauucgauggauggcaugggagugcauucugauggggaaguuuaccacggccuccgacgugugggccuuuggaguuacucucugggaggugcucauguuguguagagcucaaccauuugggcaacuuacugacgaacaggugauagagaaugcuggcgaauuuuucagggaucagggacgccagguuuacuugagccggccgccugcgugcccacagggucuguaugagcucaugcuccguuguuggucgagagagagugagcagagaccuccauuuagccagcugcauagguucuuagccgaagacgcccugaacaccguguag

SEQ ID NO: 289079 - RNA, 2742 nt, Artificial Sequence
  derived and/or modified sequence
augggucccgaagcauugagcucccugcucuuacucuugcuuguggcaucuggagacgccgauaugaagggccauuucgaucccgccaagugucgcuaugcccuaggaaugcaagaucgaacaauccccgauucagauaucuccgccucgucauccugguccgauuccaccgcugccagacacucccggcucgagucaagugacggcgauggcgcauggugcccugcgggcucaguuuucccuaaggaggaagaauacuugcaaguggaccuacaaagacuacaucugguugcucucgugggaacucagggacggcaugcugggggucugggaaaggaauucucacgcucuuacaggcugagguacaguagagauggcagacgauggaugggcuggaaagacagguggggacaagaaguaaucucugggaaugaagauccugaaggugugguguuaaaggaccuggggccaccaaugguugcucgacuugugagauuuuauccccgggcugaccggguaaugagcguuugucucagaguggaacuuuauggaugccucuggcgcgacggccuucugucuuacacugcccccgugggccagaccauguaucuuagugaggccguuuaccugaaugauucaacuuacgacggacacaccguugggggacuccaguaugggggacugggccagcuggcagauggugucgucggauuagacgacuucaggaagagucaggaacuucgaguuuggcccggauaugacuacguuggauggucaaaccacaguuucucaagugguuacguggaaauggaauuugaguucgauagacugcgcgccuuucaagccaugcaaguccacugcaacaauaugcacacacugggugcucgccugcccggaggagucgaaugccgauuucgcaggggaccagccauggcuugggaaggcgagccaaugagacauaacuuagggggaaaucugggagacccucgggcccgcgccgugagugugccccuuggcggaagaguagcucguuuccuacaguguagauuucuguucgcuggcccgugguugcuuuuuagcgaaauuucuuucaucucggauguggugaacaacaguagccccgcacuuggugguacauuccccccugcuccgugguggccuccaggaccuccaccuacuaauuuuaguucacuagagcuugaaccacggggacaacaaccaguagccaaggcugagggcuccccaacagccauucugauagggugucuggucgcaauaauacugcuccugcuuuugauaaucgccuugaugcuguggcggcugcacuggcggcgccuccugagcaaagcagaaagacgcguccucgaggaggaacuuaccgugcaccuuaguguuccaggagacacgauucugauuaacaauagaccaggcccucgugagccuccuccauaucaagaaccuaggcccaggggcaauccaccucacuccgcgccaugugugcccaacgggagugcuuugcuauugucuaaccccgccuaccgccuuuugcuggccaccuacgcacgacccccacgagggccugggccuccaaccccggcuugggcuaaaccaacaaacacccaggcuuacuccggcgacuacauggaacccgagaaacccggcgccccccuacuccccccaccuccucagaauucugugccucauuaugcugaagccgauauugucacacugcaaggcguaacaggaggcaacaccuacgcagugcccgcacugccacccggcgcaguaggcgaugggccuccccggguugacuuuccucggucaaggcuaagauucaaagagaaacucggcgagggccaauuuggggaagugcaucucugcgaagucgacucaccacaggaccucguuucccucgacuuucccuugaauguuagaaagggacacccauugcugguugcagucaagauccuacggcccgacgcgacaaagaaugcccguaacgauuuuuugaaggagguuaaaauuaugucaagauuaaaggauccuaacauuaucaggcuacugggugugugcguucaggacgauccccuaugcaugaucacagauuauauggaaaauggugaccugaaucaguuuuuguccgcccaccagcuugaggauaaagcagcagagggcgccccaggagacggccaggccgcccagggcccaacgauuucauacccuaugcuccugcacgucgcagcccagaucgcuucagggaugagauaccuggcuacucucaacuucguacaccgcgaccucgccacuagaaauugucuuguuggugaaaacuuuacaauaaaaauugcugacuuugggaugaguagaaaccuguaugccggcgauuauuaccgcguucaagguagagcugugcugccgaucagauggauggccugggagugcauuuugaugggaaaguuuacaaccgcuucagacguuugggccuucgggguuacacugugggaggucuuaauguugugucgcgcucaaccuuucggacaguugacagacgagcaagucaucgagaacgcuggugaauuuuucagagaccagggccgucaggucuacuuaucccgacccccagcuuguccacaaggccuguaugagcucaugcugcgaugcuggucacgcgaauccgagcagcgcccccccuucagucaguugcaccgauuucucgcagaggacgcacuaaacacaguauag

SEQ ID NO: 289080 - RNA, 2742 nt, Artificial Sequence
  derived and/or modified sequence
augggacccgaagccuuaagcucccuucucuugcuccuguuagucgcuuccggcgaugcggacaugaagggacacuucgaccccgcuaaauguagauacgcauuggguaugcaggaucguacuauuccagauuccgacaucuccgccaguaguaguuggucagauucaaccgcagcucgacauucccgacucgaaaguagcgacggugauggagccuggugucccgcaggaaguguuuucccuaaggaagaagaguaccugcagguggaccugcagagacuccaccugguggcauuagugggaacacaggggagacaugcgggaggcuuggguaaagaguuuucucgcaguuaucggcugagauauuccagggacggccggagguggaugggauggaaggauagguggggucaggaaguuauuucugggaaugaagacccugaggguguggugcucaaggaucuggggcccccaauggucgcgagacuuguaagguuuuaucccagagccgaucguguaaugucagucugccuccgcguugagcuauaugguugccuuuggcgagacggacugcuaucuuacacugcaccaguuggccagacgauguacuugagugaggccgucuauuuaaacgauagcacuuaugacggacacacagugggaggucuacaguaugguggucuggggcaguuggcagacggcguggugggacuggaugauuuucgaaaaagucaggaauugcggguguggccuggguacgauuacguagguuggucuaaccacuccuucagcagcgguuacguggaaauggaauuugaguucgaucgacuuagagccuuucaggcgaugcagguccauuguaacaauaugcauacgcugggagcucgccugccuggaggcguggaguguagauucagaagaggcccugcuauggcgugggaaggcgaacccaugaggcauaaucugggcgguaaucucggagacccccgggcuagggcggugagcgugccccuuggaggucguguagcucgauuccugcaaugucgguuccuuuucgccggaccauggcuuuuguucagcgaaaucucguuuaucagcgacguagucaauaauuccagcccggcacucggcggcacauuccccccugcucccugguggcccccggggccaccaccgacaaacuuuuccagccucgagcuagagccucgcggacaacagcccguggccaaagcugaggguucaccaacagcuauccugauuggcugucuaguggccauaauucugcugcuccuauuaauaauagcccugaugcuguggagacuucacuggcgcaggcugcugucuaaagccgaacgaaggguguuggaagaggagcuaacugugcaccucagcguucccggagauacuauacuuauuaauaaucgccccggcccucgcgagccaccaccauaccaagagccccgaccaagaggaaaccccccucauucugcuccaugcgugccaaauggauccgcacucuuauugucuaauccugcuuaccgccugcuucuggccacuuacgcucgaccaccacggggacccggaccaccaacuccagcuugggcaaagccaaccaacacacaggcauauuccggagauuauauggaaccggaaaagcccggcgcaccuuugcuuccaccuccaccucagaacucugucccacauuacgccgaagccgauaucgugacucugcagggagugacgggaggcaauaccuaugccgugccugccuugccacccggcgcagucggagaugggccgccccguguggacuuucccagaagucgauugcgauuuaaagagaagcuuggagagggccaauuuggagagguacaucugugugaaguggauucaccccaggaccuuguaagccuggauuucccucugaauguccguaaggggcauccguugcugguggccguaaagauucuuagaccggaugcaacaaagaacgcccguaaugauuuccuaaaagaaguuaagauuaugucaagauuaaaagauccaaauaucauucggcugcugggcguguguguccaggaugauccacugugcaugauuaccgauuacauggaaaacggcgaucuaaaucaauuucugucugcucaucagcuggaagacaaagccgccgagggggcuccuggggauggccaggccgcacaggguccuaccaucucuuauccaaugcuccugcaugucgcugcacaaauugccuccggaaugcgguaucucgcuacccuuaacuucguccaucgggaccuggcgacucguaauugucuuguaggggagaauuucacgaucaaaaucgccgacuucggaaugucccgaaaucuguaugccggcgacuacuauagaguucaagguagagcaguucugccuauccgcuggauggcgugggaauguauacucaugggaaaauucacuacggccagugaugucugggccuuuggagugacccugugggaagugcugauguuaugcagggcucaaccuuuuggacagcugaccgacgagcaagugaucgagaaugccggagaauuuuuucgagaccagggacggcagguguaccucucaagacccccugcguguccucagggccuguacgagcugaugcugagguguuggucccgugaaucagagcagagaccccccuuuucacaacuucaucgauuucuagccgaggaugccuuaaacaccguguag

SEQ ID NO: 289081 - RNA, 2742 nt, Artificial Sequence
  derived and/or modified sequence
augggacccgaagccuuguccucccucuuacugcuucugcucgucgcuuccggcgaugcagacaugaaaggacauuuugaucccgccaaaugcagauaugcucucggcaugcaggacagaacaauccccgacagcgacauuucagcuucaagcagcuggagugauucgacggcagcccgacauagcagauuggaaaguagcgacggagauggugccuggugcccagcuggcucuguguuuccgaaggaagaggaguauuuacagguagaccugcagagacugcaccuuguggcccucgucgggacucagggaaggcacgccggagggcucggcaaagaguucagccggagcuauaggcugcgauauucucgcgauggaaggagauggaugggauggaaagaucgauggggacaggaagugaucucaggaaaugaggacccugaaggcguaguacugaaagaccugggcccuccuaugguggcucggcuggugagguuuuauccccgugccgauagagucaugaguguuugcuugcggguugagcuguacgguugcuuguggcgggacggccuguuauccuauacagcgccagucggccagaccauguacuugagcgaagccgucuacuugaaugauaguacuuaugacgggcacacaguaggcggcuuacaauauggcggccucggucaacucgcggauggggucgucggacuugacgauuuuaggaaaagccaagaguuacgcguauggccuggcuacgauuacgugggcuggaguaaccauucuuuuucauccggauacgucgaaauggaauucgaauucgacaggcugcgcgcauuucaggcuaugcagguccacuguaauaauaugcacacucucggggccagacugcccgguggcguagagugucguuuccgccgcggucccgccauggcuugggaaggcgagccuaugagacauaaccucggugguaaccugggggaucccagagcaagagccgucucaguaccccugggugguagaguggccagauuucugcagugccguuuccuuuuugcugguccuugguugcucuucucagaaauuucauuuauaagcgaugucgucaacaacuccucaccagcccucggaggcacauuuccucccgcaccuugguggcccccugguccuccucccaccaacuucucgagccuggagcuagaaccucgcggucagcaacccguagcaaaagccgagggaucaccaacagccaucuugauaggaugucuaguggccauuauucuccuccugcuucuuauuauugcgcucaugcuguggcgacuucacuggagaagguuauugagcaaagcagaacguaggguucuugaggaggagcugacaguucaucucucagugccuggcgacacaauuuugaucaauaaucguccugggccccgugaaccaccaccauaucaagaaccucggccucgcggaaacccuccucacucagccccgugcgugccaaauggcuccgcccugcugcugaguaaucccgcuuauagacuccuguuagcaacuuacgcccggccacccagagguccaggacccccaacacccgcuugggcaaagccaaccaauacucaagcguauucaggcgauuauauggagccagaaaagcccggugcccccuuacuuccacccccaccacaaaacagcgugccccacuacgccgaagccgacauaguuacccuccaaggaguuacugggggcaacacauaugccgugccagcacucccccccggcgcugugggcgauggaccaccccggguggacuuuccacggucccggcuuagguucaaagaaaaauuaggcgaagggcaguuuggcgaaguucauuuaugugaaguugacucuccucaagaucuugucucucuggauuucccacuaaacgugcgaaaaggacacccccuacucguagcuguuaagauccugaggccugacgcuaccaagaacgcccgcaacgacuuucucaaagagguuaaaaucauguccaggcugaaggaucccaauauuauacggcuucucgggguuugcgugcaggacgauccucuguguaugaucacugauuauauggaaaacggcgaccuuaaccaguucuugagcgcacaucaguuagaagauaaagcggcagaaggcgcucccggcgauggacaagccgcucaagggccaaccauuagcuauccaaugcuccuacacguggccgcgcaaaucgcuaguggaaugagauaccucgccacucugaauuuuguacaccgcgaccuugcaacacggaauuguuuagugggagagaauuuuaccaucaaaaucgcggacuuugggauguccagaaaccuauacgccggcgacuauuaucgcgugcaggguagagcugugcucccuauacgguggauggcuugggaaugcauucugauggggaaauuuaccacagccucugaugucugggcauucggaguaaccuuaugggaaguccuaaugcugugucgugcccaacccuucggucagcugacggacgaacagguuauagagaacgccggagaguucuuucgggaucagggucggcagguguaucugagcagaccgccggcaugcccucagggcuuguacgaauugaugcugcgaugcuggucacgcgagucagaacaaagaccuccauuuagucagcuucacagauuccucgccgaagacgcccugaacaccguguag

SEQ ID NO: 289082 - RNA, 2742 nt, Artificial Sequence
  derived and/or modified sequence
auggggcccgaggcacucucaucucucuuacuucuccuacuugucgcgaguggcgaugcugauaugaaggggcauuuugacccggccaagugcagguaugcucucggaaugcaggacagaaccauaccagacagcgauauuuccgcuucaucuuccuggucagacaguaccgcugcgaggcauuccagacuggaauccucagauggcgauggggcauggugcccagcuggauccguuuucccaaaagaagaagaauaccuccagguugaucuacaacgauugcacuugguugcgcucguggguacucaggggcgccaugccgggggauugggcaaggaauucagcagaaguuauagauuaagauacucccgugacggucguagguggaugggguggaaggauagauggggacaggaagugauaagugguaacgaagacccagaaggugugguuuugaaagacuuagguccgccgaugguggccaggcuaguacgcuucuacccacgggccgacaggguuaugagcgugugccuccguguggaacuuuacgggugcuuguggagggauggccuguugucuuauacugcacccgugggccagacgauguaucuuagcgaagccguuuaucuuaacgauaguacuuaugacggacauacuguggggggacugcaguacgggggcuugggccaacuggcagacggcguugugggccuugaugacuuuaggaaaagucaggagcuuagaguuuggccugguuacgauuacgugggguggucuaaucauagcuucucuucagguuacguggaaauggaguucgaauuugaccggcugagagcuuuucaggcuaugcaaguucauuguaacaacaugcauacgcugggagccagacugccaggcggagucgaaugucgcuucaggagagggcccgccauggccugggagggugagccuaugagacauaaccugggaggcaaucucggugauccccgagcccgcgcagugucaguuccccuuggcggacggguagcacgguuccuccagugucgcuuccuuuuugccggccccuggcugcuauucucagaaauuucguucauauccgacgucguuaacaauaguucuccugcauugggggguacauucccaccagcuccaugguggccaccugguccaccaccgaccaauuuuucuagucuggagcucgaaccaagaggucagcagccugucgcaaaagcagagggaucuccaaccgccauucuuauuggaugcuuaguggccauaauccucuuguuauuacucaucauugcucugaugcuguggcgcuugcacuggcguagacuguuguccaaagcagagaggcgcguguuagaagaagagcugacaguccaucucucagugccaggggacacaauucugauuaacaauagacccgguccucgggagccaccacccuaccaagagccaagaccccgcgggaauccuccccacucugccccuugugugcccaaugggucugcacugcucuuaucuaauccggcguaccgucugcugcucgccacauacgcucgucccccucgaggacccgguccuccgacuccugcuugggcuaaacccaccaauacucaagccuacucuggagacuacauggaaccugaaaagccuggagcucccuuguugccgccccccccccaaaauucagugccacacuaugcagaagcagauauagucacgcugcagggcgucaccggcgggaauacuuaugcugugccagcgcucccucccggagcggugggagacggcccgcccagaguagacuuccccagaucaaggcugagguuuaaagagaaacuuggcgaggggcaguuuggugagguucaucuuugugagguagacucaccccaggacuugguaucucuggauuuuccgcucaacgucagaaaagggcauccacuacuggucgccgugaaaaucuuaagaccugaugcuaccaaaaacgcucgaaacgacuuucugaaagaagugaagaucaugucacggcuaaaagacccaaacauaauccgccuguuaggugucuguguacaggaugauccacugugcaugauuacagacuauauggaaaauggagauuugaaucaguuucugucagcucaucaacucgaggauaaggcugcugaaggcgcuccgggugacggacaggcugcccaaggccccacuauuucauacccaaugcuucugcauguggcugcccaaauugccucugggaugcgauaucuggcaacucugaacuucgugcacagggauuuggcuacacgcaacugccugguaggagaaaauuuuaccaucaagauugccgauuuugggaugagucgcaaucuguacgccggcgauuacuacagaguacagggucgagcuguuuugccuaucagauggauggcgugggaguguauucugauggggaaauucacaaccgcgucagacgucugggcuuucggggucacauugugggaaguucuuaugcuaugcagggcucaacccuuugggcagcuaacggacgagcaagugauugagaaugcaggggaauuuuuucgagaucaagggcgucagguguaccucucuagaccuccagcuuguccucagggccuguacgaguuaaugcugagauguuggagucgggaauccgaacaacggccgccuuucagucaauugcauagauuucuggccgaggacgcacugaauaccguuuag

SEQ ID NO: 289083 - RNA, 2742 nt, Artificial Sequence
  derived and/or modified sequence
augggcccugaagcauuaucuagccugcugcuucuccuucucguugccaguggcgaugccgauaugaagggccacuuugauccagcgaaaugucgauacgcucugggcaugcaggacagaacuauuccugauagugauauaagugcaucaucgucguggagcgacucuacagcugcccggcauagucgccucgaaagcucggacggggauggcgcuuggugccccgcuggcucugucuuccccaaagaagaggaguaucugcaaguagaccuccaaagacugcaccuuguggcauuggugggaacacaaggccgacaugcaggagguuuggguaaggaauucucaaggucuuacaggcugagauauagcagagacgguaggcguuggaugggguggaaggaucggugggggcaggaaguuaucuccgguaacgaggacccggagggggugguguugaaagauuugggcccaccgaugguugcacgauuggugagguuuuacccuagagcagaucgagucaugagugucugcuugcgcguagaacuguacggaugccuguggagggacggccugcucaguuacaccgcgcccguagggcagacuauguaccugucugaagccguauaucugaacgauucaaccuaugauggccacacgguuggaggacuccaguaugggggccugggacaacucgcagacgggguuguuggccuugaugacuuuaggaagagccaggaauuaagggucuggccuggcuaugacuaugugggauggucuaaccauucauucagcuccggcuauguagagauggaauucgaauuugacagacugagagccuuucaggccaugcaaguccacugcaauaacaugcauacgcuuggugcacgucuuccaggcgguguggaauguagauuuagaaggggcccagccauggccugggagggagaacccaugcgacacaaucuuggcggcaacuuaggcgauccacgggcaagagccguuucagugcccuuggguggacggguggcuagauucuugcagugcagauucuuauucgcaggaccuugguugcuauucucagaaauuagcuuuauaagugaugucgucaauaauucaagcccagcucuuggagggacauuccccccugcaccuugguggccaccagggccuccgccuacuaacuucaguucacucgaauuggaaccaagaggacagcagccugucgcaaaggcugaaggcucccccaccgccauccugaucggcugccuggucgccaucaucuuacuccuucuccucauuauugcccucaugcuguggagacuccauuggagaaggcugcugagcaaagcugaaagaagaguacuggaagaggaacucaccguacacuuaucagucccaggggauacgauccucaucaauaaccgccccgggccucgggaacccccaccuuaucaagagcccaggccgcgaggaaaccccccccauucugcacccugcguucccaauggcucagccuugcucuugucuaaccccgccuaucgcuuacuccuggccacuuacgcacggcccccacgaggacccgguccuccaacucccgccugggccaaaccuacuaacacucaagcauauagcggugauuauauggaaccggagaaaccuggcgccccccucuugccgccaccuccacaaaacucagugccccacuacgccgaagccgacaucgucacucuccaaggcgucacaggugguaacacauaugcugugcccgcauuaccgccuggugcugucggggacggaccgccucgaguggacuuucccaggagcagacuacgauucaaagaaaagcuaggugaagggcaguuuggagaaguucaucugugcgaaguggacagcccacaagaccuggucucacuugauuucccacugaacgugcgcaagggccacccauuacuuguggccgugaagauccugaggccugaugcuacaaagaaugcgcgaaaugacuuccucaaagaggugaagauuaugucuagacucaaagacccaaauauaauccgucuucugggcgugugcguucaagacgacccacucugcaugauaaccgauuauauggaaaacggcgaucugaaucaguucuuaucagcccaccaacuggaggauaaagcugcagaaggugcacccggugauggccaggcugcccaggguccaacaauuuccuauccgaugcuacuccauguggccgcgcaaauagcuucaggaaugagguauuuggcaacacugaacuucguccaccgagaucucgcaacccggaauugucucguaggagagaauuuuacaaucaagaucgcugacuucggaaugaguaggaaucuauaugccggggacuacuaucguguucagggacgcgcggugcugccaauaagguggauggcuugggaguguauacucauggggaaauuuacaaccgcuuccgauguuugggcauuuggaguuacauuaugggaaguauugaugcucugccgcgcacagccauucggucaacugacagacgaacaggugauugagaaugccggcgaauuuuucagagaccaaggcagacagguuuaucugagccgcccgcccgccugcccccagggguuguaugaacugaugcugagauguuggucucgagagucugagcaaagaccucccuucucccaacuccaccgauuucuggccgaagacgcacucaauacaguauag

SEQ ID NO: 289084 - RNA, 2742 nt, Artificial Sequence
  derived and/or modified sequence
auggggcccgaggcacuaucuucacucuugcuguuacugcucgucgccaguggcgacgcggauaugaagggccauuucgacccagccaaaugcagauaugcccuuggcaugcaagaccgcacuaucccugacucggacaucucugcaaguuccucauggucugacuccacagcagcucgccacucaagacuugaaucuagcgacggcgacggugccuggugcccagcuggcaguguauuccccaaggaagaagaguaucuccagguggacuuacagagacuccaucuaguggcgcuuguugguacucagggacgacacgcggguggucucgguaaggaguuuucaagaagcuacagacugagguacaguagggacggaaggcguuggaugggauggaaggaccguugggggcaggaagucauuucaggcaacgaggauccggaaggcgugguucuuaaggauuuaggacccccuaugguggcucguuuggugagguuuuauccgagagcggacagagugaugagugugugucuuagagucgaguuauauggcugucuguggagagauggauuacuuuccuauacugcccccguggggcagaccauguaucucucugaagcugucuaucucaacgauucuacuuaugacggccacacggugggaggccugcaauauggagguuuaggucaauuagcagauggggugguaggauuggaugacuuucgaaagucccaggaacugaggguuuggccgggauaugacuaugucggguggaguaaccacuccuuuucaagcggauacguggaaauggaauuugaguuugaccggcugcgcgcauuccaggcaaugcagguacacugcaauaacaugcauacacugggagcaaggcugcccggcggcguugaaugucgguuucgacgcggaccagcaauggccugggaaggugagcccaugcggcauaaucucggcggcaaccugggcgacccacgggcacgcgcaguuucagugccacugggggguagggucgcacgguuucuucagugucgauuccucuuugccggaccuuggcugcucuucucugaaaucuccuuuaucucagaugucgucaacaacucgucaccugcucuuggcggaacauucccaccugcaccuugguggccucccggaccaccuccuacuaauuuuucaaguuuggaguuagaaccccgcggccagcaaccuguggcaaaagcugagggcagcccaacugcaauauugaucggcugccuggucgccauuauacugcuacugcuucucaucauugcuuugaugcuguggagacuccauuggagacgauuacugagcaaggcggaacgaagagugcucgaagaggaacuuacuguucauuuaucugugcccggcgauacuauacugauuaacaacaggcccggcccucgggaaccaccucccuaccaagaaccuaggccucgaggcaauccuccccacagcgcccccugcgucccaaauggcuccgcuuuacuuuuguccaaccccgcguaucggcuccuccuggcaacguacgcucggcccccccggggaccaggcccccccacaccugccugggcaaaaccgaccaacacccaggccuauucuggugacuauauggagccugagaaacccggagccccucuacugccgccacccccccaaaauucugugccucauuacgccgaagcggauauugucacacugcagggaguuaccggaggcaauacauacgcuguacccgcacuucccccuggugccgucggagaugggccaccacgagucgacuuuccccgguccagguugcgguucaaagagaaauuaggugaggggcaguucggcgagguacaccuuugcgaagucgauaguccacaggaccuagucucacuugauuucccccugaaugucaggaaaggacauccauugcugguugccgucaagauccugcgccccgacgcuacuaaaaaugccaggaacgacuuucugaaggaagugaagauaaugagcagauugaaggaccccaauauuaucagacuucucgggguaugugugcaggaugauccauuaugcaugaucacugauuacauggagaacggagaccugaaucaguucuuaagcgcacaccaacuagaagauaaagccgcugagggagccccgggagacggucaggccgcacagggacccaccauaaguuaccccauguugcugcauguagcugcccagauugccuccggcaugcgcuaucucgccacgcucaacuuugugcaccgugaccuugcaacgcguaacugccuugugggcgaaaauuucacgaucaaaaucgcugacuuuggcaugucaaggaaucucuacgccggggacuacuaucggguccaaggcagggcuguguugccgauaagauggauggcaugggagugcauucuuauggggaaguucacaacugcaagcgacgugugggcauuuggcgugacguugugggaggugcucaugcugugucgugcccaaccauuuggacaacuuacagacgaacaagucaucgagaaugccggcgaguuuuuucgggaucagggcagacagguuuaucuauccagaccaccagcuuguccccagggucucuacgagcuaaugcugagauguugguccagagaauccgaacagcgcccucccuuuagucaguugcaccgauuucucgccgaagaugcccugaauacugucuag

SEQ ID NO: 289085 - RNA, 2742 nt, Artificial Sequence
  derived and/or modified sequence
augggucccgaagcucugaguucucuauuauuacugcucuuaguggcuaguggcgacgcagacaugaaaggacacuucgauccagccaaauguagauacgcccucgguaugcaggaucgaaccaucccugacuccgauauaucugcuuccucaagcuggucugacagcaccgccgcgcgacacagccgacucgaauccucagauggugacggcgccuggugcccugcagggagcguguuccccaaagaggaagaauacuugcaaguggacuugcagagauugcaucucguggcucugguuggaacccagggcaggcacgcagguggacucggaaaggaguuuucucggucguaucggcuuagguauucuagggacggcaggagguggaugggauggaaggauagauggggucaggaagugaucucagggaaugaagaucccgagggaguuguacugaaagacuugggaccccccauggucgcacgcuuggugagguuuuaccccagggcggacagaguaaugucuguauguuugcgcguggaguuguacgguugccuguggcgcgaugggcuacucuccuacaccgcaccaguuggacagacuauguaucuguccgaggccguuuaccuuaacgacagcaccuacgauggccacacaguugggggucugcaauauggaggguugggccaguuggccgauggcguggugggucucgaugacuuucgcaaaucccaggagcucagaguguggccugguuacgauuauguggguuggaguaaucauaguuuuucaucuggauauguggaaauggaguucgaguuugacagacugagggcguuucaggcaaugcaggugcauuguaacaacaugcauacacugggcgcccgacugccugggggaguugaaugucgauuucgccgaggaccagcgauggcuugggagggagagccaaugcggcauaaucugggaggcaauuuaggcgauccaagggcucgcgccgugucuguacccuuggguggaagagucgccagguuccuucagugcagguuucuguuugcaggcccaugguuauuguucagcgagaucucauuuaucucugauguggucaauaauucaucuccagcacuuggcggcaccuucccgccugccccuugguggccccccgguccccccccuaccaacuucucaucacucgaacuagaaccaagaggccaacaaccaguugcuaaggccgaaggaucuccaacugcaauccucauugggugccuugucgcaauaauccuccugcuguugcucaucaucgcucuaauguuguggaggcugcacuggcgacgacugcuaucgaaagccgagaggagggugcuugaggaagaauugacgguccauuugagcgucccuggggauaccauccucaucaauaaucgccccggacccagagaacccccuccuuaucaagaaccaagaccuagaggaaacccaccucacuccgcuccuugcgugccaaacgguucugcccuucuguuguccaaccccgcauaccgucuccuacucgccacauaugcccggccuccacgcggccccggaccccccaccccugccugggcuaagccaacuaauacucaagcguauuccggugauuauauggaaccagaaaaacccggcgccccguuacugcccccaccuccacaaaacagcgugccucacuaugccgaagcugacaucgugacccuucagggcguaaccggaggaaauacauaugccgugccagcccugccaccuggagcagugggggaugggccaccaaggguggacuuuccucggagcagauugcgauucaaggaaaagcuaggggaagggcaguuuggagaaguccaucugugcgagguugauuccccacaggacuuagugucacuugauuuuccuuuaaaugugcguaagggccacccccuucuaguggccgugaagaucuugagaccugacgcaacaaagaaugcccggaacgauuuccuaaaagagguaaaaaucaugucgagacuuaaagaucccaacaucauccggcuucuaggcguuugugugcaggacgacccucucugcaugauuacggauuauauggaaaauggagauuuaaaccaguuucugucggcacaccaguuagaagauaaagccgccgaaggggcgcccggugacgggcaagcagcgcagggacccaccaucucuuaccccaugcuccugcauguagcugcucaaauagcaucaggaaugcgcuaccuggccacacuuaauuucgugcaccgugaccucgccacaaggaacugcuuagugggggaaaacuuuacaauaaaaaucgcagacuuugguaugucccgcaaccuguacgccggagacuacuaucguguccagggaagagccguuuuaccaauccgguggauggcuugggaaugcauauugauggguaaauucaccaccgcaagcgacgugugggccuuuggugugacccuuugggaggugcucauguugugucgggcccagccauuuggacagcugacagacgaacaggugaucgagaacgccggcgaauucuuucgagaccaggggagacagguauaucuaagccgcccuccagcuugcccgcaaggccuguacgaacucaugcugcgcugcuggucuagagaaucagagcagagacccccguucagccagcuacacagauuucucgcagaagacgccuugaacacaguuuag

SEQ ID NO: 289086 - RNA, 2742 nt, Artificial Sequence
  derived and/or modified sequence
augggccccgaagcucuauccucccugcuucuguugcuguugguugccucuggagaugcugauaugaaaggccacuucgacccugcuaagugcagguacgcacuggguaugcaagacagaacgauucccgauagugauauaagcgcuucuuccucaugguccgacagcaccgcagcccggcauucacgcuuagaaaguucugacggagauggcgccuggugcccagcuggaagcguguuuccaaaggaggaagaguacuugcagguugauuugcagagauugcaccuuguugcacuggucggaacucaagggagacacgccggcggccugggcaaagaauuuagcaggaguuaucgccugcgauacucccgggaugggcgucgcuggauggguuggaaagaucgguggggccaggaagucaucucuggaaaugaggacccugagggaguugugcuaaaggacuuaggaccaccaaugguagcaagauuagugagauuuuauccucgggcagaccgcgucaugucagucugccugcgggucgagcuguauggaugccuguggagggacggccuucugagcuacaccgcacccguaggucagacuauguaccuuucugaagccguguaccuaaacgauuccacauaugacggucacacagucggcgggcugcaguacggaggacuugggcaauuagccgauggcgugguuggccuugacgacuuucgcaagagucaggaacucagagucuggccaggcuaugacuaugugggauggaguaaucauucuuuuucuagcggauacguggaaauggaauucgaauucgaucggcuccgagcuuuucaggcuaugcaagugcauuguaacaacaugcauacgcugggcgccaggcugccuggaggcguugagugccgauucaggagaggcccagccauggcaugggaaggagaaccgaugcgucauaaccugggaggcaaucugggcgacccccgggccagagcaguguccgugccacugggcggaaggguggcuagguuccuucaaugucgguuccuuuuugcuggaccgugguuacuguucucugagauuucuuuuaucagugaugugguuaauaauucuucccccgccuuaggaggcacauuccccccagcacccugguggccucccggacccccccccacaaacuucuccucucuggagcuugaaccacgcggucagcaaccaguagcgaaagcagagggcuccccuaccgcuauucugauuggcugccuuguggccaucauccugcuccuacuucugauuauagccuuaauguuguggagauugcacuggcgccgccuauuaucaaaagcugagagaagaguucucgaggaggaauugacaguucacuuauccgugccaggagacaccauccugaucaauaacagaccaggcccucgcgaaccucccccauaccaggagccucggccucgcggaaaccccccucauucugccccuugcguccccaacgguuccgcucuccuucugucaaacccugcuuaccgucucuugcuugcuaccuaugcgcgaccuccucgaggcccaggacccccuacaccagcuugggccaaacccacaaauacacaggccuacaguggcgauuacauggaaccagagaaacccggagcaccccuucucccucccccuccccagaauagugucccccacuacgcugaagcugauaucgugacucugcaaggcgucacggguggaaacaccuacgcagugcccgcuuugccuccaggcgccgucggcgauggucccccuagaguggauuuccccagguccagauugcgcuuuaaggaaaagcucggggaagggcaguucggagaaguacaucugugugaaguagauaguccccaagaccucguaagucuagacuucccccugaacguuagaaaaggccacccucuguugguggccguaaaaauacugcgccccgacgcgacuaaaaaugccagaaacgacuuucucaaagagguaaaaaucaugucacggcugaaggaucccaacauuauccgucuucuuggcgugugugugcaagacgacccucucugcaugauuacggauuacauggaaaacggcgaccugaaucaauuccuguccgcccaucaacucgaggacaaagcagcugagggugcuccuggcgauggucaagcugcucagggaccuacaauuucauacccgaugcugcugcauguugcugcccagauugccuccgggaugcgguaccuggcuacuuugaacuuugugcauagagaucuugcaacacgcaacugucugguuggcgagaauuuuacaaucaagauugcugacuuuggcaugucaagaaaccucuacgccggugacuacuacagaguacaaggaagagcugucuuaccaauuagauggauggcuugggagugcaucuugauggggaaauuuaccacugcuucagacguuugggcuuuuggaguaacucugugggagguacuaaugcuaugcagggcacagccauuuggccagcugacugacgagcaggugauugagaacgcuggggaauucuuccgcgaccaggggaggcaaguguaucugucuagaccgccggcuuguccacaggggcucuaugaacugauguuacguugcuggagucgggaauccgagcagcgacccccuuucucucagcuccacagauuucuugccgaagacgcacugaacaccguauag

SEQ ID NO: 289087 - RNA, 2742 nt, Artificial Sequence
  derived and/or modified sequence
augggacccgaggcucuuagcucauugcuucuucuucuccugguggccucaggugaugcagacaugaagggacacuuugacccagccaaaugcagguaugcuuugggaaugcaggaucggaccauuccugauuccgauaucuccgccuccucuucuuggucagacucaaccgcugccagacauagccgccuggaaagcagcgacggcgacggagcuuggugcccugcuggcuccguguucccgaaggaagaagaguaccugcaagucgaucuucaacgccuccaucugguggcuuugguggggacgcagggaagacacgcuggugggcucgggaaagaguucucacgcucguauagauuaagauauagucgcgacggaagacgauggaugggcuggaaggaucgguggggccaggaagugauaagugggaaugaagacccagaagguguugugcugaaggauuuaggacccccgaugguggcucgacuagugagguucuacccccgcgcggaucgggugaugucuguguguuugagaguggaacuguauggaugucucuggcgugacggacuucugucuuauaccgcucccgucggacagacaauguauuuaagcgaagccguuuaucuuaacgacagcacuuacgauggacauacagucggcggucuccaguauggaggucuuggccaguuagcagacggggugguuggauuggacgauuuccggaagagucaggagcuuagaguuuggcccggcuaugauuaugugggguggucuaaccauuccuuuaguagcggauacguugagauggaauuugaguuugaucggcugagggcauuccaagccaugcaggugcacuguaacaacaugcauacccucggcgcuaggcuaccaggcggaguagaauguagguuccgcaggggccccgccauggcaugggagggcgagccaaugaggcauaaccuagggggcaaucucggagaccccagagcucgggccguuagcgugccucugggugggcggguagcacguuuuuuacaaugcagauuccucuucgccgggccuuggcugcuguuuucugaaaucucuuuuauaucugacgugguuaauaauuccaguccagcauuaggcggcacguuuccaccagcaccaugguggccaccgggacccccccccacaaauuucucuucguuagagcuugagccacgaggccaacagcccguagccaaagcugaagggaguccgacagcaauucucauaggcugccugguugcuaucaucuugcugcugcucuugauuaucgcucucaugcuguggagguugcacuggaggagacuucucucuaaggcagagaggcggguucucgaagaagaauugacugugcaccucuccgugccuggcgacacuauucuuaucaacaacagaccuggaccacgcgaaccucccccauaucaagaaccucguccgcgcggcaacccaccgcauucugccccuugcguacccaacgguucugcucuucuguugucaaaccccgcuuaucgcuuguugcucgccaccuacgcaagaccaccuagaggacccggaccccccacucccgcuugggcuaaaccuaccaacacacaggcuuauuccggcgacuauauggaacccgaaaagcccggagcaccucuauugccgccccccccacagaauucggucccacauuaugcagaagccgauauugucacacuacagggggucaccgguggcaauaccuacgcugugccagcauugccaccaggcgcugugggagauggucccccucguguugauuuccccagaucaagacugagauuuaaggaaaaguugggcgaaggucaguuuggcgaaguacaccuaugugagguugacuccccgcaggacuuggugagccuagauuuuccucucaacgucagaaaaggucauccccuuuugguugcagucaaaauucuucgaccugaugccacaaaaaacgcucgcaacgacuuucugaaggaaguuaagaucaugucacgccugaaggacccaaacauuauucgccugcucggcgucugugugcaggacgacccacuaugcaugauuaccgauuauauggaaaauggugaucugaaccaauuccuguccgcgcaccagcuggaagacaaagccgccgaaggagcaccuggcgauggucaagcagcacaaggaccuaccauuagcuaccccauguuacuccacguugccgcgcaaauugcuagcggaaugagauaucuugccacccugaacuucguucaccgcgaccucgcaacccggaauugccuggugggggaaaacuucaccaucaagauagccgauuucgggaugucccggaaccuguaugcaggugauuacuaucguguacagggaagagcaguucugccaaucagguggauggcaugggaauguauucugauggggaaauuuaccacugccucugauguuugggcauuuggagugaccuuaugggaggugcuuaugcuguguagagcccaaccauuuggccagcugaccgaugaacaaguaauugagaacgccggcgaauuuuuccgggaccaaggcagacagguauauuuaagcaggccacccgccuguccccagggucucuaugaauuaauguuaaggugcuggucgagggaguccgagcagagaccuccauucucgcaauugcaucguuucuuggccgaggacgcucucaauacaguuuag

SEQ ID NO: 289088 - RNA, 2742 nt, Artificial Sequence
  derived and/or modified sequence
auggguccagaagccuugucgucacuucugcuccugcuuuuaguggcguccggagaugccgauaugaaaggacacuuugauccugccaagugcagauaugcccugggaaugcaagacaggacaauucccgauuccgacaucucugccuccuccaguuggucagauagcacugccgcaagacacagccggcucgagaguucggauggcgacggcgcuuggugucccgccgguucagucuuuccuaaggaagaagaauaccugcaaguugaccugcagcgccugcauuugguugcacuggugggaacgcaaggacggcaugcagggggacucggaaaggaguuuucacggucauauagacuacgguauucaagggauggccgccgguggaugggguggaaagaccgguggggccaagaaguaaucuccgguaaugaggauccugagggggucguccugaaggaucucgggccacccauggucgccaggcucgucagguucuacccacgcgcagacagagugaugagcguaugccuuagaguagagcuguacggauguuuauggcgcgacggacuccugagcuauaccgccccaguggggcagacaauguaccugagcgaagccguguaucugaacgauagcacauaugauggacauacugugggcggacuacaauacgggggccuagggcaacuggcagacggaguggugggauuagacgacuuuagaaaaagccaagaacuaagagucuggccuggauaugacuacguuggguggucaaaucauagcuucagcagcggcuaugucgaaauggaguucgaauuugacaggcuacgcgcguuucaagcuaugcaaguacauugcaauaacaugcacaccuugggcgcacggcuaccugggggaguagaaugucgguuucgccgggguccugcuauggcuugggagggagagccaaugcgacauaaccugggcgggaauuuaggggacccaagagcaagagccguaagcguaccccuuggaggccggguugcucgcuuccugcaaugccgcuuccuuuucgccggaccguggcuucuguuuuccgaaaucaguuuuaucuccgauguagugaauaacucuaguccugcccuuggugguaccuucccgcccgcccccugguggccacccgguccucccccuacaaacuuuucuagcuuagaauuagagcccaggggacagcagccaguagccaaggcggagggaucccccacugcaauacucauaggaugcuugguggcaauaaucuuguugcuguuacugauuaucgcccucauguuauggaggcuccacuggcgaaggcuuuuaucuaaggcugaacguagaguacuggaagaagaacuuaccguccaccuuuccguucccggggauacaaucuugauuaacaaccggccaggacccagagagcccccccccuaccaggaaccaagaccacgagguaaccccccacauucagccccaugcguucccaauggaucagccuugcuccugucuaaucccgccuacaggcuccugcuugcaacauaugcccgaccaccacgcggcccaggaccuccuacccccgcgugggcgaagccaacuaauacgcaggccuauagcggggauuacauggaacccgaaaagccaggugcaccacuucugccuccccccccucagaacuccgugccucauuaugcugaagcagacauuguuacucuccaaggcguuacagguggcaacacguacgcagugcccgcucugccaccaggcgcaguaggagacggaccaccaaggguagauuuuccccgauccagguuaagguuuaaggagaagcugggugaaggccaauuuggcgaaguucauuugugugagguggacagcccccaggaccuuguuagucuagacuucccacugaaugugcgcaaagggcauccacuccuuguagccguuaagauacuucgcccagacgcuacgaagaacgcccggaacgacuuucugaaggaggugaagauuaugagucgacugaaggacccaaauaucauucguuugcuuggcguuugcgugcaggaugauccccucuguaugauaacugauuacauggagaacggagaccuuaaccaguucuuauccgcucaccagcuggaagacaaagcugcugagggugcaccgggggacggacaggcggcacaaggcccuacuauuucuuauccgauguuacuucauguggcggcccagaucgccuccgguaugcgauaccuggccacucugaauuucguccaccgggacuuagcuacaaggaauugccucgugggagaaaauuucacuauaaaaaucgcugacuuuggcauguccaggaacuuauacgcaggagauuacuaucguguucaaggaagagcaguucugccgauuagauggauggccugggaauguauucucauggggaaauucaccaccgccucugacgucugggcauucggagugacucuuugggaaguacuaauguuguguagagcccagccauucggccagcugaccgaugaacaagucauagagaaugcuggagaguucuuccgagaccaggggcgccagguauaucucagucgucccccagccuguccccagggucuuuacgaacuuaugcugcgguguuggagccgcgagagcgaacagagaccuccguuuucccagcuccaccguuuccucgcugaagacgcacugaacacugucuag

SEQ ID NO: 289089 - RNA, 2742 nt, Artificial Sequence
  derived and/or modified sequence
auggguccugaagcgcucucguccuuacuucuccucuuacugguggccaguggggacgcugauaugaagggccauuuugauccugcaaaaugcagauacgcccucggaaugcaagacagaacuaucccagauucugacauuagcgccucaagcucuuggagugacuccacugcggcuaggcauuccagguuagagucgucugauggagacggugcuugguguccugcagggagcguguuuccuaaagaagaggaauaccuucaagucgaccugcaacgccugcaucugguagcuuugguaggaacacaagggcgacacgccggcggccuaggcaaggaauucucuagaucguacaggcucagauauaguagggauggccggagauggaugggauggaaagauagauggggucaggaggugaucagcggcaaugaagauccagagggcguggugcuuaaagauuuggguccccccaugguggcaagauuggucagauucuauccccgagccgauagagugaugaguguuugucuucggguagaauuguauggcugucuguggagagacgguuuguuguccuacaccgcccccguugggcagaccauguaucuaagugaggcaguguaucugaacgauucaacuuaugacggacacacgguuggaggccugcaauaugggggacuaggucagcuugcugauggagugguuggguuagaugauuuuaggaagucucaagagcugcgcgucuggccuggcuacgacuaugugggauggagcaaucacucauuuucuaguggcuacguugagauggaguucgaguucgacagauuaagggcuuuucaggcuaugcaaguacauuguaacaauaugcauacacugggugcccgucuucccggcgguguugagugcagguuuagacgaggcccagccauggcuugggaaggcgagcccaugaggcacaaucuaggaggcaaucugggggaccccagagcaagggccgugucggugccuuuagggggccggguugcccgguuucugcaaugcagguuucuguuugcuggaccuuggcuauuauuuucagaaaucuccuucauuagugacgucguuaacaauucuucuccugcuuuaggcggcacuuuucccccugcuccuugguggcccccuggacccccuccaacaaauuuuaguagucuggaacucgagccucggggucaacagccaguugcaaaggcugaggggucucccacugcuauccuaauugguugucuuguggcuauuauccuuuuacugcugcugauuaucgcacuuaugcuuuggcgucugcauuggcgacgacugcucucuaaggcagaacgaaggguccuggaagaagagcugacuguucaucuuagcgugcccggagauacgauccuuauaaauaaccgcccuggaccuagagaacccccaccauaccaggagccccguccccgaggaaacccuccucauucugcaccuugcgugccaaacggaucugcuuuauuacucaguaaccccgccuaccgauuacuccucgcuacauaugcgcgcccacccagaggccccggccccccgacucccgcuugggcuaagcccaccaauacucaggcuuauaguggugauuacauggagccugaaaagccaggagcaccucuuuuaccaccuccuccucagaauagcguuccucacuacgccgaggcugauaucgucacucugcaagggguuaccgguggcaauaccuaugccgugccugcacuccccccaggagccguuggcgauggcccaccccgcguggacuucccaaggucucgccucagauucaaagaaaaguuaggggagggccaauuuggcgagguucaucugugugagguggacagcccccaagaccuugucucgcuugauuucccccuaaaugugcgaaagggccaucccuuacucguggcaguuaagauucuaagaccggaugcuacaaaaaaugccagaaaugauuuucucaaagaaguaaagaucaugucgagacucaaggacccuaauauaauccgccuucuugggguuugcguacaagacgauccucuguguaugauaacugacuauauggaaaacggggaccuuaaccaguuccucagugcgcaucagcucgaggauaaagccgcagagggcgcgcccggcgacggacaggcggcccaagguccaacuauauccuaccccauguuacuacacgucgccgcucaaauugcauccgggaugcgcuauuuggccacauugaacuuugugcaucgggaccuagcuacucgcaauugcuuagugggugagaacuuuacuauuaagauagcugauuuuggaaugucccgcaaucucuacgccggcgacuauuaccgagugcaggguagagccgugcuuccuauucgguggauggcaugggaauguauccucaugggaaaauuuacuaccgccucugaugucugggccuuuggcguaacuuugugggaaguucugaugcugugccgggcucagcccuucggacaacuaacagacgaacaagugaucgagaaugccggagaauucuuccgagaccaaggucgucagguuuauuuauccagaccaccugccugcccccaaggccuguacgaacuaaugcugcgcuguuggaguagggagucugaacagcgaccccccuucucccagcuacaucgauuucuugccgaggaugcucuaaauaccgucuag

SEQ ID NO: 289090 - protein, 1162 aa, Artificial Sequence
  derived and/or modified sequence
MEPNDSTSTAVEEPDSLEVLVKTLDSQTRTFIVGAQMNVKEFKEHIAASVSIPSEKQRLIYQGRVLQDDKKLQEYNVGGKVIHLVERAPPQTHLPSGASSGTGSASATHGGGSPPGTRGPGASVHDRNANSYVMVGTFNLPSDGSAVDVHINMEQAPIQSEPRVRLVMAQHMIRDIQTLLSRMECRGGPQPQHSQPPPQPPAVTPEPVALSSQTSEPVESEAPPREPMEAEEVEERAPAQNPELTPGPAPAGPTPAPETNAPNHPSPAEYVEVLQELQRLESRLQPFLQRYYEVLGAAATTDYNNNHEGREEDQRLINLVGESLRLLGNTFVALSDLRCNLACTPPRHLHVVRPMSHYTTPMVLQQAAIPIQINVGTTVTMTGNGTRPPPTPNAEAPPPGPGQASSVAPSSTNVESSAEGAPPPGPAPPPATSHPRVIRISHQSVEPVVMMHMNIQDSGTQPGGVPSAPTGPLGPPGHGQTLGSTLIQLPSLPPEFMHAVAHQITHQAMVAAVASAAAGQQVPGFPTAPTRVVIARPTPPQARPSHPGGPPVSGTLQGAGLGTNASLAQMVSGLVGQLLMQPVLVAQGTPGMAPPPAPATASASAGTTNTATTAGPAPGGPAQPPPTPQPSMADLQFSQLLGNLLGPAGPGAGGSGVASPTITVAMPGVPAFLQGMTDFLQATQTAPPPPPPPPPPPPAPEQQTMPPPGSPSGGAGSPGGLGLESLSPEFFTSVVQGVLSSLLGSLGARAGSSESIAAFIQRLSGSSNIFEPGADGALGFFGALLSLLCQNFSMVDVVMLLHGHFQPLQRLQPQLRSFFHQHYLGGQEPTPSNIRMATHTLITGLEEYVRESFSLVQVQPGVDIIRTNLEFLQEQFNSIAAHVLHCTDSGFGARLLELCNQGLFECLALNLHCLGGQQMELAAVINGRIRRMSRGVNPSLVSWLTTMMGLRLQVVLEHMPVGPDAILRYVRRVGDPPQPLPEEPMEVQGAERASPEPQRENASPAPGTTAEEAMSRGPPPAPEGGSRDEQDGASAETEPWAAAVPPEWVPIIQQDIQSQRKVKPQPPLSDAYLSGMPAKRRKTMQGEGPQLLLSEAVSRAAKAAGARPLTSPESLSRDLEAPEVQESYRQQLRSDIQKRLQEDPNYSPQRFPNAQRAFADDP

SEQ ID NO: 289091 - protein, 197 aa, Artificial Sequence
  derived and/or modified sequence
MEPNDSTSTAVEEPDSLEVLVKTLDSQTRTFIVGAQMNVKEFKEHIAASVSIPSEKQRLIYQGRVLQDDKKLQEYNVGGKVIHLVERAPPQTHLPSGASSGTGSASATHGGGSPPGTRGPGASVHDRNANSYVMVGTFNLPSDGSAVDVHINMEQAPIQSEPRVRLVMAQHMIRDIQTLLSRMECRGGPQPQHSQPP

SEQ ID NO: 289092 - protein, 743 aa, Artificial Sequence [sequence omitted]

SEQ ID NO: 289093 - DNA, 3489 bp, Artificial Sequence
  derived and/or modified sequence
atggagcccaacgattcaacttccacagctgtggaagaaccggactcactcgaagtgttggtcaaaacattggattcgcaaacaaggactttcattgttggggctcagatgaatgtcaaagaatttaaagaacacatagcagcctcagtgtccattccatccgaaaaacagaggctgatctatcaaggccgggtcttgcaggacgataagaagttgcaagagtataatgtcggggggaaagtgatacatctggtagaaagagctccgcctcagacccacttgccaagtggggcatcctctggcaccggttctgccagcgcaactcacggtggcggctcaccccccggcacgcgcgggcctggtgcgtccgttcacgatcgcaacgcaaactcctatgtgatggtgggtacctttaacctgccgtcagacggatcggcagtggacgtgcatattaacatggagcaagcacctattcagtccgagcctcgggtgcgactggtgatggctcagcatatgattagagacatccagacactcctgtcaaggatggagtgcaggggggggccacaaccccagcatagtcaaccaccaccccaaccccccgccgtcacacctgagcccgtagcccttagttctcagacatcagagccagtcgaatcggaagcacccccgcgggagccgatggaggccgaagaggtcgaagagagggcaccagcccagaatcctgagctcactccaggccccgcccccgccgggcctaccccagcgcccgagaccaacgctcccaaccatccaagccctgccgagtacgttgaagtgctacaggagcttcagcggctggagagccggctgcagccttttttacagcggtattatgaagtgctgggagccgccgccacgacagattacaacaacaatcacgagggccgggaagaggaccagagactgatcaacctggtaggcgagagccttcgccttttggggaatacttttgtggctttgtccgatctaagatgtaatcttgcttgtactccccctagacatctccacgttgtgcgtcctatgtcacactataccacccccatggtgcttcagcaggccgccatcccaatccagataaacgtgggcaccacagtcaccatgactggaaatggcacgcggccaccaccaactccgaacgccgaggccccacctcccggacccgggcaagcttcgtccgttgccccttccagcacaaacgtggaatcatctgccgaaggggcaccaccccctggcccagcccccccccccgctacatcacacccgagagtgataaggataagtcatcagagcgttgaacctgtagtaatgatgcatatgaatatacaagactctgggacgcagccaggaggcgtgccctccgcccccactgggcccctgggtccacccgggcacggacaaaccctggggagtaccttaattcagctgccatctctgccccctgagtttatgcacgctgtggctcaccagatcacacaccaggccatggtggcagcggtggcttccgctgccgccgggcagcaggtccccggatttcccaccgcgcccacccgagtggtgattgcccggcctacgccccctcaggcgaggcccagtcacccaggggggccacccgtgagtggcacccttcaaggcgccggcttgggtacaaatgcaagtctggctcaaatggtgagtggtctcgtgggacagctgctgatgcagcctgtcctggtagctcagggaacacctggaatggcgccgcctccagccccagccacagcttctgcctctgcagggaccactaacactgcaacaacagcgggccccgcaccgggcggccctgctcagcctccccctacgccacagccaagcatggccgatctgcagttctcacagctgctaggaaacctgctgggaccggcagggccaggtgccggagggagcggcgttgcttcacctacgatcaccgtcgccatgccaggagtacccgccttcctccaggggatgacagattttctgcaggccactcagactgcaccaccaccccccccgccgccccctccgccccccccggcccctgagcagcaaaccatgccacccccaggtagtcctagcggaggtgcagggtcccctggggggcttggcttggagagcctctcacccgagttttttacaagtgtggtgcagggcgtgctaagcagcctgcttggatctctgggtgcacgcgcaggcagctcagagagcatcgctgccttcatacagcgactgagcgggtcctccaatatctttgaacccggagctgacggggctctggggttcttcggagctctgttatccttgctgtgccagaatttctccatggtcgacgttgttatgctcctccacgggcattttcaacccttacagagactgcagccgcagctgaggtctttttttcatcagcactatctgggagggcaggagccgaccccaagcaatattagaatggccacacatactctcatcactggactcgaagagtatgttagggaaagctttagtctggttcaggtacagccgggtgtcgacattatacggacaaacctcgagttcctgcaagaacagttcaatagtattgccgcacacgtcttgcactgcaccgatagtggctttggggcccgtctgctcgagctgtgcaatcaaggcctgttcgaatgcttggctctgaatcttcattgtttgggaggtcagcagatggagctggcagccgtgattaatggacggatcaggagaatgagcaggggagtgaatccatctctggtgagttggttgacgacaatgatgggcctgcgcctgcaggtcgtccttgaacacatgcccgttggaccagatgccatcttaaggtatgtgagacgcgtaggagaccctccccaaccgctgccggaggagcccatggaagtgcaaggggccgagagagcttcccctgagccacagagggaaaatgcttcccccgcacccggcaccacagcagaagaggccatgtctcgcggcccacctcccgcgcctgagggcggctctcgggatgagcaagacggggcttctgcggagacagagccttgggcagccgccgtcccaccagaatgggtgccaattatacagcaggacattcagtcacagcgaaaggtcaagccacaaccacctctgtcagatgcgtacctctccggcatgccagctaagaggagaaaaaccatgcagggagagggaccccagctgctgctcagcgaagccgtgagccgcgccgccaaagctgccggggccaggccattgacctccccagagtctctgagccgcgatctggaggctcccgaagtgcaggagtcgtaccggcaacagctgcgctcggatatccagaagcgcttgcaagaagaccctaactactcaccacaacgcttccccaacgctcaacgcgccttcgcagacgacccttag

SEQ ID NO: 289094 - DNA, 3489 bp, Artificial Sequence
  derived and/or modified sequence
atggagccaaatgatagtaccagcaccgctgttgaggaacccgactccctggaggtgttggtcaagactctggactcccaaactagaacatttatcgtgggcgcccagatgaacgtgaaggaatttaaggaacacattgcggcttcagtctccataccttccgaaaagcagcgactgatttaccagggacgagtgctgcaggatgataagaagctccaggagtataatgttggaggcaaagttatccacctagtggaaagagctcctcctcagacccacctgccgagcggagccagctcgggcaccggatccgcctccgcaacccatggcggtggaagcccacccggtacccgggggccaggggcctcagtgcacgatcggaacgccaattcctatgttatggtggggaccttcaatcttccttccgacggatcagcagtggacgtgcacatcaatatggagcaggcccccatacagagtgagccccgtgttcgccttgttatggcgcaacacatgattcgcgatattcagactttattatctcgcatggagtgccgcggcggtccacagccccaacactcccagccccctccgcaacccccagccgtgactccagaacctgttgcactttcgtctcagaccagcgagccagttgagagcgaggctcctccgagagagcccatggaagccgaggaggtagaggaaagggcacctgcccagaacccagagctaacccccgggcccgcccctgctggccccaccccagcaccggaaacaaatgctccaaaccacccctcccccgcggagtatgttgaggtgctccaggaactccagaggttagaaagtcgactgcagcctttccttcaaagatactacgaggtgctgggcgctgccgctaccacagattacaacaacaaccacgaggggagggaggaggatcagagactgattaatctggttggagaatcactgcgcctcctgggaaatacgttcgttgccctcagcgacttgagatgcaacctggcctgcaccccccctaggcacttgcacgtagtccgaccgatgtcacactacacaacgcctatggttcttcagcaggccgcaatccctattcagataaatgtggggacaacggtgactatgactggtaacgggacgagaccgccaccaacacctaatgcagaggctcctcccccagggccgggacaggctagctccgtcgcacctagctccacaaacgtcgaatcatccgctgaaggtgctcctccacccggacctgctccaccacccgcaacttcacatccccgcgtcatccggatcagtcaccagtctgtggagccggtggtgatgatgcatatgaacattcaagattctggcactcaacctggtggcgtgccttctgcacctaccgggccattaggtccacctggacacggccaaaccctcgggagtacccttatacagctgccctctctccccccggaattcatgcatgccgttgctcatcagatcactcaccaggcaatggtggcagccgtcgccagcgcggcggcaggccagcaagtccctggatttcccacagccccaactcgcgtagtaattgccagaccaacacccccacaggcccggccatctcaccccggcggccctcctgtctccggtacactgcagggggccgggttgggcacgaatgctagtcttgcccaaatggttagtggactggtgggtcagcttctgatgcaaccagttctcgtcgcccaaggaacccccggaatggcaccaccccccgcacctgccaccgctagcgcctctgctggaacgaccaataccgctactacagccggtcccgcaccaggaggacctgcacagccaccgccaacgccccaaccatcgatggctgatctccaattcagccaactgctgggtaatctcctgggccctgcaggaccaggcgctggtggacccggggtggcctctcccacgattaccgtggcgatgcccggcgttcctgcctttctgcagggaatgacagacttccttcaagccacacagactgctccaccgccgcctccgccaccgccccctccgccacctgcccctgaacagcaaaccatgcctccacccggctctccttcaggcggagcagggagtccgggcggcttaggtcttgagtcgttgagccctgagttctttacatctgtcgtccagggagtgctctcttccctgttgggaagtcttggcgctagagctgggagcagcgaaagtatagctgcttttatccagcgtttgagcggcagttctaatatcttcgagcctggagccgacggcgcactcggattttttggagctcttctttccctattatgccagaatttctcaatggtggacgtggtgatgttgctacacggtcattttcagccactccagcggctccaaccgcaattacgcagcttcttccaccagcactacctgggcggtcaggagcccacaccaagcaatatacgcatggctactcatactctgattaccggcttggaggaatacgtaagagagtccttttcgcttgtgcaagtccagcccggagtggacattatccggacaaacctcgaatttttgcaggagcagtttaactccatcgctgcccatgtactacactgcacagatagtggcttcggggctcggctgttggaactgtgtaatcagggtttattcgagtgcctggcgctgaacctccattgtctcggcggccagcagatggagctcgccgcagtgattaatgggaggatacgaagaatgtcacggggagtgaacccatcactggtgagctggctcactaccatgatgggactccggctccaggttgtgctggagcatatgccagttggaccagatgccattcttaggtatgtgcggcgcgtcggcgacccaccccagcccctgcctgaggagcctatggaggtgcaaggtgcggagcgcgcctcgcctgaacctcagcgcgaaaacgcctctcccgcccccgggactacagctgaagaagcaatgagtcgcggcccccctccagccccagagggggggtcgcgggatgagcaggacggagctagcgccgaaactgagccctgggcagcagccgtgccacctgagtgggtgcccataattcaacaagacattcagagccaaagaaaagtgaaaccacaacccccactgtcggatgcatacttaagcgggatgcccgcaaaacgacgcaaaactatgcaaggggaagggccccagctgttgttgtctgaggctgtgtctcgggccgctaaggcagctggggctcgtcctctgacctctcctgaatcactttccagagatctggaggcacctgaagtccaagagagctatcggcagcagctccggagtgacatccaaaagcgtctacaggaggatccaaactatagtccccaacgctttccaaacgcgcagagggcttttgcggacgatccatag

SEQ ID NO: 289095 - DNA, 3489 bp, Artificial Sequence
  derived and/or modified sequence
atggagcccaacgatagtaccagcaccgctgtcgaggagccggactccctggaggtgctcgttaaaacactggattctcagacaaggactttcatcgtgggtgcacagatgaacgtcaaggagtttaaagaacatatcgcggctagcgtgtccatcccaagtgagaaacagaggcttatctaccagggacgcgtacttcaggatgataaaaagctgcaggaatacaacgtgggtgggaaggtgatacacctggtggaacgtgccccaccacagacccacctgccttccggcgcctccagtgggacaggatctgcatccgccacccacggggggggctccccacctgggacaagggggccaggggcaagtgtacatgaccgtaacgcaaacagctacgtaatggtgggcaccttcaatttgccttccgacggatctgcagtcgatgtacacatcaacatggaacaggccccaatccagtccgaacctcgcgtccgcctggttatggcccagcacatgatcagggacatccagacgctgctgtcgagaatggagtgtcgcggaggaccgcaacctcagcacagccagcccccgccacaaccccccgccgtgacgcctgaacccgttgcactgagttcccaaacttctgagcccgtggagagtgaggccccgcctagggagccaatggaagcagaggaggtggaggaacgggcacctgcccagaacccagaactcacacccggtcccgctcccgccggacctacacctgctccagaaacgaatgcccccaaccacccatcccccgccgaatatgtcgaggtcttacaggagttgcaaagactggaatccagactccaacctttcctgcagaggtactatgaagtcctcggggctgctgcaactacagattataataacaaccacgagggacgcgaggaggatcagcgcctgatcaacctggtgggcgaatctttgagactcttgggaaacacattcgtcgcactaagtgatctgcggtgtaacctggcatgtactccacctagacatctgcatgttgtacggcctatgtctcactataccacccccatggtactccagcaggccgcgattcctatacagataaacgtcgggacaactgtaaccatgacgggtaacggcactaggcctccgcccacgcctaacgcagaggccccacctccaggtcccggccaggcgtctagcgttgcccccagctccaccaacgtggagagtagtgcagagggggccccaccccctggcccagcccctccaccagcaacttcccacccgcgcgtgattcgcatcagccatcagtccgttgagcccgtggtgatgatgcacatgaacattcaagattcaggcacccagcccggaggcgtgccttctgcacccacaggccctttaggtccccctggccacggccagacactcggtagcaccctgattcaactgccatcgcttcccccagaattcatgcatgctgtggctcaccaaatcacccaccaggcaatggtggcggcagtagcctcagccgccgctgggcagcaggtgccagggttcccaacggccccaacgcgggttgtcatagccagacctactccgccccaggccaggccgtcgcaccccggcgggccgcctgtgagtggaacacttcaaggtgccggtcttgggaccaacgcttcactggcccagatggtgtctgggctggtcggccagcttttgatgcagcccgtgctggtggcccagggaacaccagggatggctccacctccggcccctgcaactgcatccgcatccgcgggaacaaccaacaccgctacaaccgccgggcctgcacctggcggcccggctcagcctcccccgaccccacaaccaagcatggccgatttacagttctcgcaactactggggaatttgctgggaccagcaggccccggagctggtggccctggagttgctagtcccaccataactgtggccatgcccggcgttcccgctttcctacagggaatgaccgactttctgcaggcaacacaaactgccccccccccaccaccccctccccctccacccccaccagcccccgagcagcagaccatgccgcccccaggttcaccctcgggaggggcggggtccccgggcgggctggggttggagtccttgtcgcccgagttttttacgagcgtggtgcagggtgttcttagctcattacttggctcactcggagcccgcgccgggagctctgagtcgattgcagcctttatccagcggttatccggcagcagcaatatttttgaacctggagcggatggcgctctggggttctttggagccctgctgagcctgctgtgtcaaaatttctcaatggtggatgtcgtcatgctcctccacggacactttcaacccctccaaaggttacaaccacagcttagatctttttttcaccagcattatttgggaggccaggaaccgacacccagcaatattcgaatggccactcacacgttaataactgggttggaggagtatgtgcgcgagagtttctcgttggtgcaagtgcagcccggagtggacataatcagaaccaacttggagtttctgcaggaacaattcaattccatcgcggctcacgtgctgcattgcaccgatagcgggttcggcgccagacttcttgaactctgtaatcaggggctgttcgagtgcttggccctgaacctgcactgcctcgggggacagcagatggaactggcagctgttattaacgggcgcataagaagaatgtcccgtggcgtgaacccatctctcgtgagctggctaactacaatgatggggctgcggctgcaggtagtcctggagcacatgcccgttggtcctgacgcaattttgcggtatgttcggcgtgtgggtgaccctcctcagccgttgccagaagaacctatggaggtgcagggcgccgagcgcgcctccccggaaccccagagagagaacgcctcccctgctcccgggacaaccgcagaagaggccatgtcacgcggacctcccccagcaccagagggcgggagtagggatgagcaggatggggcgtccgccgagacagagccttgggcagccgccgtgccgcccgagtgggtgcctattatccagcaggacatccagagccagcgcaaagtcaaacctcagccacctttgagtgacgcctacctgtcaggtatgcctgccaaacgccggaagacaatgcagggggaggggccacagttactccttagtgaggctgtttcaagggctgctaaggccgctggcgcccgtccgctgacctcaccagagagcctgagcagggatctggaggccccagaagtgcaggaatcatataggcaacagcttcgttctgatattcagaagaggctgcaggaggatccaaattacagcccccaacgcttcccaaacgcacagagagcctttgctgacgacccttag

SEQ ID NO: 289096 - DNA, 3489 bp, Artificial Sequence
  derived and/or modified sequence
atggagccaaacgattccacctccaccgcggtggaagagcccgatagtcttgaagtgcttgtgaagaccctggactcccagaccaggacttttatcgtcggggctcagatgaacgttaaagagttcaaagagcacatcgcagcctctgtcagcatcccctcggaaaagcaacgactcatctatcagggtagggtgctccaagatgacaagaaattgcaggaatataacgtaggtggaaaagtgattcatctcgtggagagggccccacctcagacccatctcccaagtggcgcgagttcaggtactgggagcgctagcgccacccacggtggcggatccccaccaggaacccgggggccaggggcatccgtgcatgaccggaacgcaaattcttatgtgatggttggaacctttaacctgcccagcgatgggagcgccgtcgatgttcatatcaatatggaacaggctcccattcagtccgagccccgcgtgcggctggtaatggcccaacatatgatcagagatatacagaccttactctcaaggatggagtgtagagggggacctcagccacagcattcacagccgccgccgcaaccgcccgctgtgactcctgagccagttgctctgtcatcccagacatctgagccagttgagagcgaggcacctccgcgtgagcccatggaggcagaagaggtggaagagcgcgcacccgcccagaaccccgaactgactcccggacccgcgcccgccgggccgaccccagcgcccgaaacaaatgctccaaatcatcctagccctgccgagtacgttgaggtgctacaggaacttcagcggctcgagtctcggctgcaaccattccttcaacgatactacgaggtcttgggggcagcagctaccacggactataataacaatcatgaggggagggaggaggaccagagactgattaatttagtcggcgaatctttgcgactactgggcaatacctttgtggctcttagtgatttgcgctgtaatctggcctgtaccccaccacggcacctacacgtcgtgaggcccatgtcgcactacacaacacccatggtgttacagcaggccgctattccgattcagatcaatgttggcacaacggtgacgatgactggcaacggcaccagaccaccacctacgcctaacgctgaggcccccccccccggacctggccaggcaagtagcgttgccccttccagcaccaatgttgagagcagcgccgaaggcgctccaccccctgggccagctcccccacctgccacaagccatccgagggtgatccggataagccaccaaagcgtggaacccgtggttatgatgcacatgaacattcaggatagcgggactcagcccgggggagtcccgtccgcccccactgggcccttagggcctccggggcacggacagaccctgggttctactttgattcagctgcctagtttgccccccgagttcatgcatgcagtcgcccaccagatcacgcatcaggctatggtagccgccgtcgcctccgcggcagcaggacaacaggtgcctggttttcccacagcacccactcgtgtagtgatcgcaagaccaactcctccacaggctaggccttcgcaccccggtggcccccccgtcagcggcactctgcagggagcaggcctcggcacgaatgcatctctggcacagatggtgtccgggctggtaggacaactgctgatgcagcctgtactggtcgcgcagggaactcccggcatggcccccccgccggcgcccgcgacagcttccgcctctgccggaacaacaaataccgctaccactgcagggcccgccccagggggtcccgcgcaaccacccccaaccccccagccttctatggccgacctgcagttttcccagttactagggaacctgctgggccctgctgggcctggggctgggggctctggggtcgcgtcacccactattacagtcgctatgcctggtgtgccagcctttttgcagggcatgacagactttttacaagcaacccagaccgccccacctccgccgccaccacccccaccgcccccccccgcaccagagcagcagaccatgccacctccaggaagcccaagcggcggcgcgggctcacccgggggactcgggctcgaaagcttatcaccagaatttttcacatccgtggtacagggagtgctgtctagtctcctcgggtccctcggagcacgtgctgggtcaagtgaatccatagcagccttcatacagagactcagcgggtctagcaacatcttcgaaccaggagctgatggagcattaggattttttggagccctcttgtcacttctttgtcaaaacttttccatggttgatgtggtgatgttactacacggccatttccaaccactccagagacttcagccacagctccggagtttcttccaccagcattacctcggcggccaagagccgacccccagtaacatccgaatggcaacccacacgctgattacagggctcgaggagtacgtgcgggaaagcttttctctcgtgcaagtgcagccaggtgtagacatcatccggaccaaccttgagttcttgcaggagcagttcaacagcattgcagctcatgtgctgcattgtactgacagcgggttcggcgcacggctgctggagctctgtaatcaagggctgtttgagtgcctggccctgaacttacactgtctcggaggccaacagatggagctggccgccgtaatcaacggccgaatcaggcgcatgtccagaggtgtgaatccaagtttagttagctggcttacaaccatgatgggcctgcgactccaggttgtgctggagcatatgcctgtgggacccgatgcaattctgaggtatgtgcgtagagtgggagatcccccacaacctctgcccgaagagcctatggaggtacaaggagccgaacgggcaagccccgagccccagcgcgagaatgcctccccggctcctggcactacagctgaagaagccatgagccgcgggccgcccccagcacccgaaggtgggagcagagacgaacaggatggggcctcggctgagaccgagccctgggctgccgccgtgccccctgagtgggtgccgattatccagcaggacatacagtctcagcgaaaggtcaagccgcaaccccccctctcggacgcgtatctgagcggcatgcccgccaagcggcgaaagacaatgcaaggcgagggtccacagctgctgttatctgaggccgtgtctagagctgccaaggcggctggggccaggccgctgacctctcccgagagtttaagcagagacttggaggccccagaggtccaggaatcttacagacagcagctgcggagcgacattcagaaacgtcttcaagaggatcctaactacagtccccagcggtttccgaatgctcagagggccttcgccgacgacccttag

SEQ ID NO: 289097 - DNA, 3489 bp, Artificial Sequence
  derived and/or modified sequence
atggaacccaatgatagcacctcaacagctgtggaggaaccagattctctcgaggtacttgtaaagaccttggattctcagactcgtactttcatcgtgggggcccagatgaacgtgaaggaattcaaggagcatatagctgccagcgtgagcattcccagcgaaaagcaaagactgatttatcaaggacgcgtgctccaggatgacaagaaactccaggagtacaatgttgggggtaaagtcatccatttggtggagagagctcccccccagactcacctgcctagtggcgcaagtagcgggacgggctctgcctctgcaacgcacggcggaggaagtccacctggaactagaggccccggcgcttctgtgcacgacaggaatgccaacagctacgtaatggtaggtaccttcaatcttcccagcgacggcagcgccgtcgacgtccatattaacatggaacaggcgcccattcagtccgaacccagagtgagacttgtcatggctcaacatatgattagggatatccaaactctcctctctcgcatggaatgccgggggggacctcagccccagcacagtcaaccacctcctcagcctccggctgtgactccagagccggttgcgttatcatcccagacttccgaacctgtggagtctgaagcacccccacgcgagcctatggaagccgaagaggttgaggaacgcgcaccagcgcaaaaccccgaactgacccctggcccagcacccgccggaccaaccccagccccagagaccaacgccccaaaccatcctagcccagctgaatacgttgaagtgctacaggagctgcagcgactagagtcccgactgcagccattcctccagcggtactatgaggtactaggggcagccgctaccacggattacaacaataaccatgaaggccgagaggaagaccagcggctgattaacttggtgggcgagtcgttgcgattactggggaacacctttgtcgccctcagtgacctgagatgcaatctcgcttgtacccctccacgtcacctgcacgtggtgagacccatgtcccactacacaactcccatggttctacaacaggccgcgatcccaattcaaatcaacgtcggcaccacagttaccatgactggcaacggcacgcgacctcctcccacacctaatgccgaagctcccccacccggacccggacaggccagctcggtggcccccagtagcaccaatgtagaaagcagcgctgaaggtgcaccccctcctgggccagctcctcctcccgctacgtcccatccaagagtcattagaatttcccaccagtctgtggaacctgttgtgatgatgcacatgaacattcaagacagtggaacgcaacctggtggcgttccctccgcacctaccgggccccttggccccccgggccacgggcagactctaggatccaccctgatccaactcccaagcctgccaccagaatttatgcacgctgtcgcccaccagattacccatcaggctatggtagctgcagttgcctctgctgcagctggccagcaggtgcccggctttcccactgcccccacacgggtggtaatcgcgcgcccaacacctccccaagcccggccctcccacccaggcggcccgccagtgtccgggacattgcagggtgccgggctggggactaacgcgtccctcgctcagatggtttctggcctcgtgggtcagcttctgatgcagcccgttctggtagcacaagggacaccaggaatggcaccacccccggctccagccactgccagtgcttcagctgggactactaacacagccacgacagccggccccgcacctggaggtcccgctcagcctccgccgacaccccagccatccatggccgacctgcaatttagtcagctgctcggcaacctcttgggaccagcaggaccaggggccggaggatcaggagtggcctccccgacaatcacagtcgctatgccaggagttcccgcgttcctgcaggggatgacagattttctccaagcgactcagactgcccctccaccaccacctcccccaccccccccaccaccggcaccagagcagcagacgatgcctcccccgggcagcccttcaggaggcgcagggtcaccggggggtcttggcttagagtctctgtctcccgagtttttcacatccgttgttcaaggggtgctaagttccctgctgggctctctaggggcccgggccggttcatcagagtccattgccgccttcatacaacgcctgtcgggaagctcgaacatattcgagcccggcgccgatggcgccctgggttttttcggtgccctactgtcattgttgtgccaaaatttctctatggtggatgtggttatgctgttgcatgggcacttccaaccactgcagcggctgcagccacaattacgctctttcttccaccagcattaccttgggggccaggagcccaccccaagcaacataagaatggctacccacaccttgatcacgggtctggaagaatacgtaagggaatccttctccctggtccaggttcagcccggggttgatatcatcaggaccaatctggaattcctgcaggagcaatttaattccatcgccgctcatgtcctgcactgtacggattctggctttggggcgcggctgttagagctgtgcaatcagggattatttgagtgcctggccttaaatctccattgtctcggcgggcagcaaatggagctggcagccgttatcaatggcaggattcgacgcatgagccggggagtgaatccaagccttgtcagctggttgacgaccatgatgggtttacggctgcaggtggtattagaacacatgccggtaggaccggatgcgattctccggtatgtaagaagagtaggggaccctccgcagcctttgccggaggaaccaatggaggtccagggcgccgagagagcctcccctgaaccccagcgggaaaacgccagtcccgcgcctggaactacggcggaagaagccatgtcaagaggcccccctccagctcccgaaggaggaagtagagatgagcaggatggcgcatcggccgaaacagaaccttgggccgccgcggtgccaccggaatgggtccctatcatacagcaggacattcaaagccaaaggaaagttaagccgcagccacccctatctgatgcatatctgagtggcatgcctgctaaaaggagaaagacaatgcagggggagggtccacaattgctactttcagaggctgtcagccgggctgctaaggcagccggggcccgacccctcacatcacccgaatctctctctagggatttggaggctcccgaagtccaggagtcttataggcagcaactccggagtgatatccaaaagaggctgcaggaagatcccaattactctcctcagcggttccccaacgctcaacgtgcctttgccgatgatccgtag

SEQ ID NO: 289098 - DNA, 3489 bp, Artificial Sequence
  derived and/or modified sequence
atggaaccgaacgacagcaccagcactgccgtcgaggagcccgacagtctggaagtcctcgtaaaaactctggacagccaaacacgaaccttcatagtcggtgctcagatgaatgtgaaggaatttaaggaacatattgccgcctccgttagcatcccaagcgagaagcagcgcctcatttaccagggtcgcgtgctccaggacgataaaaaactgcaggaatacaatgtcggcggcaaagttatccatctagtggagcgcgcgcccccacagacacatcttcccagtggggcttccagcggcacaggctctgcatctgccacccatgggggaggatccccgcccggcaccagaggtccaggagctagcgtgcatgatagaaatgctaactcctacgtcatggtgggcactttcaacctgccctccgatggctccgcagtggacgtccacattaatatggagcaggctccaattcagtcagaacctcgagtgcggctggtaatggctcagcacatgattagagacatccagacattattgtctaggatggagtgccgcggaggcccacaaccacagcattctcagccacctcctcagcctccggccgtcactcccgagcccgtggcactgagctcgcaaacatctgagccggtcgaaagtgaggcccccccccgagaaccaatggaggccgaggaagtggaggaacgcgctcccgcacagaatcctgaattgacacctggacctgcccccgcaggacccacgcctgcaccggagacgaacgccccaaatcacccttccccggccgagtatgtggaggtcctccaggagttgcagcgcctggagtcaagacttcaaccttttctccaacgctactatgaagtgttgggagcagccgctactaccgactataacaacaatcacgaaggccgggaggaggaccagcggctaatcaatctggttggcgagtccctcaggctgttgggaaatacattcgtcgccttgtccgacctgaggtgtaatttggcctgcacgccaccacgccatttgcacgttgttaggcctatgagccactacacaacaccaatggtgctacagcaggctgccattccaatccagattaacgtaggcacgacagtcacaatgaccggcaacggaactcgccctcctccaactccgaacgcagaagcccctccaccaggcccaggtcaagcctcctccgtggctccctcctccaccaatgtcgagtcttcggccgagggtgctcctccacctggccccgcccctcctccagccacgtcacatccccgcgtgatacgcatctcacatcagtccgtcgaacccgtggtgatgatgcacatgaacattcaggactctgggactcagcctggaggcgtccccagcgcaccaactgggcctctcgggcctcctgggcacgggcagactttgggttcaacccttattcagctcccgtcactacctcctgagtttatgcacgcagtcgcacaccagattacacatcaggccatggtagctgccgtcgcatctgccgcagcaggacagcaggtgcccggctttccaactgctcctactcgggtcgttatcgcgcggcctacaccgccacaggctcgccctagccaccctgggggcccaccagtgtccggcactttacagggtgcagggctcggcactaacgcgtctctcgcccaaatggtctccgggcttgtggggcagttactgatgcagccagtcctggtcgcccaagggaccccgggcatggccccgcctccagcaccggcaaccgctagcgcaagcgccggaacaactaatacagccaccaccgccggccccgcaccgggtgggccagctcagccaccccctaccccacaacctagcatggcagacctgcagttttcccaactgctgggcaaccttctggggccggccggacctggcgctggcgggcctggcgtggctagccctacaataacggtggcaatgcctggtgtaccagcattcttacaggggatgactgatttcctgcaggcaacccagaccgcaccccctccacctccgcctcctccaccacctcctcctgcccccgagcagcagacaatgcctccaccaggcagccctagcggaggtgccggctcccccggaggacttgggttggaatcacttagcccagagttttttaccagcgtagtccagggggtcttgagcagtttgctaggttctcttggagcccgcgcaggctccagcgagagtattgcagcatttatccagagactcagcggatcctccaatatcttcgagccaggagccgacggggcactgggcttcttcggtgcattgctaagtctgttatgccaaaatttctcaatggtggatgtcgttatgctactgcatggacactttcagccactccaaaggttgcagccacagctgcggagtttttttcatcagcactacttgggaggacaggagcccactcctagtaacatacggatggccacccacacactaatcaccgggctggaagaatacgttagagagtccttcagtctggtccaggtgcaacctggcgtggacatcattagaacaaatcttgagtttctgcaagaacagttcaacagtatagccgctcacgtgcttcattgcactgactccgggtttggcgctagactcctggagctatgcaatcaaggattgttcgagtgtctggcactgaatctccactgcctggggggacagcaaatggagctagcagccgttatcaatggaagaatcaggaggatgtctcggggggttaacccaagcctggtctcatggctgaccaccatgatgggactccggttacaggtggttcttgaacatatgcccgtgggtcctgatgcaatcctgcgatatgtaaggagggtgggggatcctccgcagcccctgcctgaggaacccatggaggttcagggcgctgagagggccagtccagaacctcagagggaaaacgcctctcccgcgccggggactaccgctgaggaagctatgtctcgcggaccacctccggctcctgaaggcggatcacgcgatgaacaggatggcgcttccgcagagaccgaaccttgggctgccgcagttccgcccgaatgggtgccaattatacagcaggacattcagtcccaaaggaaggtgaagccgcagccccccttgagtgacgcctacctcagcggcatgccagccaagcgtcgtaaaacgatgcagggtgagggaccccaactcctgctgtccgaggcagtgagtcgggcggcgaaggcagccggagcgagaccgcttacctctcctgaatctctctcgagagacttagaggctcccgaagtgcaggagagttacagacagcagctgaggagcgacatccagaaaaggcttcaggaagatccaaactatagcccacaaagatttcccaacgcacagagagccttcgccgatgatccatag

SEQ ID NO: 289099 - DNA, 3489 bp, Artificial Sequence
  derived and/or modified sequence
atggaacctaacgattctaccagtacagccgtggaagaacccgactctctggaggtccttgtgaaaaccctagattcacagacaaggacatttattgtgggagctcagatgaatgtgaaggagttcaaagagcacatcgccgcctccgttagtatcccctcagaaaagcaaaggctgatctatcaagggagggtcttgcaagacgacaagaagttgcaggagtacaacgtgggtgggaaggtgattcacttggtcgaacgtgccccccctcagactcacctgcccagcggggccagttctggaactggcagtgcgtctgctacccatgggggaggctcacctccaggcacacgcggtcctggggctagcgtccacgatcgcaatgctaatagctacgtgatggtgggaacgtttaatttaccgagcgacggctccgctgtggacgtccatatcaatatggaacaggcacccattcagagcgagccaagagtgaggctggtgatggctcagcacatgatcagagacatccaaacactgttgagccggatggaatgccggggaggaccacagccgcagcactctcagcccccgcctcagcctcccgcagtgacccccgagcccgtagcactctcatcacagacctctgaaccagtggaatctgaagctcccccacgcgagcccatggaggccgaagaagtcgaagagcgggcgccagcccagaatcccgagctaacccctggcccagctcccgcgggccctacaccggcaccagaaactaatgcaccaaatcacccaagccccgccgagtacgtcgaggtgctgcaggagctgcagcgccttgagtctagactccagccgttcttacaacggtattacgaggtcctcggcgcagcagctacaactgattataacaataaccacgaaggccgcgaagaggatcaacggctaatcaacctggtgggggaatccctccggctcctcgggaacacctttgtggccctgagtgacctgcgatgtaatctggcttgtacccccccccgacatctccatgttgtccggcccatgagtcactacactaccccaatggtactacaacaagccgctatcccgatccagatcaacgttgggaccacagtaaccatgaccggaaatggaactcggccaccaccgacaccaaacgccgaggcaccaccccccggccccgggcaggcctcctctgttgctcctagtagtaccaacgtagaaagctcagccgagggggctcctcctccaggcccggcacccccacccgccacctcccacccgcgggtcatacggatcagccaccagtcagttgagcctgtcgtgatgatgcacatgaatatccaggacagtgggacccaacccgggggtgtcccctccgcaccaacaggaccattgggacccccaggtcatggtcaaacactgggcagcacgttgattcagctcccgagtctgccacccgaattcatgcacgcagttgcccatcagatcacccatcaagccatggtggcagcagtggcctctgctgctgctggccagcaggttccagggttccccacagcccccacgcgggtggtaatcgcacgccctacaccacctcaggccagaccttcacaccctggcggaccccccgtgagtggaactctccaaggcgccggtctgggaacaaatgcgagcctcgcccaaatggtgagcgggcttgtgggccagctgctcatgcaaccagttctcgtggcgcagggcacccctggaatggccccaccccctgccccggccaccgcttctgcaagcgccgggacaaccaacaccgcgactacagctgggcccgcacccggggggcccgcccagcctccacctactccccagccctctatggccgatctccagttctcacaactgctgggtaatctgctggggccagctgggcctggcgcgggtggatccggcgtggcctcgccaacaattactgtggccatgcctggagtgcctgcattcctccaaggcatgacagatttcctgcaggccacacagactgcaccaccccctcccccgccccccccacctccacctcccgccccagagcagcaaacaatgcctccccctggaagcccctcaggaggagccggttctccgggaggtctcgggctcgaaagtctgtcacctgaattcttcactagtgtcgttcagggggtgctatcttcacttctaggatctcttggggcgcgcgccggcagctctgagtccattgccgccttcatccagaggctctcaggctcatccaacatttttgaacctggagccgacggcgcactcggcttcttcggagcactgttaagcctactatgccagaacttcagcatggtcgatgtggtgatgctgttgcacggtcactttcagccactgcaaaggctacagcctcagctgcgctctttcttccatcagcattacctggggggtcaggaaccaaccccctcgaacatcaggatggctactcataccctcattacaggactagaagagtacgtgcgggagtcattcagcttggtgcaagtacagcctggagttgatattatcagaactaatctggaatttctccaggagcagtttaacagcattgctgctcacgttttgcactgcacggattccgggttcggggcgcgccttttggagttatgtaatcaaggcctgttcgaatgcctggctctcaacctccactgcctcggaggacagcagatggaactggctgcagtcatcaatgggcgaattcgtcgaatgagccgcggcgtgaaccctagtctggtctcatggctcacaactatgatgggccttagactgcaagtagtgctagagcacatgcccgtgggtcctgacgccatccttaggtacgttcggcgagttggcgatccaccacagcctctgcccgaagagccaatggaagtgcaaggcgcagagagggcaagtccagaacctcaacgggaaaatgcgagtcccgcacctggcaccacagccgaagaggccatgagcagaggcccccctccagcaccagagggagggagccgcgacgaacaagacggggctagcgccgaaacagaaccctgggccgccgctgtgcctcctgaatgggtccccatcatccagcaggatattcagtctcagcgcaaggtgaagccccaaccacccctctctgatgcttatctgagcggaatgcccgcgaagcgacgaaagacaatgcaaggggagggccctcagctgctcctctccgaagcagtgtcccgcgctgctaaggccgcaggcgccagacccctgacctctcccgagtctttgtcccgggatctggaagctcctgaggtgcaggagtcataccgtcaacaattgcggtctgatatccagaagagactccaggaggatccgaactacagcccccagcgatttcctaacgcccagcgggctttcgcggacgacccatag

SEQ ID NO: 289100 - DNA, 3489 bp, Artificial Sequence
  derived and/or modified sequence
atggagcccaatgacagcaccagcacagctgtggaggagccagacagcctggaggtgctggtgaagaccctggacagccagaccaggaccttcatcgtgggcgcccagatgaatgtgaaggagttcaaggagcacatcgccgcctctgtgtccatccccagcgagaagcagaggctcatctaccagggccgggtgctgcaggatgacaagaagctgcaggagtacaacgtgggcggcaaggtgatccacctggtggagcgggccccaccccagacccacctgcccagcggggccagcagcggcaccggcagcgccagcgccacccatggaggcggcagccccccaggcacccggggccctggggcctctgtgcatgacagaaatgccaacagctatgtgatggtgggcaccttcaacctgcccagtgatggcagcgctgtggatgtgcacatcaacatggagcaggcccccatccagagcgagccccgggtgcggctggtgatggcccagcacatgatccgggacatccagaccctgctgagcaggatggagtgccggggcggcccccagccccagcacagccagcccccaccccagcccccagctgtgaccccagagcctgtggccctgagcagccagaccagcgagcctgtggagagcgaggccccaccccgggagcccatggaggccgaggaggtggaggagcgggccccagcccagaaccctgagctgaccccaggccctgccccagctggccccaccccagcccctgagaccaatgcccccaaccaccccagccctgcagaatatgtggaggtgctgcaggagctgcagaggctggagagccggctgcagcccttcctgcagcgctactatgaggtgctgggcgccgccgccaccacagactacaacaacaaccacgagggccgggaggaggaccagaggctcatcaacctggtgggggagagcctgcggctgctgggcaacacctttgtggccctgagtgacctgcgctgcaacctggcctgcaccccacccaggcacctgcacgtggtgcggcccatgagccactacaccacccccatggtgctgcagcaggccgccatccccatccagatcaacgtgggcaccaccgtgaccatgactggaaatggcacccggcccccacccaccccaaatgctgaggcccctcctcctggccctggccaggccagctctgtggcccccagcagcaccaacgtggagagcagcgctgagggcgcccctcctcctggccctgcccctcctccagccaccagccaccccagggtcatccgcatcagccaccagagcgtggagcctgtggtgatgatgcacatgaacatccaggacagcggcacccagcccggcggcgtgcccagcgcccccaccggccccctgggccccccaggccacggccagaccctgggcagcaccctcatccagctgcccagcctgcccccagagttcatgcatgctgtggcccaccagatcacccaccaggccatggtggccgctgtggccagcgctgctgctggccagcaggtgcccggcttccccacagcccccaccagggtggtgattgcccggcccaccccaccccaggcccggcccagccaccctgggggcccccctgtgtctggcaccctgcagggcgccggcctgggcaccaatgccagcctggcccagatggtgtctggcctggtgggccagctgctgatgcagcctgtgctggtggcccagggcaccccaggcatggcccctcctccagccccagccacagccagcgccagcgctggcaccaccaacacagccaccacagctggccctgcccctgggggccctgcccagcccccacccaccccccagcccagcatggctgacctgcagttcagccagctgctgggcaacctgctgggccctgctggccctggggccggcggcagcggcgtggccagccccaccatcaccgtggccatgcctggggtgcctgccttcctgcagggcatgacagacttcctgcaggccacccagacagcccctcctcctcctcctcctcctcctcctcctcctccagcccctgagcagcagaccatgcctcctcctggcagccccagcggcggggccggcagccctgggggcctgggcctggagagcctgagccctgagttcttcacctctgtggtgcagggcgtgctgagcagcctgctgggcagcctgggcgcccgggccggcagcagcgagagcattgctgccttcatccagaggctgagcggcagcagcaacatctttgagcccggggctgatggagccctgggcttctttggagccctgctgagcctgctgtgccagaacttctccatggtggatgtggtgatgctgctgcacggccacttccagcccctgcagaggctgcagccccagctgcgctccttcttccaccagcactacctgggcggccaggagcccacccccagcaacatccgcatggccacccacaccctcatcaccggcctggaggagtatgtgcgggagagcttcagcctggtgcaggtgcagcccggggtggacatcatccgcaccaacctggagttcctgcaggagcagttcaacagcattgctgcccacgtgctgcactgcacagattctggctttggagcccggctgctggagctgtgcaaccagggcctgtttgaatgtctggccctgaacctgcactgcctgggcggccagcagatggagctggccgctgtgatcaatggccgcatccggaggatgagcagaggagtgaaccccagcctggtgtcctggctgaccaccatgatgggcctgcggctgcaggtggtgctggagcacatgcctgtgggcccagatgccatcctgcgctacgtgagaagagtgggggaccccccccagcccctgcctgaggagcccatggaggtgcagggcgctgagcgggccagccctgagccccagcgggagaatgccagccctgcccctggcaccacagctgaggaggccatgagccggggccccccaccagcccctgagggcggcagcagagatgagcaggatggagccagcgctgagacagagccctgggccgctgctgtgcccccagagtgggtgcccatcatccagcaggacatccagagccagaggaaggtgaagccccagccccccctgagtgatgcctacctgagcggcatgcctgccaagaggaggaagaccatgcagggcgagggcccccagctgctgctgtctgaggccgtgtcccgggccgccaaggccgccggggcccggcccctgaccagccctgagagcctgagccgggacctggaggcccctgaggtgcaggagagctaccggcagcagctgcggagtgacatccagaagaggctgcaggaggaccccaactacagcccccagcgcttccccaatgcccagagggcctttgctgatgacccctag

SEQ ID NO: 289101 - DNA, 3489 bp, Artificial Sequence
  derived and/or modified sequence
atggagcccaatgacagcaccagcacagctgtggaggagccagacagcctggaggtgctggtgaagaccctggacagccagaccaggaccttcatcgtgggcgcccagatgaatgtgaaggagttcaaggagcacatcgccgcctctgtgtccatccccagcgagaagcagaggctcatctaccagggccgggtgctgcaggatgacaagaagctgcaggagtacaacgtgggcggcaaggtgatccacctggtggagcgggccccaccccagacccacctgcccagcggggccagcagcggcaccggcagcgccagcgccacccatggaggcggcagccccccaggcacccggggccctggggcctctgtgcatgacagaaatgccaacagctatgtgatggtgggcaccttcaacctgcccagtgatggcagcgctgtggatgtgcacatcaacatggagcaggcccccatccagagcgagccccgggtgcggctggtgatggcccagcacatgatccgggacatccagaccctgctgagcaggatggagtgccggggcggcccccagccccagcacagccagcccccaccccagcccccagctgtgaccccagagcctgtggccctgagcagccagaccagcgagcctgtggagagcgaggccccaccccgggagcccatggaggccgaggaggtggaggagcgggccccagcccagaaccctgagctgaccccaggccctgccccagctggccccaccccagcccctgagaccaatgcccccaaccaccccagccctgcagaatatgtggaggtgctgcaggagctgcagaggctggagagccggctgcagcccttcctgcagcgctactatgaggtgctgggcgccgccgccaccacagactacaacaacaaccacgagggccgggaggaggaccagaggctcatcaacctggtgggggagagcctgcggctgctgggcaacacctttgtggccctgagtgacctgcgctgcaacctggcctgcaccccacccaggcacctgcacgtggtgcggcccatgagccactacaccacccccatggtgctgcagcaggccgccatccccatccagatcaacgtgggcaccaccgtgaccatgactggaaatggcacccggcccccacccaccccaaatgctgaggcccctcctcctggccctggccaggccagctctgtggcccccagcagcaccaacgtggagagcagcgctgagggcgcccctcctcctggccctgcccctcctccagccaccagccaccccagggtcatccgcatcagccaccagagcgtggagcctgtggtgatgatgcacatgaacatccaggacagcggcacccagcccggcggcgtgcccagcgcccccaccggccccctgggccccccaggccacggccagaccctgggcagcaccctcatccagctgcccagcctgcccccagagttcatgcatgctgtggcccaccagatcacccaccaggccatggtggccgctgtggccagcgctgctgctggccagcaggtgcccggcttccccacagcccccaccagggtggtgattgcccggcccaccccaccccaggcccggcccagccaccctgggggcccccctgtgtctggcaccctgcagggcgccggcctgggcaccaatgccagcctggcccagatggtgtctggcctggtgggccagctgctgatgcagcctgtgctggtggcccagggcaccccaggcatggcccctcctccagccccagccacagccagcgccagcgctggcaccaccaacacagccaccacagctggccctgcccctgggggccctgcccagcccccacccaccccccagcccagcatggctgacctgcagttcagccagctgctgggcaacctgctgggccctgctggccctggggccggcggccctggggtggccagccccaccatcaccgtggccatgcctggggtgcctgccttcctgcagggcatgacagacttcctgcaggccacccagacagcccctcctcctcctcctcctcctcctcctcctcctccagcccctgagcagcagaccatgcctcctcctggcagccccagcggcggggccggcagccctgggggcctgggcctggagagcctgagccctgagttcttcacctctgtggtgcagggcgtgctgagcagcctgctgggcagcctgggcgcccgggccggcagcagcgagagcattgctgccttcatccagaggctgagcggcagcagcaacatctttgagcccggggctgatggagccctgggcttctttggagccctgctgagcctgctgtgccagaacttctccatggtggatgtggtgatgctgctgcacggccacttccagcccctgcagaggctgcagccccagctgcgctccttcttccaccagcactacctgggcggccaggagcccacccccagcaacatccgcatggccacccacaccctcatcaccggcctggaggagtatgtgcgggagagcttcagcctggtgcaggtgcagcccggggtggacatcatccgcaccaacctggagttcctgcaggagcagttcaacagcattgctgcccacgtgctgcactgcacagattctggctttggagcccggctgctggagctgtgcaaccagggcctgtttgaatgtctggccctgaacctgcactgcctgggcggccagcagatggagctggccgctgtgatcaatggccgcatccggaggatgagcagaggagtgaaccccagcctggtgtcctggctgaccaccatgatgggcctgcggctgcaggtggtgctggagcacatgcctgtgggcccagatgccatcctgcgctacgtgagaagagtgggggaccccccccagcccctgcctgaggagcccatggaggtgcagggcgctgagcgggccagccctgagccccagcgggagaatgccagccctgcccctggcaccacagctgaggaggccatgagccggggccccccaccagcccctgagggcggcagcagagatgagcaggatggagccagcgctgagacagagccctgggccgctgctgtgcccccagagtgggtgcccatcatccagcaggacatccagagccagaggaaggtgaagccccagccccccctgagtgatgcctacctgagcggcatgcctgccaagaggaggaagaccatgcagggcgagggcccccagctgctgctgtctgaggccgtgtcccgggccgccaaggccgccggggcccggcccctgaccagccctgagagcctgagccgggacctggaggcccctgaggtgcaggagagctaccggcagcagctgcggagtgacatccagaagaggctgcaggaggaccccaactacagcccccagcgcttccccaatgcccagagggcctttgctgatgacccctag

SEQ ID NO: 289102 - DNA, 3489 bp, Artificial Sequence
  derived and/or modified sequence
atggagcccaacgacagcaccagcaccgccgtggaggagcccgactccctcgaagtactggttaaaacactggatagccagacgagaacatttatcgtcggggcccagatgaatgtaaaggagtttaaagagcacatcgctgcctctgttagtattccaagtgaaaagcagcgcctcatctaccagggaagggtgctgcaagatgacaaaaaactgcaggagtataacgtcgggggtaaggtgatccacctcgtggagagagccccaccccagacccatctgcccagcggtgccagttcaggtacggggtctgcctcagccactcatggtggtggcagcccgccaggaactcgcggccccggagcgtccgttcacgatagaaatgcaaacagctatgttatggttggaactttcaatctgccatctgacggaagcgcagtggacgttcatataaatatggaacaggcccctatccagagcgagcctcgcgtgagactggtaatggctcagcacatgatcagggatattcagaccctgttaagcaggatggagtgtagaggagggccccaaccccagcatagccaacccccgcctcagccccctgctgttacacctgaaccagtcgccctgtcatctcagacctcagaacccgtcgaatccgaagcaccacctcgagagccaatggaggccgaagaggtggaagagcgtgcccctgctcagaacccagagctgactccgggccctgcccctgctggccccaccccagcaccggaaactaacgcgcccaatcacccctctccagccgaatacgtggaggtgctgcaggagctgcaacggctggagagcaggctgcagccttttttgcagcgttattatgaggtcctcggcgccgcagcaaccaccgactacaataataaccacgagggtagggaggaagatcagcggctcataaaccttgttggcgagagtctccgactgctggggaatacttttgttgccttaagtgatttacgctgtaacctggcttgtacccccccccgccacctccacgtggtccggcccatgtctcattacactacacctatggtgctgcagcaggccgccattccaattcagatcaatgttggcacgacggtcacaatgactgggaacgggactcgacctcctccaacgcccaatgctgaagcgccaccacctggacctggtcaggcttccagtgtggccccctcttctaccaatgttgagagctctgccgagggcgctcctccccctggaccggctccccctcctgcgacaagccatccacgggtcatccgaatctctcaccagtctgtggagccggtggtgatgatgcatatgaacattcaggattccggaacacagcctggcggcgtgcctagcgcaccgacaggacctctcggacccccaggccacggccagacattgggatccaccctcattcagctcccttcacttcctccagagttcatgcacgccgtcgcacatcagattacccatcaagcaatggttgccgccgtggctagcgctgccgcgggccaacaggttccagggtttccgactgcgccaactcgggtagtgatcgctcggccaacacctccgcaggcacgaccttcacatcctggaggaccacctgtctccggtacgctgcagggcgccgggcttggcactaatgcgtcactggctcagatggtgtctggccttgtcggacagctgctgatgcagccagtgctggttgcacagggcacaccaggcatggcgccaccccctgccccagccaccgcgtccgctagtgctggaaccacaaacaccgccaccacagcaggccccgcacctggtggccctgcccagccccccccaactccacagcctagcatggccgacctccagttcagccagctcctgggcaatctgctcggaccagccgggccaggggctggcggaagcggggtcgcctcccccacgataacagtagcgatgcccggggtgcccgctttcctccagggtatgacagacttccttcaggctacccaaacagcgcctcctcctcctccgcctccgcccccccctccccccgctcccgaacagcaaactatgccacccccagggagtccatcaggaggggccggaagtcccggggggctcggactagagagtctcagcccagagttctttacctcggtggtccaaggagttctgagctctctcctgggtagcctcggggcccgagctggaagctctgagagcatagctgcctttatccagcgcctgtctggcagttccaacatctttgaacccggcgctgatggcgcattgggattttttggggcattgctcagtctgttatgtcaaaatttcagcatggtggatgtggtaatgctcctgcatggccacttccagcccctgcagcgcctgcagcctcagctgcgctcattctttcaccaacactatttaggtggccaagaacctaccccatctaacattcgaatggctacacatactcttattaccgggctggaggagtatgtgcgtgaatccttttctcttgttcaggtgcagcctggcgtggacataatacgcactaatctggagttcctccaggaacaatttaactccattgccgcccacgtcctgcactgcaccgattccgggtttggggcacggcttcttgaactgtgtaaccagggtctgttcgagtgcctagccctgaatctacactgtcttggtggacaacagatggaacttgcggctgttattaatggaagaattcgaagaatgagcagaggtgtgaacccctctcttgtgtcatggctgaccacgatgatgggcctgaggctgcaggttgtgctcgagcatatgccggtaggaccagacgctattctgagatacgtgagaagagtaggggaccctcctcagccactcccagaggaaccaatggaagtccagggggccgaacgtgcttcacccgaacctcaaagggagaatgcaagccctgccccaggaacaaccgccgaggaggctatgtcacgagggcctcctccagctccggagggggggtctagagatgagcaggatggcgcaagtgccgagacagaaccatgggccgccgcagtgccacctgaatgggtgccgataatccagcaggatatccaatcccaaaggaaagtaaagccgcaacccccactgagcgatgcctacctgtccgggatgccagctaagcggagaaaaacgatgcagggagagggcccgcagctccttctgtctgaagctgtttcgcgcgcagcaaaggcggccggagcaagacctctaacgtcaccggaatccctttctcgagatctggaggccccagaggtgcaggagagttacagacagcagttgaggagtgatattcaaaagcggctccaggaggacccaaactattccccccagagattcccaaacgctcagcgggccttcgcagacgacccctag

SEQ ID NO: 289103 - DNA, 3489 bp, Artificial Sequence
  derived and/or modified sequence
atggagcccaacgacagcaccagcaccgccgtggaggagcccgactctcttgaagtgctcgttaagacattagactctcagactcgaacctttatcgttggtgcccagatgaatgtaaaggagttcaaggagcatattgccgcgagcgtctcaatcccttccgagaaacagcgcctcatatatcaggggcgggttctgcaggacgacaagaagctgcaagaatataatgtgggagggaaagtgattcatctggtcgagcgcgctcctcctcaaacccacctgccgtccggagctagttcaggaacaggaagtgcttcagccacgcacggaggaggatccccgcctgggacaaggggtccaggcgcttccgtgcacgaccgaaacgccaatagctatgtgatggtgggcacatttaaccttccatccgatggctcagccgtggacgtgcatattaatatggagcaggcccccatccagtcagagccccgggtacgccttgttatggctcagcacatgatacgggatatccagaccctgctatccagaatggagtgtaggggcgggccccagcctcagcactcccagccacccccccagccccccgccgtgacccccgagcctgtagccctatcctcgcagacctcagaaccagtggagtccgaagctccaccccgcgaaccaatggaggccgaggaagtggaagagagagcccccgcccagaaccctgagctgacaccagggcccgcaccggctggtccgaccccagctccagaaacaaatgccccaaatcacccctctcccgctgaatacgtggaggtcttacaggagctgcagcgcctcgagtctaggctgcaaccattcctccaaagatactacgaagtcctgggcgctgccgcgactactgattacaacaacaaccacgagggcagagaggaagatcaacgtctgattaacctggtgggcgagtcacttagactcctcggcaacacctttgtggctctgagtgacctgcgctgcaacctcgcctgcaccccccccagacacctgcacgtggtgagaccaatgtctcattacacgacgcccatggtcttgcagcaggctgcaatacctattcagataaatgttgggaccacagtgacaatgaccggaaacggcacgcgacctcccccaactccaaacgctgaagcccccccgccgggccccgggcaggcgtctagtgtggctccctccagcacgaacgtggagtcttccgctgagggagcccctccaccaggacctgctcctccaccagctacgagccacccaagggttattaggattagccatcagagtgtcgagcctgtggtgatgatgcacatgaatatacaggattctggcactcagccagggggtgtaccgtctgctcctacaggccctttggggccaccaggtcacggccagacactcggctcaaccctgattcagcttccatcactgcctccagaatttatgcatgctgtggctcaccagatcacccatcaggcgatggtcgcagcagtagcctccgctgctgctgggcagcaggtaccaggatttcctaccgcccctaccagagtggtaatagctcgaccaacccccccccaagccagaccttctcaccctgggggccctccagtgtccggcaccctgcagggcgccggcctgggtacgaacgcaagcttggcccagatggttagcggcttggtcgggcagctgctgatgcagcccgtcctagtcgcccagggcacccctgggatggcgccacctcccgccccagctactgcctctgccagtgcgggtaccaccaacactgccacaaccgccgggccagccccaggcggaccagctcagcctccgcccactccgcaaccctccatggctgacttgcagttcagccaactcctggggaaccttctcggccccgcaggacctggggctgggggacccggagtggccagccccaccatcaccgtggcgatgcctggtgtccccgcatttcttcaaggcatgaccgactttcttcaggcgacccaaactgcccccccaccacccccccctcccccaccccccccccctgcgcccgagcaacagacaatgccccctccgggttccccctcgggtggcgccgggagccctggagggctgggcttagagtcactcagccctgaattttttacatccgtggtgcagggcgtcttgtcatccctccttggctctcttggtgccagggccggcagcagcgagtcaatagctgcgttcatacagagactgtccggatcatccaatattttcgagcccggcgctgatggggcgctgggttttttcggggccctgttatccctcttgtgtcagaacttctcaatggtcgatgttgtaatgctgctccacggccatttccagcctctgcaacgcctgcagccccagctgcgttccttctttcaccagcattacctgggtggacaggaaccaacgccgagcaacattcgcatggctacccacaccctgatcaccggactggaggagtacgtgcgtgaatccttctcactcgttcaggtacagccaggtgtggatatcatccggacgaacctcgagtttttacaagaacagttcaactctatcgccgcccacgtgctgcactgtactgattccgggttcggcgcccgactactggaactttgcaaccagggcttattcgagtgcttggctctgaatcttcattgtctgggcggtcagcagatggagctggctgcagtcatcaatggccgaatcagaagaatgagtcggggggtaaatccctctttggtctcttggctgaccactatgatgggactaagacttcaagttgtgcttgagcatatgcccgttgggcctgacgctatactgcggtatgtgcgtcgggtgggcgaccctccccagcctctgccggaagaacccatggaggtgcagggcgcagaaagggcttcaccggaaccccagagggagaatgcaagtcccgcccctggtacaactgcagaggaagcaatgagccggggcccaccgccggcccccgaaggcggaagcagggatgagcaggatggggcaagtgccgaaacagaaccatgggccgcagcggtaccacctgagtgggtgccgatcatccaacaggatattcagagtcaacgtaaggtaaagccccagcctcccctgtcggatgcatatctaagcggaatgcccgctaaaaggaggaagactatgcaaggcgagggtcctcagctgcttctttccgaggccgtgagtcgggctgcaaaggccgctggcgcaagaccgttgacctccccggagtcactttcacgcgatctcgaggcccctgaagttcaagagagttaccggcagcagttgcggtctgatattcaaaagcggctgcaagaagatccaaattactctccacagcgatttccgaatgcccagagagcctttgccgacgacccctag

SEQ ID NO: 289104 - DNA, 3489 bp, Artificial Sequence
  derived and/or modified sequence
atggagcccaacgacagcaccagcaccgccgtggaggagcccgactcactcgaggtgctcgtcaaaactctcgattcccaaacaagaacgtttattgtgggcgcgcagatgaatgtcaaggagttcaaggagcatatcgccgctagtgtttccatcccttcagagaaacagcgcctgatctatcaggggcgggtgcttcaggatgataagaaattgcaggagtacaatgtcggcggtaaagtgattcaccttgtagaacgggccccacctcaaacacacctcccctccggggcttcaagcggaacaggttctgctagtgccacacatggaggcggaagtcctcccggcactcggggacccggggcctccgtccatgatcgcaacgccaacagttacgtgatggtgggaaccttcaatttacccagcgatggctctgcagttgacgttcacattaacatggagcaggctccaatccagtcggaaccgagagtcaggctggtgatggcacagcatatgatccgggatatccagaccctgctgtcgcgcatggaatgtcgcggaggtccacagccccaacattcgcagccacctccccaacctccagctgtcacacccgaacctgttgcactgtcgagccagacaagtgagcccgtggagagcgaggccccccctcgcgagccaatggaagcagaggaggtagaggagagggcgccggcccagaatcccgagctgacacccggcccagctccagccggtcccactccggcccccgagaccaatgcaccgaatcacccctcacctgcagagtacgtcgaagtgctgcaggagctccaacggcttgaatcccgcctccagcccttcctacagagatattacgaagtgctaggggccgcagcaacaacagattataataacaaccacgagggtagggaggaagaccagcgcctcattaatctggtcggcgaaagcctgagattacttgggaatactttcgtggccctgtctgatcttagatgtaacctggcatgcacccctccaaggcacttgcacgtggttcgcccgatgtcccattataccactcctatggtattgcagcaggcagccatccccattcaaattaatgtgggaacaactgttaccatgaccgggaacggtacgagacctccacctacgcccaatgcggaggccccacccccagggcccggacaagctagctctgtggctccatcttccactaacgtggaatcaagcgccgaaggcgctccaccccccgggcctgcccctcctccagctaccagtcaccctcgcgtaataaggataagccatcaaagcgtcgagcctgtcgttatgatgcacatgaatatacaggattcgggtacacagccgggcggggtgccctccgctccaaccgggccccttggtcctcctggccacggccaaactctgggcagcacacttatacaactgcctagcctgcccccagagtttatgcacgccgtggcccaccagatcacgcaccaggctatggtggcagctgtggctagtgccgctgccgggcaacaggtcccgggcttccctaccgcgccgacccgggtggtgattgcccgcccaactccgcctcaggcgcggccatctcatcctggaggtccgccggtcagcggaaccttgcagggcgccggcctcggaactaatgccagcctagcccagatggtgtcaggactcgtgggacaattgctcatgcagccggttctggtcgcacaggggacacctggcatggcgccgccccctgctccagctaccgcatcagcctcagcagggacaactaacaccgccacaactgctggaccggctcccggaggacccgcgcagccccctcccacacctcagccatccatggctgacctgcagttttctcagctgttagggaatttattaggaccagcaggacccggagcaggtggacccggtgtggccagcccaacgattacggttgccatgccaggagtgccagcctttctccaggggatgactgacttcctacaggctacgcagaccgcccccccaccaccaccccctcctcccccacctccccctgcccctgaacaacagaccatgccacccccaggttcccccagcggcggggctggatccccaggaggactgggactcgaatccctgagccctgagttctttacgtccgtggtccaaggggtgctcagttctttgctaggctctcttggagctcgtgccggaagtagtgagtcaatagccgcattcatccagcgcctaagtggctcatccaacatctttgagcccggcgccgacggcgccctgggtttctttggggcactcctctcgctattgtgtcagaacttctctatggtggacgtagtcatgctcctccacggccacttccagcctttacaacgccttcagcctcagcttagatctttttttcaccagcattatctgggcggacaagagccaactccatccaacattagaatggccacacatacccttattacgggtctcgaggaatacgtacgggagtcttttagcctggtgcaagtacagccaggagtggacattattcggactaatctagaattcctccaggaacagttcaactccattgctgcgcacgtgctccactgtaccgatagcggtttcggcgcccggctcctggagctttgcaaccaagggctctttgagtgtttagctctgaatctccattgcctgggcggccagcagatggaactggctgccgtaatcaatggaaggattcggcgtatgagcagaggggtcaatcctagcctagtgagttggttgaccactatgatggggttacggctgcaggtcgtcctggagcatatgcctgttgggccagacgctatcttgcgctacgtgcggagggtcggtgatccccctcaacccctgcctgaagaaccaatggaggttcagggcgccgagagggcctctcccgagccgcagcgcgaaaatgctagccccgcaccaggcactacagccgaggaagctatgagtcgcgggcctccccctgcacccgagggcgggtcccgcgacgaacaggacggcgctagtgccgagactgagccgtgggccgcagctgttcctccagaatgggtcccaattatccagcaggatatccaaagccaacgcaaggtcaaacctcagcccccactgtccgacgcatacctttctggtatgcccgccaagaggcgcaaaaccatgcaaggcgaagggccacagttactcctttcagaagcagtgagccgggctgcgaaagcagcaggtgccagacctctgacttcaccagagtccctctcaagagatttggaagcgccggaagtgcaagagagttacaggcagcaactgcgctccgatatccaaaagagactacaggaagaccccaactactcaccacagcgatttccgaatgcccagcgcgcatttgccgatgacccctag

SEQ ID NO: 289105 - DNA, 3489 bp, Artificial Sequence
  derived and/or modified sequence
atggagcccaacgacagcaccagcaccgccgtggaggagcccgactccctggaggtactagttaaaactctggactcacagacgaggacattcatagtcggcgcccagatgaacgttaaggaatttaaggaacacattgcagcatccgtgagcatccccagcgagaagcagaggcttatttatcaagggagagtgttgcaagatgacaaaaaactgcaggagtacaacgtggggggcaaggttattcacctcgttgagcgtgcccccccacagacccatttaccctccggggctagctcaggtacaggctcggccagcgctacacatggcggggggtcaccaccagggacccgcggaccaggggccagcgtgcacgatcggaatgccaactcttatgttatggtcggcacatttaacctgccctccgacggctctgccgtggacgtgcacataaatatggagcaagcaccgattcagagtgaaccacgcgtgaggttggtgatggctcagcacatgatccgcgatattcagacactgctatcaagaatggaatgcagaggtggtccgcaacctcagcacagccagcccccaccgcagcctccggcagtcacaccggagccagtggcgttatcgagtcagactagcgaaccagtggagagcgaggcaccaccgcgcgaaccaatggaggctgaagaggtggaagaacgagcccccgcccagaaccccgaactgacacccggacctgcgccagctggacccacaccagctccagagaccaatgctcctaatcacccttcaccagccgagtacgtcgaggtgctccaggagcttcagcggttggagtctcggctccaaccgttcctccagcgatattacgaggtgcttggggcagccgccacaacggattacaacaacaaccacgaaggcagggaggaggaccagagactcatcaacctggttggggagagtttgcgtctgttgggtaataccttcgtggccttaagcgacctccgatgtaacctcgcttgcacaccacctcgccacctccatgtggtgagaccgatgtcccattatactactcctatggtgctccagcaggcagccatcccgattcagataaatgtggggacaacggtgactatgacaggtaatggcacgaggcctccccctacaccaaatgccgaagctcctcccccgggccccggccaggcctcttctgtcgcccctagcagtaccaacgtcgaatcatccgctgagggcgccccccccccagggcccgcccctccgccggctaccagtcacccccgagtcattagaatcagtcatcaatcggtggaaccagttgttatgatgcatatgaatatacaggattctgggacacagccagggggggttccctctgcccctacaggtcctttgggtccccccggtcatggccaaacgctgggcagcacactgattcagctgcccagcctgccacccgagttcatgcacgccgtcgctcaccagatcacacatcaagcaatggtcgccgccgtcgcgtccgcagctgccggacagcaagtccccggttttcccactgctcccacccgcgtggtcatcgcacggccaactccccctcaagcccggccctctcaccccggcggccctcctgtaagcgggaccctgcagggagcaggcctaggcacaaacgcttccctggcacagatggtgagtggcctggtgggccagctcctcatgcagcctgttctggtggcccaaggtaccccagggatggcacctcccccagctccagcaactgctagcgcctctgccggcaccactaatacagcaacgacagccggcccagccccaggcgggccagcacagcctccccccacacctcagcctagtatggcggacttgcaattctctcagttgctgggcaacttattgggccccgcaggacctggagccggtggctccggagtggccagtcctactattacagtggcaatgcctggtgtgccagccttcctgcaaggtatgaccgactttctacaggccacacagacagcaccccctccccctccacctccacctccccccccacccgcaccggagcagcagactatgccgcctccaggatctccaagcggaggcgccggtagtccgggaggcctgggactcgaaagccttagccccgagttctttacatccgtcgtccaaggagtcctatcttccctcctgggttccttaggggcacgcgcaggatcatcagagtctattgcagcatttattcagagactgtctggctcatctaatatctttgagccgggcgctgatggggctctggggttcttcggggctcttctgtcccttttatgccagaacttttccatggtagatgtcgtcatgttgttacatggtcatttccagccactacaacggctccagccacagctacgaagcttttttcaccaacactacttaggggggcaagaacccactccttccaatatcaggatggcaacacacaccctaatcactgggctagaggagtacgtgagggagagtttcagtctagtgcaggttcagcctggcgtggacattatcaggactaaccttgagtttttgcaggagcagtttaactccatagccgcacatgtactgcactgcacagactccgggttcggagcccgtctgttggaactctgtaaccagggactgttcgagtgcctcgctctcaatttgcactgcctggggggacagcagatggagctagccgccgtcatcaatggccggattcggagaatgtcacggggtgtgaacccctccttagtcagctggctgaccaccatgatggggcttcgcctgcaggtcgtgcttgagcacatgcctgttggaccagacgccattcttcgctatgtgcgccgggtgggggatccaccacaacccttgccggaagaaccaatggaagtccagggagcagagagagcctcacctgagccgcagagagagaacgcatcacccgctcccgggaccacagcagaggaggccatgagtcggggacctccgcctgcacctgaggggggttcaagggatgaacaggatggcgcgagcgccgagactgagccttgggcagccgcagtgccacccgagtgggtgccaatcatacagcaggatatacagtcgcagcgcaaggtcaagccccagcccccgctgagcgatgcctatctatcaggaatgccagctaagcggcggaaaacaatgcagggcgagggaccccagttactgttaagcgaagcagtgagcagagctgccaaggccgccggtgccaggcccctcacctcacccgaaagtctgtccagagacctggaagcaccagaggtccaggagagctacaggcagcagctgcgctcagatatacaaaagcgcttacaggaggatcctaactacagcccgcagcgcttcccaaatgcccagcgcgcttttgcggacgatccctag

SEQ ID NO: 289106 - DNA, 3489 bp, Artificial Sequence
  derived and/or modified sequence
atggagcccaacgacagcaccagcaccgccgtggaggagcccgactctcttgaagttttagtgaagaccctcgatagccagacccggacttttattgtcggcgctcagatgaacgttaaggaattcaaagaacatatcgctgcttctgtgtcaattccctctgaaaaacagaggctcatttaccagggtagggtcctccaggatgacaagaagttacaggagtacaatgtgggagggaaagttatacaccttgtagagcgggccccaccccagacacatctgccctctggtgccagttctggtacagggtcagcgagcgcaacccatggaggtggcagcccgcccgggacccgtggaccgggggcgtctgtccatgatcgcaatgctaattcctatgtgatggtggggaccttcaacctcccctccgatggtagcgcggtcgatgtccatatcaacatggaacaggctcccatccagagcgagccccgggttagactggtcatggcacagcatatgatccgggacatccagactctcctgagccgcatggaatgtcgcggtggaccccagcctcagcacagccaaccaccccctcaaccgccagctgtgacacctgagcccgtcgctttgtctagccagacctctgagccagtagagtccgaggcccctcccagagagccgatggaagcagaggaagtcgaggagcgagcacccgcccagaaccctgaactcacacccggcccggctcccgcaggccctaccccagctccagagaccaatgccccaaatcacccatcgccagcagaatacgtcgaggtactgcaggaattgcagcggctggagtcccggctccagccctttctgcaaagatactatgaggtcctgggcgcggcagcgactactgactacaataacaatcacgaaggcagggaggaggatcagcgccttatcaacctggtgggggagtcactgagactgctgggcaatacctttgtagccctgtctgatctgcgctgtaatctagcttgcactccacctaggcatctgcatgtggtcagacccatgagccactatacaacaccaatggttctgcaacaggcagctatccccatccagatcaacgttggcaccaccgtaacaatgacgggtaacgggacgagaccgcccccaactcccaacgcagaggcaccccctccaggacccggccaggcttctagtgtagccccgtcctccacgaatgtggaaagctccgcagagggagcaccacctcccggcccggcaccacctccagcaacctcccatccccgggtgatacggatctcccatcagtctgtcgaaccggtcgttatgatgcacatgaacatccaggacagcgggacccagcccggcggagtaccctccgcccccacgggcccattagggcctccggggcatggacagaccttagggagtaccctaatccagcttccatccctgccgccagagttcatgcacgcagtggcccaccagatcacacatcaggccatggtcgccgccgtcgcaagcgccgccgccggacagcaggtgcctgggtttccaacagcacctaccagggtggtgatcgcacgcccaacccccccgcaggctagaccttctcacccgggtggcccccccgtaagtgggactctgcagggcgccggcctgggcacaaatgcttctctggctcagatggtttcaggactggtcggtcagctgcttatgcagcctgtactcgtcgcccagggtactcccggtatggcgccccccccggcacctgccacagccagcgcgtcggcggggaccactaacaccgcgaccactgctggcccggctcccggcggccctgcccagcccccacctacaccccaacccagtatggccgacttgcaatttagccaattactggggaacttactgggtccagcgggccctggagctggtggctctggagtcgcctctccaactatcaccgttgcgatgcccggcgtccctgcattcctgcagggtatgacagattttctgcaggcaacacagacagctcctccccccccccccccaccccctcctccgcctcccgcaccagagcagcagacaatgcctccgcctggaagcccgtctgggggggcgggttcaccagggggcctaggtctcgaatccctgtcacctgaattcttcacaagtgtggttcagggcgtgctatcttccctactgggatctctgggggctagagcggggagtagcgagagtattgcagcgttcatccagcgcctctccggcagctcaaatattttcgaaccaggagccgatggggcgctgggtttcttcggcgctctgctctcactactgtgccagaatttctccatggtggatgtcgttatgttacttcatggccattttcaacccttgcagcgactccagcctcaacttaggtccttttttcatcagcactacctggggggacaggagcctaccccatctaacatccggatggcaacacacacactaatcaccggactcgaagagtacgtgagggagagttttagcctcgttcaggttcagccaggagtcgacataatcaggacaaatctggaatttctacaggagcagtttaactccattgccgcccatgtgctccactgtaccgatagtggcttcggcgctagacttctggagctctgtaaccaagggctgttcgaatgtctggccctcaacttgcactgtttgggggggcagcaaatggagctggccgcggtgatcaacggccgtatacgaaggatgtcgcggggcgtgaatcctagtttggtgtcatggctgactaccatgatgggccttcgattgcaggtcgtccttgagcatatgcccgtaggcccagatgccattcttcgatatgtgcgaagggttggcgaccctcctcagccccttcctgaggagcctatggaggtccagggagccgagagggccagcccagagccacagcgggagaacgcctccccagccccaggcaccaccgccgaggaagcaatgtcacgaggccccccccccgcccccgagggcggcagtcgagatgagcaggacggcgctagcgccgagactgagccatgggccgcagccgtgcctcctgaatgggtgccaatcattcagcaggacatccagagtcaaagaaaggtgaaacctcagcctcctctgtccgacgcctacctgagcggaatgcctgcaaaacgccgtaagacaatgcagggggaaggccctcagctgctgctctcagaagcagtgagcagggctgccaaggcggctggggccaggccgttgacatctcccgaatccttatctcgggacttggaggcccccgaagtccaggagagctacaggcagcagttgcgatcagatattcagaagcgccttcaagaggatcctaactactcacctcagcgtttccctaacgcgcagcgtgccttcgccgatgacccatag

SEQ ID NO: 289107 - DNA, 3489 bp, Artificial Sequence
  derived and/or modified sequence
atggagcccaacgacagcaccagcaccgccgtggaggagcccgactctctcgaggtgctcgtcaagacgctggatagccagactaggacctttattgtgggggcccagatgaacgtcaaggagttcaaggagcacatcgctgcttcggttagcattccttccgaaaaacagcggctgatctaccagggccgagtcctgcaggacgataagaagcttcaggaatacaacgtgggtggcaaagtcattcatctggtcgaacgagcccctcctcagactcacttgccgtctggggcgtcgagcggcaccgggagtgcctccgcaacacatggaggcggcagtccacccggcacacgaggccccggggcctcagttcatgatcgcaatgccaactcatacgttatggtgggaacttttaatttgccgagcgacggttctgctgtggacgtccacatcaacatggagcaggccccaatccaaagcgaaccacgggtacgcttagtgatggcccagcacatgatacgcgatattcagaccttactgtcacgcatggagtgccggggcggcccgcaaccccagcactctcagccaccgccacagccgccggctgtcactccagagcccgtcgcactgagcagtcaaacaagcgagccagtggagtctgaggcccctcccagggaacccatggaggctgaggaagttgaagagagggcacctgcacaaaaccccgagctcacccctggtcccgccccagccgggccaaccccagctcccgagacgaacgccccaaaccacccctcaccagccgaatatgtggaggtacttcaggagctacagcggttggagtcacggttacagccgttcctgcagcggtattatgaggtgctgggagccgcggccacaacggactacaataataatcacgaaggacgggaagaagaccagcgactaataaacttggtcggggagagcctcaggctgcttggaaacacttttgtcgctttgtctgacctcaggtgcaatctggcatgcacacctcctagacacctccacgtcgtgcgcccaatgagtcattatacaacacctatggttctgcagcaagctgctatacctatccagattaacgtcggcactacagtcaccatgacagggaacggtaccagacccccaccaactcccaatgccgaggccccacccccaggacctggacaagccagttctgttgctccctcatcgaccaatgttgagagctctgccgagggagcacctccccccggtcctgccccaccacctgctaccagtcacccccgggtgatccgtatttcccaccagagcgttgagccagttgtgatgatgcacatgaatattcaagattccggaacccaacctggaggcgtaccttccgccccaaccggtccgctcgggcctcctggccacggccagacccttgggtctaccttaatccagctcccttctctccctccagagtttatgcacgctgttgcccatcagatcacacaccaggcaatggtcgccgcggtggcctctgctgctgctggccaacaagttcccgggtttcctactgcacctactcgcgttgttatcgcacgacccacaccgcctcaggctcggccgtctcaccccgggggccccccggtctcaggaacattgcagggagcaggtttgggaacgaatgcctctcttgctcagatggtgagcgggctggttggccagctgctcatgcagcccgttctcgtggctcagggcaccccagggatggctccaccccccgcccccgctacggctagcgccagcgccggcaccaccaacacagccaccacagccgggcctgctcctggcgggcccgcacagcccccccccacaccccagcccagtatggccgatctgcagttttctcagctgctgggcaatctgctcggtcccgctggtcctggggccggtggccccggggtcgcaagccccacaatcacagtggcaatgccgggagtgcccgcctttttacaggggatgactgacttcctacaggctacccaaactgcgccacccccaccccctccgccgcctcctccaccccctgccccggaacagcagactatgcccccacctggctcgccgtctggaggggccggcagtcctggaggcttaggcctagagagcctgtctccagagttctttacgtccgttgttcagggcgttcttagctctcttctcggtagccttggtgctagagcaggcagctctgagagcattgccgcatttatccaacgcctgtccggatcctcgaacatatttgagcccggagctgacggggcgctcggtttttttggagcacttttatctctcttgtgtcagaatttttccatggtcgatgtggtgatgcttctgcatgggcacttccaaccgttgcagcggctccaaccccaacttcgctcattctttcatcagcattacctggggggacaagaaccaacaccatctaatattagaatggctacccacacgcttattacaggcctggaggaatacgttcgcgagtcatttagtttggtgcaagtacagcctggggtggacatcatccggactaacttagagttcctacaggaacagtttaactctatcgctgcacatgtgctccattgtaccgattcgggctttggtgcccggttgcttgagctgtgtaaccagggattattcgaatgcttggctctcaacctgcactgcctaggagggcagcagatggagctcgcggctgtgatcaatggtcgaattagacgtatgagccgcggcgtgaacccttccctggtcagttggcttaccacgatgatgggactgcgcctgcaagtggtgctggagcacatgccagtgggtccagacgcaatcctccgttatgttagaagagtcggggacccgcctcagcctctgccagaggagccaatggaagtccagggcgctgagcgcgcttccccagaacctcaacgagaaaacgcctctcccgcacccggcactactgctgaagaggccatgtctcgcgggccaccaccggcccctgagggaggttcccgggacgaacaggacggcgcttcagctgagacagaaccttgggctgccgccgtgcccccagagtgggtgccaatcattcagcaagacatccagagccagaggaaggttaagccacagcccccgctgtctgatgcctacctctccgggatgcctgccaaacggagaaagacgatgcaaggggagggacctcagctgctcctaagtgaggctgtaagcagagctgccaaggccgcgggggctcgaccacttactagcccagagtctttgtcgagagatttggaagcccccgaagtccaagagtcatacaggcagcagctgcggagcgatatccagaaacgccttcaggaagaccccaactactcaccgcaacgtttcccgaacgcacaaagggcctttgctgatgatccgtag

SEQ ID NO: 289108 - DNA, 3489 bp, Artificial Sequence
  derived and/or modified sequence
atggagcccaacgacagcaccagcaccgccgtggaggagcccgactcccttgaagtccttgtgaaaactctcgactctcagactcggaccttcattgttggggcccagatgaatgtcaaggagtttaaagaacatatcgcggcctcagtgagcatacctagtgagaagcagcgtctgatctaccaggggagagtgttgcaggatgataaaaagctccaagagtataatgtcgggggaaaagttatccatcttgtcgagcgggctcccccacagactcacttgccatccggagcatctagcgggaccggcagcgctagtgcaacgcatggaggcggatccccacctggcacccgcgggcccggagcctctgtacatgatcggaatgccaatagctacgtgatggttggtacctttaatctgccctcagacgggtctgctgtggatgtacatattaacatggaacaggctccgatccagagcgaaccccgggtccgcttagtcatggcgcagcatatgatccgtgacattcagactttattgagccgcatggagtgtcgcggcggtccacagccacaacacagccagccgccaccacaaccacccgctgtcactccagagcctgtagcactgagctcccagacgtccgagcccgttgagagcgaagcacctccgcgggagcccatggaggcagaagaggtcgaagagcgcgcacccgcccagaacccagagctgacccctggtcctgctcccgcagggccaaccccagcaccggaaactaacgcacccaatcatccatctcctgctgaatacgttgaggtgctgcaggaactccagcggcttgagtctcgactccaaccctttctacagaggtactacgaggtactcggggctgcagcaaccaccgattataacaataaccacgagggacgcgaggaggaccaaaggctgatcaatctagtaggcgaaagcctccggttactaggaaatacttttgttgctctgtccgatttgcgctgtaacctcgcctgtactccaccacgccatctacacgttgtgcgccccatgagtcactacaccaccccaatggttctgcagcaggctgccatacctattcagattaacgtgggaacgacagtgacaatgacaggaaatggtaccagacctcctccaacaccaaatgctgaagcacccccccccggaccgggacaggcatcatcagtggctccatcctcaacaaacgttgaatccagtgcagagggggccccgccccccggcccagctccaccgcccgccacctcccatccccgtgtcatacgcatcagtcatcagtcggtggagcccgtggtcatgatgcacatgaatattcaggacagcggcacacagcctggcggcgtgcccagcgcaccgacaggccctcttggccccccaggacacggacagactcttggctccacactcattcagctcccctccctccctcccgaattcatgcacgccgttgcccaccagatcacacatcaggcgatggtagctgccgtcgcatccgcagcagccggccagcaggtcccggggttccccacagcccccactagagtggtcatcgcccggcctacacctccacaagcccggccatctcaccccgggggaccacccgtatctggcactttacagggcgcaggcttaggaaccaacgcctctctggcacagatggtttccggcttggttgggcagcttttaatgcagcccgtgctggtcgcccaaggtactcccgggatggccccaccaccagcccccgccacagcatccgcctccgctggaactactaacactgccaccaccgccggtcctgctcccggaggacccgctcagccaccaccgactcctcagccaagtatggccgacttacagttctcacagctgctcgggaaccttctgggccccgctggtccaggggctgggggctctggggttgcctccccaacaattacggtcgccatgccaggcgtgcctgcatttctgcagggaatgaccgacttccttcaggcaactcaaacagccccgccacctcctccccccccccccccacccccccctgcccctgagcaacagacgatgcctccacctggttctcctagtggtggtgcaggcagcccggggggattgggactcgaatctttaagccccgaatttttcacgtccgtggtccagggtgtactttccagtttactgggatcattgggggctcgggccggatctagcgagagcattgctgcttttatacagagactgagcggcagtagcaatatatttgagccgggagccgacggagcactcggcttcttcggagcactgctgtccctgctgtgccagaacttctcaatggtggacgtcgtcatgctcctccatggacatttccagccccttcagcgactccaaccacagctcagaagcttctttcaccagcactatctgggcggacaggagcctacaccatccaacatcagaatggcaacacacactctgattactggattagaagaatacgtgcgcgagtccttctccctcgtacaggtacagcctggtgtagatatcatcagaaccaacttggaatttctacaagaacagtttaatagcatcgctgcacatgtgctacactgcactgattccggcttcggtgccagactactggagctgtgcaaccaagggctgtttgagtgtctcgccctgaatctgcattgcttaggagggcagcaaatggaattggcggccgtgataaacggcaggattagacggatgtctcggggagtgaatccatctctcgtgtcctggcttacgaccatgatgggacttcgactgcaggtagttctcgaacacatgcctgtgggtccagacgccatcctgagatacgtgcgaagggtgggtgacccgccacaaccactgcctgaagagccaatggaagtgcagggagctgagcgcgcctcccctgagccacagcgcgagaatgccagtcctgcacctgggactacagccgaagaagctatgtcgagggggccgcctcctgcgcctgagggtggctccagagatgagcaagacggagctagtgctgaaaccgagccctgggccgcagctgtcccacccgaatgggtaccaatcattcagcaggacatccaaagtcagcggaaggtcaagccccaacccccactcagtgatgcctatctgtccggaatgcccgccaagagaagaaagactatgcaaggagaagggccccagctgcttctttcagaggctgtgtctcgggctgccaaggcggccggggcacgacctctgacgtcccctgagtctctgtcacgcgacctcgaggctcccgaagtgcaggaatcctacaggcagcagctgaggtccgatattcagaaacgcctgcaggaggatcctaattactcgcctcagcgttttcccaacgcccagcgggcatttgctgatgacccctag

SEQ ID NO: 289109 - DNA, 3489 bp, Artificial Sequence
  derived and/or modified sequence
atggaacccaatgattctacgagcaccgccgtggaggagcctgactcattagaagtcctagttaagacactggactcgcaaacccgaacatttatcgttggcgctcagatgaatgtcaaagaattcaaggagcacattgccgcttcagtgagtatcccctccgagaagcagagacttatctatcagggacgagtactgcaggacgataaaaagctgcaggagtataacgtaggaggaaaagtaattcaccttgtcgagcgcgctccccctcaaacccatttaccctccggggcaagcagtggaactggctccgcaagtgctacgcatggcggtggaagtcctcccggtacaaggggacccggagcttccgtccacgacagaaacgctaacagctacgtgatggtcggcacctttaacctgccttccgatggatcagcggtagacgttcacattaacatggaacaggcccctatccagagcgagcctagagtgcggcttgttatggcgcaacacatgatccgggatatccagacgctcctaagccgcatggaatgtcggggtggccctcagcctcagcactcccagcccccaccccagcctcccgctgttactccggagccagtggctctgtcttcgcagactagcgagccagttgagtccgaagcgccacctcgagaacccatggaagcagaggaggtggaggaaagagctcctgcccagaacccggaacttacaccaggcccagcacccgcaggccctacaccagcaccggaaacgaatgctccaaaccaccccagtcctgctgaatatgttgaagtattgcaggagctgcagcggttggagtcccgcctccagccctttctacagcgttactacgaggttcttggagccgctgccactaccgactacaataataaccacgagggacgcgaagaggaccagcgcctgatcaaccttgtcggagagtctcttcgtttactgggtaatacttttgtagcactgagcgatctacggtgcaacctagcgtgcacaccaccaaggcatcttcatgtggtccgacccatgagccactacaccactcctatggtgttgcaacaggccgcaattcccattcagattaacgtgggcactacggtcacaatgaccggaaatggcacccggcctccccctacccccaatgcagaagccccaccccctggccctggccaggcttcctcagttgccccatccagcactaacgtggagagcagcgcagagggcgctcctcccccaggaccagctccacccccagcaaccagtcatcccagggtgattcggatatcccatcaaagtgtggagccagttgtgatgatgcatatgaatatccaagattccgggacccagcccggaggagttcccagtgcgcctaccggacctttgggtcctccagggcatgggcagactttgggatctacccttatacagttaccttccctccctcctgaatttatgcacgcggtcgctcatcagatcacgcatcaggccatggtggccgctgtcgcctccgcagcagccggacagcaagtgcctggatttcctaccgcccctacacgtgtggttatcgctaggcctacccccccacaggcccgacccagtcacccgggaggccctccagtcagcggtacattacagggcgctggattgggcaccaacgcgtcattggcccaaatggtcagcggtttggttggccagctgcttatgcaaccagtacttgtcgcccagggaacgccgggtatggccccacctccagcgcctgccaccgcaagtgcgtccgctggcactacaaacaccgcaaccacagctggaccggctcctggaggcccagcccaacctcccccaaccccccagcccagcatggcagatttacagtttagtcaactgctgggaaacctcctgggccctgctgggccaggagccggtggtagtggtgtagcctcccctactatcacagtggcgatgccaggagtgcccgcattcttgcagggaatgactgattttcttcaggctacacagaccgctccaccgcctcctccaccacctccaccaccgcctccagcaccagagcagcagaccatgcctcctcctgggtccccctcagggggagccggttctccgggaggactaggactcgagtccctctctcccgagtttttcacatctgttgtgcaaggcgtcttgtcttcgctgcttgggtcgctcggagctcgcgcaggtagctccgaaagcatcgcagcgtttattcagagactatcaggatcatcgaacatatttgaacctggcgctgatggggctcttggttttttcggtgcacttctgagtttgctgtgtcagaactttagtatggtcgacgttgtgatgctgctccatggtcatttccagccccttcagcgccttcagccacagctgcggtcttttttccaccagcactacttgggcggtcaagagccgacgccgagtaacatcagaatggctactcataccctgatcaccggcctcgaggaatatgtgagagagtcatttagcttagtgcaggttcagcccggagtcgacattattaggactaatttagaattcctgcaggaacaatttaactccatcgccgctcacgttttgcattgcactgatagcggatttggtgcccgtttgttggagctctgtaaccagggtctctttgagtgtctggctttaaacctgcattgtttgggtggccaacagatggagctcgcagcagttatcaacggtagaatcaggcgcatgtccagaggcgtaaacccctcgctcgtcagttggctcacaacaatgatgggcctgaggctgcaagttgtcctggagcacatgcccgtgggccctgacgccatactgagatacgtcaggagagtcggcgacccgcctcaacctctccctgaagaacctatggaggtacagggtgctgagcgggctagccctgagccacagagggagaatgcatcacctgcccctggaaccaccgcggaggaggctatgagtaggggccctccaccagccccagagggtgggagccgagatgagcaagatggagcaagcgctgaaacagagccttgggcagccgcagttccaccagagtgggtaccaattatccagcaggacattcaaagccaaaggaaggtgaaaccccagcctcccctcagtgatgcttacctttccggcatgcccgctaagaggcggaaaactatgcagggcgagggtccacaacttcttctatccgaggctgttagccgggcagctaaagccgctggagccaggcctctaacctctcctgaaagcctgagcagggacttagaggccccagaggtgcaagaatcctatcggcagcagctgaggtccgacatccagaagcgcctgcaagaggatccaaattatagccctcagcgattcccaaatgcccagagagccttcgccgacgatccctag

SEQ ID NO: 289110 - DNA, 3489 bp, Artificial Sequence
  derived and/or modified sequence
atggagcctaacgattctaccagcacagctgttgaggagcctgattcccttgaggtgctggtgaaaacacttgattcccagacccgcacctttatcgttggggctcagatgaacgtgaaggagtttaaagagcacatcgcagcaagtgtgagtatcccgtccgaaaagcagcgcttgatctaccagggtagagtgttgcaggacgacaaaaagttgcaggaatacaatgtaggcggtaaggttatccacttagtagagagggcccctcctcagacgcatcttccatcgggcgcttcttccggaactggctcggcaagcgccacacacgggggaggcagcccccctggaaccagagggccaggggcttctgtgcacgatcggaacgcaaactcatacgttatggttgggacatttaatttaccttctgatggttccgctgttgatgtacatatcaacatggagcaggccccaattcagtcggaaccacgcgttagacttgtcatggcccaacatatgatcagagatattcagacactcctaagtcggatggagtgcaggggtggtccacagccacaacactctcaaccccctccacagccaccagctgtcacgcctgaacctgttgccctgagctcccagacatccgagccagtggagtccgaggcaccacctcgggaacctatggaggctgaggaggtcgaggagcgcgctcctgcccagaatcccgagctgacacctgggcctgcacctgccggacccacgcctgctcctgagaccaatgctcctaatcacccatcacccgctgaatacgtcgaggttctgcaggagctgcagcgactggagagccgcctgcagccatttctacagaggtactatgaagtgttgggtgccgcagccacaacagattacaataataatcacgaggggcgagaagaagatcagcggctgataaacctcgtaggcgaaagcctcaggctcttaggaaatactttcgtggccttatcggacctgcgatgtaacctcgcatgcacaccgccaaggcatctgcacgtcgtgagacccatgtcacactacaccacccccatggtactccagcaggccgcaatacctattcagattaatgtcggtacaactgtcacgatgaccgggaacggaacacgtccacctcctactcctaacgcagaagcaccgcctcccggtcccggtcaggctagttccgtcgcacccagttccactaatgtggagagttcagccgaaggggcaccccctcccggacccgcacccccaccggcaaccagccatccaagggtaatcaggattagccatcaatcagtagaaccagtagttatgatgcacatgaacatccaggactcggggacccagccagggggtgtgccttcagcgcctacaggacctctgggacccccaggacacggccagactctgggatctactttgatccagttgccaagtctgccacctgagtttatgcacgcagtggctcatcaaatcacacaccaggctatggtggctgccgttgccagtgctgcagccggtcagcaggttcctgggtttcccaccgcccctacccgcgtcgtgattgccagaccaacaccaccacaggcccgtccctcccatcccggtggtccacccgtatcaggaacactccaaggggcaggcctcggcacgaacgcctcgctggcacagatggtcagcggactcgtggggcagctgttgatgcagcccgtactggtggctcaagggacccccggtatggcgccaccacccgcacctgctaccgcttcagccagcgcgggaacgactaataccgcgacgaccgcgggtcccgctcctggaggtcctgcgcagccaccaccaacaccccagccaagcatggctgacctccagttcagccaactgctcggcaatctgctcggacccgcaggccctggcgctggcggacccggagtggcttcacctaccatcacggttgcaatgcctggcgtgccagctttcctgcagggaatgaccgatttcctgcaagccacccagacagctccaccaccacctcccccaccaccacccccaccaccggctcctgagcagcagacaatgccccctcctggctcaccgagtggaggggctggaagtccgggtggtctgggccttgaatcactgtcccccgagtttttcacctcggttgttcaaggcgtgctgtctagcctgttgggctcgttaggcgcacgcgctggttcctccgaatccatcgccgctttcatacagcggctctccgggtcgagcaatatctttgagcctggtgcagatggggctctcgggttcttcggggctctcctcagtctgctatgccagaattttagtatggtggatgtggtgatgctgcttcatggtcatttccaacccttgcagcggctgcagccacaactcaggagtttctttcatcagcattatctaggcggacaggagcccactccgtccaacattagaatggccactcacactctgatcacaggtctcgaggaatatgttagggagtcattctctcttgtgcaggtccagcccggagtggatattatacggactaacctggagtttctgcaggaacagttcaattccatcgccgctcacgtccttcactgcacagactcaggctttggagcacggctcctggaactgtgtaaccagggattatttgagtgcctggccctaaacctacactgcctcggcggacaacagatggagctggccgcagttatcaatggcagaatcaggcgcatgagtcgaggagttaatcccagtctagtttcctggttgactactatgatgggacttcggcttcaggttgtcctcgagcacatgcctgtcggacctgacgccattcttcgctatgtaagacgggttggagacccaccacagcccctgcccgaagaacccatggaggtccagggggctgaacgggcatctcctgagccccaacgcgagaacgcgtctccagcaccagggacaacagctgaggaggcaatgtctagaggaccgccaccagccccagaaggtggcagccgggatgaacaggatggggcttccgcagaaacagagccttgggccgctgcggtgccacccgagtgggtacccatcattcaacaggatatccagagccaacgtaaggtgaaaccccagccacccctgagcgacgcctatctctcagggatgccagcaaagcgcaggaagaccatgcagggcgagggcccacagctccttctttccgaggccgtgtcccgtgctgccaaagcagctggggcacgcccactgacaagccctgagagccttagtagagatctcgaagcccctgaagtgcaggaatcatacagacagcaacttaggtcagacatccagaaacgcctgcaggaggaccccaattacagcccccagagatttcctaacgcccaacgggcatttgccgatgacccatag

SEQ ID NO: 289111 - DNA, 3489 bp, Artificial Sequence
  derived and/or modified sequence
atggaacccaacgattcaacatctaccgcagtggaggagccggacagcctcgaggtcctggttaaaaccctggattcccagacacgcacctttattgtgggcgcacaaatgaacgtcaaggaattcaaagaacacatcgctgcctctgtttccattcccagtgagaagcagcggttaatctatcagggcagagtgcttcaggacgacaagaagctgcaagagtataatgtgggtggcaaggtgatccacctcgttgagcgagccccaccccagactcatctcccttcaggagctagttccgggaccggttctgcttccgcaacacatgggggaggttccccaccgggtacccggggtcctggcgctagcgtgcacgatcgcaacgccaactcttatgtgatggtggggaccttcaacctgccctctgatggttcagcagtggacgtccacataaacatggagcaagctccaatccagtctgagccccgagtccgcctcgtaatggctcagcacatgattagggatatacagaccttgctgtcgcgcatggaatgccgaggagggccacagcctcagcactcccagcctccgccacaacctcccgcagtgacacccgaacccgttgcactgtctagtcaaacttccgagcccgtggaatctgaggcccctccgagagagcctatggaagccgaagaggtggaggagcgggcaccggcacaaaatcccgaactcacccctggacctgcccctgctggcccaacgcctgctcctgagacaaacgcgcctaaccacccttcccccgctgagtacgtggaggtcctgcaggagctgcaacgcctcgagtcgagactgcagccctttctgcaacgttactatgaggtgctcggcgcagcagctacaacggactataacaacaaccacgaaggacgcgaagaagaccagaggctgatcaatctggttggggagagtcttagattgctgggaaatactttcgttgccctgagcgaccttaggtgcaatttggcctgcacgccaccacgccatctgcacgtcgtcaggcccatgagtcactataccacacccatggtcctgcagcaggcggctatccctatacagattaacgttgggactaccgttacaatgacaggaaatggaacacgaccacccccaacccctaacgccgaagctcctcctccaggcccagggcaggcctctagcgttgcaccatcttcgaccaatgtggagtcctcggcggaaggcgcaccaccaccaggcccagccccaccgccagctaccagccaccctcgggtgatccgtatctcacaccagtcagtcgaacccgtggtgatgatgcatatgaacatccaagactccgggactcagcccggtggcgtgcctagcgcccctactggacctctcggtcccccaggacacggacagaccttgggtagcacgttgattcaattgccctctctaccgcctgagttcatgcacgcggtggctcaccagattactcaccaggccatggtggcagcggtggcatccgctgccgctgggcagcaggtgccaggatttccaacagccccaacgcgcgtggtaatagcacggcctaccccgccacaggccaggccctcccaccccggagggccaccggtgtccgggaccctgcagggagcagggctcggcacgaatgccagtctggcccaaatggtgtccgggttagtgggtcaactactcatgcagccagtattggtcgcgcagggaacgccagggatggcaccgcctccagcaccagctaccgcaagcgcttctgcgggtacgacgaatactgctaccacagcgggtccagcccctggtggcccagcccagccacctcccacaccacagcccagtatggctgatctacaatttagccagctgctcggtaacctgctggggcctgctggtcccggagctggagggccaggcgttgcctcccccactatcactgttgccatgcccggagttccagcttttctgcaaggcatgacggacttccttcaagcaacccagacagcccctccaccacctcccccacctcctcctcccccacctgctccggaacagcagaccatgcccccacctggctcaccctctggtggagcgggaagtcccggagggttagggctggaatccctcagcccagagttctttacgtccgtggtacagggcgtgctcagtagcctcctcggaagtttgggagcacgcgcaggcagctcagaatcaatcgctgccttcattcagagattgtctggttcctctaacatcttcgaacctggggcagacggcgctctagggttttttggcgctttactgagtcttctctgtcagaatttcagcatggtggacgtggtgatgctgctccacggacacttccagccgctacagcgactgcagcctcaactccgttcattcttccatcaacactatctggggggacaagaacccaccccttctaatatacgtatggccacacatacactgatcacagggctggaagaatatgtacgtgaaagtttctcactcgttcaggtacagcctggcgtggatatcatccggacgaacctcgagtttttgcaggagcaatttaacagcatcgctgcccacgtactgcactgcaccgactccggattcggagctaggctgcttgagctgtgtaatcaagggctattcgagtgcctggccctcaatcttcattgcctcggcggacagcaaatggagctggcagctgtcatcaacggcaggatccgtcgaatgagccgcggagtgaaccccagcctagtgagctggctgactacaatgatgggtcttaggctgcaagtagtgttggagcacatgcccgtgggccctgatgctatcctccgttatgtgagacgggtgggtgatcccccacagcctctcccagaagagccgatggaagttcagggcgcagaacgcgcttctccggagccacagcgggagaacgctagccctgccccaggaactacagctgaggaggctatgtctcggggacctccccctgctcctgaaggcggttctcgcgatgaacaggacggagctagcgctgagaccgaaccttgggcagctgctgttcccccagaatgggtcccgatcatccagcaagatatacagtcccaacggaaggtaaagccccaaccacctctgagcgatgcataccttagtgggatgcccgctaaacgcaggaagactatgcagggcgaggggcctcagctgctgctgtcagaggccgtatcccgagcagccaaagctgcaggcgcaagacctttgacgagcccagagagtctcagccgcgatctggaagcccctgaagtccaggagagttataggcagcagctaagaagtgacatacagaagcgtctccaagaggacccaaattactccccccagcgcttccctaacgcccagcgcgcattcgccgatgacccctag

SEQ ID NO: 289112 - DNA, 3489 bp, Artificial Sequence
  derived and/or modified sequence
atggaacctaatgactccacatctacggcggtagaagaacctgactcattggaggtgctggttaaaaccctggattcccagacaaggacctttattgtgggtgcccaaatgaacgtaaaggagtttaaggagcatatcgctgcttctgtcagtatcccatccgaaaagcaacgtttgatatatcagggtagagtgctgcaagacgacaagaagctccaggagtataacgtaggcggaaaagtcattcaccttgtggagagagcccctcctcaaacacacctcccctcaggtgctagcagtggaactggttcggcatccgcaacccatggaggcggatctccgccagggacccggggaccgggagcctcagtgcacgatcggaacgccaactcctacgtgatggtgggcacatttaatctgccttcagatggatcagcagtggacgtgcatataaatatggagcaggcacctatacaatctgaaccaagagtgaggctagtcatggcccagcacatgataagagatattcagaccctattgagccgtatggagtgtcgaggcggaccccagccccagcactctcagcctcctcctcagccccctgctgtaactccagagccagtagccctgtcgtcacagactagtgaacccgtggaaagtgaggcacctcctagagaacccatggaggccgaagaagttgaagaaagggctcccgctcagaacccggagctgactcctggcccagctccggcagggccaactcctgccccagaaactaacgcccctaaccatccatctcccgcagagtatgtcgaagtgctgcaagaattgcagagactcgaaagtaggctgcaacctttcctccaacgctattacgaggtattgggcgctgccgcaacaacggactacaacaacaatcacgagggcagggaagaggatcagagacttatcaacctggttggagagagcctgagattattaggaaatacgtttgtggcacttagtgacctcagatgcaacttagcatgtacccccccaaggcacctgcacgttgtccggccaatgagtcactataccactcccatggtcttgcagcaggctgcaatcccaattcagatcaatgtggggaccacagtcacaatgacggggaacggaacccggcctccacctacgccgaacgcagaagcccctccacctggccctggacaagcttcatccgtggcgccaagcagcactaacgtcgaatcaagcgccgaaggagccccacctcctggcccagcacctcctccggcaacctctcacccaagggtgattcggatttcccatcagtccgtggagccagttgtgatgatgcacatgaatattcaggactccggcacccagcctggtggcgtccccagcgccccaactggcccactgggacctcctgggcacggtcaaactctgggctccacacttatccagcttccaagcctacctccagaatttatgcatgcggtggcacaccagataacccaccaggccatggtggcagctgtcgcgagcgctgccgctggtcaacaagtaccgggtttcccgaccgctccaacaagagtcgtcattgctcggccaaccccaccgcaggctcgtcccagtcatccaggtggtccgcctgtgagcgggacacttcaaggcgcaggtctgggtacgaacgccagcttggcccagatggttagcggactcgtgggtcaacttctgatgcaacccgtgttggttgctcaagggacccctggaatggctcccccaccagcccctgccactgccagtgcatccgctggaacaaccaataccgctactaccgccggaccagcacccggaggcccagctcagcctcctcccacgcctcaaccttccatggccgatcttcagttttcccagttgctcggcaatcttctgggcccagcaggaccaggggcagggggttctggtgtcgcttccccaactatcacagtagcaatgcctggtgtccctgcctttctccagggcatgactgactttctgcaggccacacagacagcccctcctcccccaccccctcctccccctccacccccagctccagagcagcagacaatgccccctcccggttctcccagcggtggtgccggtagtcctggcggtctcggcctggaaagtctgtctcccgagttcttcacatccgtggtacaaggcgtgctcagttcattgctcggaagcctcggagctcgggcagggtcttcagagtcgatcgccgctttcatccagcgtctgagcggctcctccaacatctttgagcctggcgcagacggcgctttgggtttctttggcgctctccttagcctcctctgtcaaaatttctctatggtcgacgtggtcatgttactgcatgggcactttcagcccttgcagcgtcttcagccccagctgaggagtttttttcatcagcattacttgggcggtcaggaaccaacgcccagtaatatccgaatggctacccatactctaattaccgggctcgaagaatacgtaagggagtcgttttcccttgtacaggtgcagccgggtgttgatattatccgcaccaatttggagtttctgcaggaacagttcaactctatcgccgctcacgtgttgcactgtacagatagtggctttggcgcaagacttcttgagctgtgtaaccagggtttgtttgagtgtcttgctctgaatctgcactgcctcgggggacagcagatggaactcgccgcagttatcaatgggaggatcagacgaatgagtaggggagtgaacccttcactcgtgagctggttgaccacaatgatgggccttagattgcaagtggtccttgagcatatgccggtcggcccagacgctatcttgagatacgtccgtcgggtgggggatcctccacaacccctgccagaggagccaatggaagttcagggagccgagcgagccagtccagaacctcagcgggagaacgcatctccagctcctgggactacggccgaggaggctatgtcccgcggacccccacctgcgccagaaggcggttctcgcgacgagcaagatggtgcatccgccgagactgagccatgggccgcagctgtgcctccggagtgggttcccataatccagcaggatatccagtcccagagaaaggttaagccacagccccctttatctgacgcataccttagcggaatgcctgccaagcgacgcaaaaccatgcagggggaggggccacagctgttgctttctgaggccgtctcgcgcgctgcgaaagcggctggcgcacgccctttgacttctccggaatccctctcgagggacctcgaggcacccgaagtgcaggagtcctatcgtcagcaactcaggtctgatattcagaagcgattacaggaggatccgaattattcaccacagaggttcccaaacgcacagagggcctttgcagatgacccttag

SEQ ID NO: 289113 - DNA, 3489 bp, Artificial Sequence
  derived and/or modified sequence
atggagcccaacgattctacatcaactgcagttgaagagccagacagcctcgaagtacttgtgaagacactggatagccaaacccgaaccttcattgtcggggctcagatgaatgtgaaggagtttaaggagcacattgccgcttcagtgtccatccccagtgaaaagcaaaggctgatctatcaagggagggttttgcaggacgacaagaaactgcaggagtataatgtcggcggaaaggtgatccacttagtggagagagcccctccgcagacccatcttccttctggagcttcctccggcactggatctgctagcgcgacccatggaggtggaagtccccctgggactcgtggccctggcgcaagcgtgcatgataggaacgctaactcttatgtgatggtcggaaccttcaatctgccctcggacggctctgctgtcgatgtgcacatcaatatggagcaggcgcctatccaaagcgagccacgggtgagattagtcatggcacagcacatgattcgggacattcaaactctccttagcagaatggagtgtagaggtgggcctcaaccacagcactcccagccaccaccacagccacctgccgtaactcctgaacctgtcgcacttagttcccaaacatccgagccagtagagagcgaagcacccccaagggagccaatggaagcagaggaggtcgaggaacgcgcacctgcacaaaatcccgaattaactcccggtccggctcccgcaggccctacccctgcacccgaaaccaacgcaccgaatcatccaagtccggctgaatatgtggaggttctgcaggaactccagaggctcgaaagccgcctccagccttttttgcaaaggtactacgaggtactaggcgctgccgcaactactgattataataacaatcatgagggacgggaagaggatcagagattgatcaacctggtcggcgagtcactgcgtctcttaggtaacacatttgtggcccttagcgatttgcgctgcaatctggcttgtacccccccaaggcaccttcatgtagtgagacccatgtcccactatactaccccgatggtactccaacaggctgccattcccatccagatcaatgttggtaccaccgtgaccatgactgggaacggcaccagacctcccccaacacctaatgccgaggccccaccgcctgggccaggtcaagcaagttcggtcgcacccagttccaccaacgtcgaatcatctgcagagggcgctccccctccagggcctgcacctcccccagccactagtcaccccagagttattcgcatttctcaccagagtgtggaacctgtggtcatgatgcacatgaacattcaagattcagggacccagccgggaggagtgcctagcgcccctaccggaccattgggaccccctggccatggtcaaacgctgggcagtactcttatccaactcccgtccttacctcccgagtttatgcatgctgtggcacaccagatcacccaccaagccatggttgctgctgtggcgtcagccgcagccggacaacaggtacccggatttcctacagccccaaccagggttgtcatcgcacggcctactccacctcaggcccgaccatctcatcccggaggacctccagtgagcggcacactgcagggcgcaggacttggaaccaatgcatctctggcacaaatggtgtctggtctggtggggcagctgcttatgcaaccggtacttgtggctcaagggacaccaggaatggctcctccccctgccccagccacagcttcagctagcgccggtacaactaatactgccacgaccgcgggtcccgctcccggaggccctgcccagccaccaccaacacctcagccatcaatggccgatctccagttttcccagctcctgggaaacctgctgggcccagctggacctggcgctggaggctcaggtgtcgcttctcctaccattacagtggctatgccaggagttccagcttttttacaagggatgactgatttcctgcaggctacccagacggctcccccaccccctcccccacccccacccccaccacctgcccctgaacagcaaaccatgcctccacctggatctccctctggcggagctggctctcccggagggctcggcctcgagagcctgtcacctgagttctttaccagtgttgtgcagggagtcctcagttccctgctcggcagcctcggtgcaagagctgggagtagtgagtcgattgctgcctttatacagagattgtctggcagtagcaatattttcgaaccaggggctgacggggcactggggttcttcggggctcttctgtcgctgttgtgccaaaacttctcaatggtcgacgtggtgatgctactacatggccacttccagcccttgcagagactgcagcctcagctgcggagctttttccatcagcattacctgggcggacaagagcctactccgtccaacatcaggatggctacccacacccttattactggcctggaagagtatgttcgggagtcattctccctggtgcaagtgcagccaggagttgatattatcagaaccaatcttgagttcttacaggagcaatttaattccatcgcagcccatgttctgcactgcaccgattccgggtttggagctcgtctgcttgagttgtgcaatcagggtctgttcgagtgtctggcacttaacctgcactgcttaggtggccagcagatggagcttgcggctgttattaacggtcgcatccgaaggatgagtcggggagtgaatccttctctggtcagttggttaaccacaatgatgggcctcaggctgcaagtcgtactggaacatatgcctgtggggccagatgccattctgaggtacgtgagacgcgtgggcgaccctccccagccactaccagaggaaccaatggaggtgcaaggcgctgaacgcgcaagcccagagccccagagagaaaacgctagtcccgcacccggtactactgccgaagaagcaatgagtcgcggacctccacccgctccagagggaggctcaagggatgagcaggacggcgctagcgccgaaacagaaccatgggctgcggctgtcccccctgagtgggtacccataattcagcaggacattcagagccagcggaaagtaaagccacagcccccactgtcagatgcttatctttcaggaatgcccgctaagcgacgaaaaaccatgcagggggagggaccccagctactcctgtccgaagctgtatcccgcgctgctaaggccgctggcgcaagaccactgacctctcccgaaagtttatctagggatttagaggcccctgaagttcaggagtcctaccgccagcaactgcgaagcgacattcagaaaaggctgcaggaggatccgaactattcgccacagcggttccccaacgcccagcgggcttttgctgacgatccgtag

SEQ ID NO: 289114 - DNA, 3489 bp, Artificial Sequence
  derived and/or modified sequence
atggagccgaatgattctacttcaactgcagtggaagaacccgactccctggaggtgctggtgaagacccttgatagtcagacaaggacattcatagtgggagctcaaatgaatgtcaaggagtttaaggagcacatcgctgcgagtgtatcgatccccagcgaaaagcagcgcctaatttaccagggccgagtattgcaagacgacaaaaagctgcaagaatacaacgtgggaggcaaagtgatccacttagtggagagagccccaccccagacacatttgcccagtggagcgagttcggggactgggagcgcgtccgccacacatggaggtggcagcccaccgggtacaaggggccctggagctagcgtccacgatcgcaatgctaactcttacgttatggtggggacattcaacctaccgagtgacgggtccgccgtggacgttcacatcaacatggaacaggcccctatacaaagcgagccgcgagtgagactggtgatggcccagcacatgatcagggacatccagactcttttaagccgcatggagtgtcgcggaggacctcagcctcagcattcacagcctccaccacagcctccagcggtcactcctgagcccgtggccctgtcatcccagacgagcgagcctgtagagtccgaggcaccgcctcgggagccaatggaggctgaagaggtcgaggaacgggctccagcacaaaaccccgagctgacccccggtcccgcacccgctggtcccacaccagcacctgagactaacgcccctaatcatcccagccccgctgagtatgtagaggtgctacaggagcttcaaagactggaatcccgccttcagcccttcctgcaacggtactacgaagtgctgggcgcagctgccaccaccgactacaataacaatcatgagggacgtgaggaggaccagcgtctgataaatctcgttggcgagagcctgagattgctgggcaatacgttcgtagccctttccgatctcaggtgcaacttagcttgcacacctccgagacatttgcacgtagtacgtccaatgagccattacaccaccccaatggtgctgcagcaagcggctatcccaatacaaatcaatgtggggaccactgtgactatgacaggcaacggtacacgaccacctccgacaccgaatgccgaggccccacctcccggacctggacaagctagctcggtcgcacccagcagcacgaatgtggaaagcagcgccgaaggggcaccaccaccgggtcccgcaccgccacccgcaacttcgcacccgcgagtgatcaggatttctcatcagagtgttgagccggtggttatgatgcatatgaacatacaggacagcggaacccagccagggggagttccgtcggctccgacaggcccattgggcccacctggacacggtcagacgctcgggagcaccctgatccaactcccaagtttacctcctgaatttatgcatgccgttgctcaccagatcacacatcaggccatggtggctgccgtagcttctgctgctgctggacagcaagttcctggattcccaactgctccaacccgggttgtaatcgccaggcccactcctcctcaggccagaccttcacacccgggaggtccaccagtatcaggaactctgcagggtgcaggcctgggaacaaacgcaagtctagcccagatggtgagtggattggtggggcaactgctgatgcagcccgtactggtcgcccaagggactcccggaatggccccacctccagccccagccaccgcctctgcctcagcaggcaccacaaacacagcaaccacggctgggcctgccccagggggacccgcacaacctcctccaacaccacagccttcgatggccgacctgcaattctcccagctcttgggcaacctcctcggtccagccggacccggagctggaggccctggcgtggcctcccccacaatcaccgtagctatgcctggggtgccagctttccttcaaggtatgacggatttcttacaggctactcagacagctcctcctcccccacccccacccccaccaccaccaccggcaccagagcaacagacgatgcctccacccggatcccctagcggaggtgccggaagccctgggggactcggactcgaaagtctgtcacctgagttcttcaccagcgttgtgcagggtgtactaagttctctgttgggtagtctgggtgcccgagctggctcctcagaatcgatagcggcatttatccagagattgagcggaagttctaacatcttcgaacccggagccgatggcgctcttggctttttcggggctctactgtccctgttatgtcagaattttagcatggtcgacgtggtcatgctgctgcatggtcatttccagcccctacagaggctccagccacaactcagatcttttttccaccagcactatctggggggtcaggaacctaccccttccaacatccggatggctacccatactttgatcaccgggctcgaggagtacgtgcgggaatctttctctctggtgcaggtccagccaggagtcgacatcatccgcacaaatcttgagtttttacaggaacaatttaactccatcgcagcgcacgttcttcactgcaccgattcaggattcggagctcgactgctagaactgtgtaaccaaggcctttttgaatgtcttgcactcaatttacattgcctcgggggacagcagatggagcttgctgctgttattaatggccgaatcagaagaatgagccgtggtgtcaacccaagtctggtgagttggttaaccactatgatgggactcagattgcaggtcgtgctggagcatatgccagtgggaccagacgcaatattgcgctacgtacggagggtgggcgacccacctcaaccactacctgaagagccgatggaggtgcagggtgcagagagggccagcccggaaccccagagagagaacgcatcccccgcaccaggtaccactgcagaggaggccatgagcaggggcccacctccagccccagagggcggaagcagagatgaacaagacggcgcatccgcagaaactgagccctgggctgccgcagtaccacccgagtgggtgccgatcatacaacaggatattcagagtcagcgcaaagtcaaaccccagccgccactctccgacgcttatttatctggaatgcctgctaagaggcggaagaccatgcaaggggagggcccacagttgttgctgtccgaggccgtctccagggcagccaaagcagcgggtgctagaccgctcacttctcccgaaagcctttctcgggaccttgaggctcccgaagtacaggaaagttaccgacagcaattacggagcgacatacagaagcgtttgcaggaagatccgaattatagcccacagaggtttccaaacgctcagcgcgcatttgcggacgacccgtag

SEQ ID NO: 289115 - DNA, 3489 bp, Artificial Sequence
  derived and/or modified sequence
atggaacctaatgattccaccagtacagccgtggaggaaccagattccctagaggtcctcgtcaagacgcttgactcacaaacacgcaccttcatcgtgggtgcccagatgaatgtgaaagaattcaaagaacacattgcggcatccgtatcaattccaagcgaaaagcagaggcttatctatcagggtagagtgttgcaggatgataagaagctgcaggaatacaacgtggggggtaaggtgattcacctggtggagagagcccctcctcagacacacctgccttcgggagcaagcagtggtaccggaagtgccagcgccactcatggaggtgggtcgcctccaggcactcgcggtcctggcgcttccgtccatgatcgcaatgctaacagttatgtgatggtcggaactttcaatctgcccagtgatggtagcgccgttgacgtccacatcaatatggaacaggcccctattcagtcggaaccgcgtgtgagacttgtgatggcccagcatatgataagggacattcagactttgttgtcaagaatggagtgtcgcggagggccacaaccgcagcactctcaaccccctccacagccgcctgcggtgacgcccgagccagtcgctctgagctctcagacgtcagaacccgtagagtctgaagccccacccagggagcctatggaagcagaggaggttgaagaacgtgcacctgcacagaatccagagctgacaccagggcctgcacccgcaggacctacccctgccccagagactaacgcacccaaccatccctcccccgcagaatacgtcgaggtgttgcaagagctccagcgcctggaatcccgactccaaccttttctccaaagatactacgaagtcctgggcgcagctgcaaccactgattataataataatcacgaaggtcgggaggaggatcagagattaattaatctggtcggggaaagccttagactcctgggcaatactttcgttgccctcagtgacctgagatgcaacctagcctgcactccacccaggcacctccatgtcgtccgtcctatgagtcattacactaccccaatggtgctgcagcaggcggctattccaatccagattaatgttggaacgaccgtgactatgaccggtaacggaacacgccctccccctactcccaacgccgaggcaccacctcctggtcccggacaagcaagcagcgtggccccaagcagtacgaatgtggagagctcggctgaaggcgctccaccccctggtccagctccgccaccagctacgtcccacccacgcgtgatccgtatttcccaccaatctgttgaaccagtggtgatgatgcacatgaacatacaggactccgggactcagccagggggtgttcctagcgcgccaacaggaccgctcggaccacccggacacgggcagaccctgggatctacgttgattcaactcccttcactccctccggaatttatgcacgcggtggcgcaccaaataactcatcaggccatggtggctgcagtcgcttctgccgcagctgggcaacaggttcctgggtttcctacagctcccactcgggtcgtgatcgcaaggcctacacctccccaggcacgccctagccaccccggtggcccacccgtttctggtacactccagggagcaggcctcggcactaacgctagccttgctcagatggtatccgggttggttggtcagcttctcatgcagcccgtgctcgtggcccagggtacacccggtatggccccaccccctgcccctgctaccgcctccgctagtgccggtacaaccaatactgccacaaccgcagggcctgcccctgggggacccgctcagccgcctcccactccacagccttctatggccgacctgcaattcagccaactgttggggaatttgctagggccagccggtcccggagctggcggaagcggtgtcgcttctccgacaatcaccgtagctatgcccggagtgcctgctttcctgcaagggatgactgactttctgcaggctactcagactgcccctcctccccctcccccaccccctcccccaccccctgccccagaacagcagacaatgccccctcccggttctccttccggcggtgcaggctcccccggaggcttgggccttgagtctctctcacccgagttcttcaccagcgtcgtccaaggagtactgagctccttgctgggctctctgggtgccagggcgggatcctctgagtctattgccgctttcattcagagattaagcggatccagtaacatcttcgagcccggagctgacggcgcattgggcttcttcggcgctctactgtctcttctctgtcaaaacttctccatggtggatgtcgtcatgctgctgcatggacatttccagcctctccagagactccagccccaacttagaagctttttccaccaacactatctcggcggacaagaaccgactccctcaaacattaggatggctacacacactctcatcaccgggcttgaggagtatgtgcgcgaatctttctctctcgtgcaggttcagcctggtgtcgacatcatccgtacaaatttagagtttctccaagagcagttcaactctatcgcggctcatgtactccactgtactgacagcggctttggggctaggctcctggaactgtgcaatcagggactcttcgagtgtcttgcgttgaacttacattgtctcggcggacaacaaatggaattggccgcagttatcaatggaagaattaggcgtatgtctagaggggtcaatccctctctggtaagctggctcacaactatgatgggcctgagactgcaagtggttctggagcacatgcccgtgggcccagacgccatcctgagatatgtgaggagggtgggcgatcccccacaacccttaccagaagagccaatggaggtgcagggtgccgagagggcctcccctgagccccagcgggaaaacgccagtccagctcccggaaccacggcagaagaggccatgtctaggggaccacctccagcccctgaaggtggaagccgcgacgaacaggacggagcttccgccgagacggagccctgggcggctgccgtgcctcccgagtgggtgcctatcattcagcaggatatccagtcccaacggaaggtcaaacctcagcctccgctgtccgatgcttacctgagtggcatgcccgcaaagaggagaaaaaccatgcagggcgaaggaccccaacttttgctgagtgaggctgttagtagagccgcaaaggcagcaggcgcacggccactgacgagtcccgagtccctctctagagatttggaagctcctgaggtgcaggagagttacagacagcagcttaggtcagatattcagaagcggttgcaagaggatccgaactattctccccagagattccccaatgctcaacgggcattcgcagatgacccctag

SEQ ID NO: 289116 - DNA, 3881 bp, Artificial Sequence
  derived and/or modified sequence
tggggcgatgcttaagtgtccacgcatccgtagtgcgacgcacgcaggcgtagtacggtcccccgggcgacagcggtggcggctcctcggggtgctcggctccctcccacctaggccggccccggcccgactcgccctcagaaactcactgtttggggctgcggactttctcgtcgtgccccacaaaagtaaagcttggggacctggggggagccggaagtatcgcttcgagatccccaaatactatcggggaaacggaagtggccgtcggtggcagagacctgtcggccatggagcctaatgatagtaccagtaccgctgtggaggagcctgacagcttggaggtgttggtgaagaccttggactctcaaactcgtacctttattgtgggggcccagatgaatgtaaaagagtttaaggagcacattgctgcctctgtcagcatcccatctgaaaaacaacggctcatttaccagggacgagttctgcaagatgataagaagcttcaggaatacaatgttgggggaaaggttatccacctggtggaacgggctcctcctcagactcacctcccttctggggcatcttctgggacggggtctgcctcagccactcatggtgggggatccccccctggtactcgggggcctggggcctctgttcatgaccggaatgccaacagctatgtcatggttggaaccttcaatcttcctagtgacggctctgctgtggatgttcacatcaacatggaacaggccccgattcagagtgagccccgggtacggctggtgatggctcagcacatgatcagggatatacagaccttactatcccggatggagtgtcgaggagggccccaaccgcagcacagtcagccgcccccgcagccaccggctgtgaccccggagccagtagccttgagctctcaaacatcagaaccagttgaaagtgaagcacctccccgggagcccatggaggcagaagaagtggaggagcgtgccccagcccagaacccggagctcactcctggcccagccccagcgggcccaacacctgccccggaaacaaatgcacccaaccatccttcccctgcggagtatgtcgaggtgctccaggagctacagcggctggagagtcgcctccagcccttcttgcagcgctactacgaggttctgggtgctgctgccaccacggactacaataacaatcacgagggccgggaggaggatcagcggttgatcaacttggtaggggagagcctgcgactgctgggcaacacctttgttgcactgtctgacctgcgctgcaatctggcctgcacgcccccacgacacctgcatgtggtccggcctatgtctcactacaccacccccatggtgctccagcaggcagccattcccatacagatcaatgtgggaaccactgtgaccatgacaggaaatgggactcggccccccccaactcccaatgcagaggcacctccccctggtcctgggcaggcctcatccgtggctccgtcttctaccaatgtcgagtcctcagctgagggggctcccccgccaggtccagctcccccgccagccaccagccacccgagggtcatccggatttcccaccagagtgtggaacccgtggtcatgatgcacatgaacattcaagattctggcacacagcctggtggtgttccgagtgctcccactggccccctgggaccccctggtcatggccaaaccctgggctccaccctcatccagctgccctccctgccccctgagttcatgcacgccgtcgcccaccagatcactcatcaggccatggtggcagctgttgcctccgcggccgcaggacagcaggtgccaggcttcccaacagctccaacccgggtggtgattgcccggcccactcctccacaggctcggccttcccatcctggagggcccccagtctctgggacactgcagggcgccggtctgggtaccaatgcctcgttggcccagatggtgagcggccttgtggggcagcttcttatgcagccagtccttgtggctcaggggaccccaggtatggctccaccgccagcccctgccactgcttctgccagtgctggcaccaccaacacagctaccacagctggccccgctcctggggggcctgcccagcctccacccacccctcaaccctccatggctgatcttcagttctctcagcttctggggaacctgctagggcctgcagggccaggggctggagggtctggtgtggcttctcccaccatcactgtggcgatgcctggtgtccctgcctttctccaaggcatgactgacttcttgcaggcaacacagacagcccctccaccacccccacctcctccacccccaccacctgccccagagcagcagaccatgcccccaccaggctccccttctggtggcgcagggagtcctggaggcctgggtcttgagagcctgtcaccggagttttttacctcagtggtgcagggtgtgctcagctccctgctgggctccctgggggctcgggctggcagcagtgaaagtattgctgccttcatacaacgcctcagtggatccagcaacatctttgagcctggagctgatggggcccttggattctttggggccttgctttctcttctgtgccagaacttctctatggtggacgtagtgatgcttctccatgggcatttccagccactacaacggctccagccccagctgcgatccttcttccaccagcactacctgggtggtcaggagcccacacccagtaacatccggatggcaacccacacattgatcacggggctagaagagtatgtgcgggagagtttttccttggtgcaggttcagccaggtgtggacatcatccggacaaacctggaatttctccaagagcagtttaatagcattgctgcgcatgtgctgcattgcacagatagtggatttggggcccggttgctggagttgtgtaaccaaggcctgtttgaatgcctggccctaaacctgcactgcttggggggacagcagatggagcttgctgctgttatcaatggccgaattcgtcgtatgtctcgtggggtgaatccctccttggtgagctggctgaccactatgatgggactgaggcttcaggtggtactggagcacatgcctgtaggccctgatgccattctcagatacgttcgcagggttggtgatcccccccagccacttcctgaggagccaatggaagttcagggagcagaaagagcttcccctgagcctcagcgggagaatgcttccccagcccctggaacaacagcagaagaggccatgtcccgaggtccacctcctgctcctgaggggggctcccgggatgaacaggatggagcttcagctgagacagaaccttgggcagctgcagtccccccagaatgggtccctattatccagcaggacattcagagccagcggaaggtgaaaccgcagccccctctgagtgatgcctacctcagtggtatgcctgccaagagacgcaagacgatgcagggtgagggcccccagctgcttctctcagaggctgtgagccgggcagctaaggcagccggagctcggcccctgacgagccccgagagcctgagccgggacctggaggcaccagaggttcaggagagctacaggcagcagctccggtctgatatacaaaaacgactgcaggaagaccccaactacagtccccagcgcttccccaatgcccagcgggcctttgctgatgatccttagctctttgctctatggcccttcctcatcaggggaccgtttcccccctcttccttcacagtatttaagaaataaaagtcggatttttctggctgctttctctct

SEQ ID NO: 289117 - DNA, 3881 bp, Artificial Sequence
  derived and/or modified sequence
tggggcgatgcttaagtgtccacgcatccgtagtgcgacgcacgcaggcgtagtacggtcccccgggcgacagcggtggcggctcctcggggtgctcggctccctcccacctaggccggccccggcccgactcgccctcagaaactcactgtttggggctgcggactttctcgtcgtgccccacaaaagtaaagcttggggacctggggggagccggaagtatcgcttcgagatccccaaatactatcggggaaacggaagtggccgtcggtggcagagacctgtcggccatggagcctaatgatagtaccagtaccgctgtggaggagcctgacagcttggaggtgttggtgaagaccttggactctcaaactcgtacctttattgtgggggcccagatgaatgtaaaagagtttaaggagcacattgctgcctctgtcagcatcccatctgaaaaacaacggctcatttaccagggacgagttctgcaagatgataagaagcttcaggaatacaatgttgggggaaaggttatccacctggtggaacgggctcctcctcagactcacctcccttctggggcatcttctgggacggggtctgcctcagccactcatggtgggggatccccccctggtactcgggggcctggggcctctgttcatgaccggaatgccaacagctatgtcatggttggaaccttcaatcttcctagtgacggctctgctgtggatgttcacatcaacatggaacaggccccgattcagagtgagccccgggtacggctggtgatggctcagcacatgatcagggatatacagaccttactatcccggatggagtgtcgaggagggccccaaccgcagcacagtcagccgcccccgcagccaccggctgtgaccccggagccagtagccttgagctctcaaacatcagaaccagttgaaagtgaagcacctccccgggagcccatggaggcagaagaagtggaggagcgtgccccagcccagaacccggagctcactcctggcccagccccagcgggcccaacacctgccccggaaacaaatgcacccaaccatccttcccctgcggagtatgtcgaggtgctccaggagctacagcggctggagagtcgcctccagcccttcttgcagcgctactacgaggttctgggtgctgctgccaccacggactacaataacaatcacgagggccgggaggaggatcagcggttgatcaacttggtaggggagagcctgcgactgctgggcaacacctttgttgcactgtctgacctgcgctgcaatctggcctgcacgcccccacgacacctgcatgtggtccggcctatgtctcactacaccacccccatggtgctccagcaggcagccattcccatacagatcaatgtgggaaccactgtgaccatgacaggaaatgggactcggccccccccaactcccaatgcagaggcacctccccctggtcctgggcaggcctcatccgtggctccgtcttctaccaatgtcgagtcctcagctgagggggctcccccgccaggtccagctcccccgccagccaccagccacccgagggtcatccggatttcccaccagagtgtggaacccgtggtcatgatgcacatgaacattcaagattctggcacacagcctggtggtgttccgagtgctcccactggccccctgggaccccctggtcatggccaaaccctgggctccaccctcatccagctgccctccctgccccctgagttcatgcacgccgtcgcccaccagatcactcatcaggccatggtggcagctgttgcctccgcggccgcaggacagcaggtgccaggcttcccaacagctccaacccgggtggtgattgcccggcccactcctccacaggctcggccttcccatcctggagggcccccagtctctgggacactgcagggcgccggtctgggtaccaatgcctcgttggcccagatggtgagcggccttgtggggcagcttcttatgcagccagtccttgtggctcaggggaccccaggtatggctccaccgccagcccctgccactgcttctgccagtgctggcaccaccaacacagctaccacagctggccccgctcctggggggcctgcccagcctccacccacccctcaaccctccatggctgatcttcagttctctcagcttctggggaacctgctagggcctgcagggccaggggctggagggcctggtgtggcttctcccaccatcactgtggcgatgcctggtgtccctgcctttctccaaggcatgactgacttcttgcaggcaacacagacagcccctccaccacccccacctcctccacccccaccacctgccccagagcagcagaccatgcccccaccaggctccccttctggtggcgcagggagtcctggaggcctgggtcttgagagcctgtcaccggagttttttacctcagtggtgcagggtgtgctcagctccctgctgggctccctgggggctcgggctggcagcagtgaaagtattgctgccttcatacaacgcctcagtggatccagcaacatctttgagcctggagctgatggggcccttggattctttggggccttgctttctcttctgtgccagaacttctctatggtggacgtagtgatgcttctccatgggcatttccagccactacaacggctccagccccagctgcgatccttcttccaccagcactacctgggtggtcaggagcccacacccagtaacatccggatggcaacccacacattgatcacggggctagaagagtatgtgcgggagagtttttccttggtgcaggttcagccaggtgtggacatcatccggacaaacctggaatttctccaagagcagtttaatagcattgctgcgcatgtgctgcattgcacagatagtggatttggggcccggttgctggagttgtgtaaccaaggcctgtttgaatgcctggccctaaacctgcactgcttggggggacagcagatggagcttgctgctgttatcaatggccgaattcgtcgtatgtctcgtggggtgaatccctccttggtgagctggctgaccactatgatgggactgaggcttcaggtggtactggagcacatgcctgtaggccctgatgccattctcagatacgttcgcagggttggtgatcccccccagccacttcctgaggagccaatggaagttcagggagcagaaagagcttcccctgagcctcagcgggagaatgcttccccagcccctggaacaacagcagaagaggccatgtcccgaggtccacctcctgctcctgaggggggctcccgggatgaacaggatggagcttcagctgagacagaaccttgggcagctgcagtccccccagaatgggtccctattatccagcaggacattcagagccagcggaaggtgaaaccgcagccccctctgagtgatgcctacctcagtggtatgcctgccaagagacgcaagacgatgcagggtgagggcccccagctgcttctctcagaggctgtgagccgggcagctaaggcagccggagctcggcccctgacgagccccgagagcctgagccgggacctggaggcaccagaggttcaggagagctacaggcagcagctccggtctgatatacaaaaacgactgcaggaagaccccaactacagtccccagcgcttccccaatgcccagcgggcctttgctgatgatccttagctctttgctctatggcccttcctcatcaggggaccgtttcccccctcttccttcacagtatttaagaaataaaagtcggatttttctggctgctttctctct

SEQ ID NO: 289118 - DNA, 3885 bp, Artificial Sequence
  derived and/or modified sequence
tggggcgatgcttaagtgtccacgcatccgtagtgcgacgcacgcaggcgtagtacggtcccccgggcgacagcggtggcggctcctcggggtgctcggctccctcccacctaggccggccccggcccgactcgccctcagaaactcactgtttggggctgcggactttctcgtcgtgccccacaaaagtaaagcttggggacctggggggagccggaagtatcgcttcgagatccccaaatactatcggggaaacggaagtggccgtcggtggcagagacctgtcggccatggagcctaatgatagtaccagtaccgctgtggaggagcctgacagcttggaggtgttggtgaagaccttggactctcaaactcgtacctttattgtgggggcccagatgaatgtaaaagagtttaaggagcacattgctgcctctgtcagcatcccatctgaaaaacaacggctcatttaccagggacgagttctgcaagatgataagaagcttcaggaatacaatgttgggggaaaggttatccacctggtggaacgggctcctcctcagactcacctcccttctggggcatcttctgggacggggtctgcctcagccactcatggtgggggatccccccctggtactcgggggcctggggcctctgttcatgaccggaatgccaacagctatgtcatggttggaaccttcaatcttcctagtgacggctctgctgtggatgttcacatcaacatggaacaggccccgattcagagtgagccccgggtacggctggtgatggctcagcacatgatcagggatatacagaccttactatcccggatggagtgtcgaggagggccccaaccgcagcacagtcagccgcccccgcagccaccggctgtgaccccggagccagtagccttgagctctcaaacatcagaaccagttgaaagtgaagcacctccccgggagcccatggaggcagaagaagtggaggagcgtgccccagcccagaacccggagctcactcctggcccagccccagcgggcccaacacctgccccggaaacaaatgcacccaaccatccttcccctgcggagtatgtcgaggtgctccaggagctacagcggctggagagtcgcctccagcccttcttgcagcgctactacgaggttctgggtgctgctgccaccacggactacaataacaatcacgagggccgggaggaggatcagcggttgatcaacttggtaggggagagcctgcgactgctgggcaacacctttgttgcactgtctgacctgcgctgcaatctggcctgcacgcccccacgacacctgcatgtggtccggcctatgtctcactacaccacccccatggtgctccagcaggcagccattcccatacagatcaatgtgggaaccactgtgaccatgacaggaaatgggactcggccccccccaactcccaatgcagaggcacctccccctggtcctgggcaggcctcatccgtggctccgtcttctaccaatgtcgagtcctcagctgagggggctcccccgccaggtccagctcccccgccagccaccagccacccgagggtcatccggatttcccaccagagtgtggaacccgtggtcatgatgcacatgaacattcaagattctggcacacagcctggtggtgttccgagtgctcccactggccccctgggaccccctggtcatggccaaaccctgggctccaccctcatccagctgccctccctgccccctgagttcatgcacgccgtcgcccaccagatcactcatcaggccatggtggcagctgttgcctccgcggccgcaggacagcaggtgccaggcttcccaacagctccaacccgggtggtgattgcccggcccactcctccacaggctcggccttcccatcctggagggcccccagtctctgggacactgcagggcgccggtctgggtaccaatgcctcgttggcccagatggtgagcggccttgtggggcagcttcttatgcagccagtccttgtggctcaggggaccccaggtatggctccaccgccagcccctgccactgcttctgccagtgctggcaccaccaacacagctaccacagctggccccgctcctggggggcctgcccagcctccacccacccctcaaccctccatggctgatcttcagttctctcagcttctggggaacctgctagggcctgcagggccaggggctggagggtctggtgtggcttctcccaccatcactgtggcgatgcctggtgtccctgcctttctccaaggcatgactgacttcttgcaggcaacacagacagcccctccaccacccccacctcctccacccccaccacctgccccagagcagcagaccatgcccccaccaggctccccttctggtggcgcagggagtcctggaggcctgggtcttgagagcctgtcaccggagttttttacctcagtggtgcagggtgtgctcagctccctgctgggctccctgggggctcgggctggcagcagtgaaagtattgctgccttcatacaacgcctcagtggatccagcaacatctttgagcctggagctgatggggcccttggattctttggggccttgctttctcttctgtgccagaacttctctatggtggacgtagtgatgcttctccatgggcatttccagccactacaacggctccagccccagctgcgatccttcttccaccagcactacctgggtggtcaggagcccacacccagtaacatccggatggcaacccacacattgatcacggggctagaagagtatgtgcgggagagtttttccttggtgcaggttcagccaggtgtggacatcatccggacaaacctggaatttctccaagagcagtttaatagcattgctgcgcatgtgctgcattgcacagatagtggatttggggcccggttgctggagttgtgtaaccaaggcctgtttgaatgcctggccctaaacctgcactgcttggggggacagcagatggagcttgctgctgttatcaatggccgaattcgtcgtatgtctcgtggggtgaatccctccttggtgagctggctgaccactatgatgggactgaggcttcaggtggtactggagcacatgcctgtaggccctgatgccattctcagatacgttcgcagggttggtgatcccccccagccacttcctgaggagccaatggaagttcagggagcagaaagagcttcccctgagcctcagcgggagaatgcttccccagcccctggaacaacagcagaagaggccatgtcccgaggtccacctcctgctcctgaggggggctcccgggatgaacaggatggagcttcagctgagacagaaccttgggcagctgcagtccccccagaatgggtccctattatccagcaggacattcagagccagcggaaggtgaaaccgcagccccctctgagtgatgcctacctcagtggtatgcctgccaagagacgcaagacgatgcagggtgagggcccccagctgcttctctcagaggctgtgagccgggcagctaaggcagccggagctcggcccctgacgagccccgagagcctgagccgggacctggaggcaccagaggttcaggagagctacaggcagcagctccggtctgatatacaaaaacgactgcaggaagaccccaactacagtccccagcgcttccccaatgcccagcgggcctttgctgatgatccttagctctttctttgctctatggcccttcctcatcaggggaccgtttcccccctcttccttcacagtatttaagaaataaaagtcggatttttctggctgctttctctct

SEQ ID NO: 289119 - DNA, 3489 bp, Artificial Sequence
  derived and/or modified sequence
atggagcccaacgacagcaccagcaccgccgtggaggagcccgacagcctggaggtgctggtgaagaccctggacagccagaccagaaccttcatcgtgggcgcccagatgaacgtgaaggagttcaaggagcacatcgccgccagcgtgagcatccccagcgagaagcagagactgatctaccagggcagagtgctgcaggacgacaagaagctgcaggagtacaacgtgggcggcaaggtgatccacctggtggagagagcccccccccagacccacctgcccagcggcgccagcagcggcaccggcagcgccagcgccacccacggcggcggcagcccccccggcaccagaggccccggcgccagcgtgcacgacagaaacgccaacagctacgtgatggtgggcaccttcaacctgcccagcgacggcagcgccgtggacgtgcacatcaacatggagcaggcccccatccagagcgagcccagagtgagactggtgatggcccagcacatgatcagagacatccagaccctgctgagcagaatggagtgcagaggcggcccccagccccagcacagccagccccccccccagccccccgccgtgacccccgagcccgtggccctgagcagccagaccagcgagcccgtggagagcgaggccccccccagagagcccatggaggccgaggaggtggaggagagagcccccgcccagaaccccgagctgacccccggccccgcccccgccggccccacccccgcccccgagaccaacgcccccaaccaccccagccccgccgagtacgtggaggtgctgcaggagctgcagagactggagagcagactgcagcccttcctgcagagatactacgaggtgctgggcgccgccgccaccaccgactacaacaacaaccacgagggcagagaggaggaccagagactgatcaacctggtgggcgagagcctgagactgctgggcaacaccttcgtggccctgagcgacctgagatgcaacctggcctgcaccccccccagacacctgcacgtggtgagacccatgagccactacaccacccccatggtgctgcagcaggccgccatccccatccagatcaacgtgggcaccaccgtgaccatgaccggcaacggcaccagacccccccccacccccaacgccgaggcccccccccccggccccggccaggccagcagcgtggcccccagcagcaccaacgtggagagcagcgccgagggcgcccccccccccggccccgcccccccccccgccaccagccaccccagagtgatcagaatcagccaccagagcgtggagcccgtggtgatgatgcacatgaacatccaggacagcggcacccagcccggcggcgtgcccagcgcccccaccggccccctgggcccccccggccacggccagaccctgggcagcaccctgatccagctgcccagcctgccccccgagttcatgcacgccgtggcccaccagatcacccaccaggccatggtggccgccgtggccagcgccgccgccggccagcaggtgcccggcttccccaccgcccccaccagagtggtgatcgccagacccacccccccccaggccagacccagccaccccggcggcccccccgtgagcggcaccctgcagggcgccggcctgggcaccaacgccagcctggcccagatggtgagcggcctggtgggccagctgctgatgcagcccgtgctggtggcccagggcacccccggcatggcccccccccccgcccccgccaccgccagcgccagcgccggcaccaccaacaccgccaccaccgccggccccgcccccggcggccccgcccagcccccccccaccccccagcccagcatggccgacctgcagttcagccagctgctgggcaacctgctgggccccgccggccccggcgccggcggcagcggcgtggccagccccaccatcaccgtggccatgcccggcgtgcccgccttcctgcagggcatgaccgacttcctgcaggccacccagaccgccccccccccccccccccccccccccccccccccccccgcccccgagcagcagaccatgcccccccccggcagccccagcggcggcgccggcagccccggcggcctgggcctggagagcctgagccccgagttcttcaccagcgtggtgcagggcgtgctgagcagcctgctgggcagcctgggcgccagagccggcagcagcgagagcatcgccgccttcatccagagactgagcggcagcagcaacatcttcgagcccggcgccgacggcgccctgggcttcttcggcgccctgctgagcctgctgtgccagaacttcagcatggtggacgtggtgatgctgctgcacggccacttccagcccctgcagagactgcagccccagctgagaagcttcttccaccagcactacctgggcggccaggagcccacccccagcaacatcagaatggccacccacaccctgatcaccggcctggaggagtacgtgagagagagcttcagcctggtgcaggtgcagcccggcgtggacatcatcagaaccaacctggagttcctgcaggagcagttcaacagcatcgccgcccacgtgctgcactgcaccgacagcggcttcggcgccagactgctggagctgtgcaaccagggcctgttcgagtgcctggccctgaacctgcactgcctgggcggccagcagatggagctggccgccgtgatcaacggcagaatcagaagaatgagcagaggcgtgaaccccagcctggtgagctggctgaccaccatgatgggcctgagactgcaggtggtgctggagcacatgcccgtgggccccgacgccatcctgagatacgtgagaagagtgggcgaccccccccagcccctgcccgaggagcccatggaggtgcagggcgccgagagagccagccccgagccccagagagagaacgccagccccgcccccggcaccaccgccgaggaggccatgagcagaggccccccccccgcccccgagggcggcagcagagacgagcaggacggcgccagcgccgagaccgagccctgggccgccgccgtgccccccgagtgggtgcccatcatccagcaggacatccagagccagagaaaggtgaagccccagccccccctgagcgacgcctacctgagcggcatgcccgccaagagaagaaagaccatgcagggcgagggcccccagctgctgctgagcgaggccgtgagcagagccgccaaggccgccggcgccagacccctgaccagccccgagagcctgagcagagacctggaggcccccgaggtgcaggagagctacagacagcagctgagaagcgacatccagaagagactgcaggaggaccccaactacagcccccagagattccccaacgcccagagagccttcgccgacgacccctag

SEQ ID NO: 289120 - DNA, 3489 bp, Artificial Sequence
  derived and/or modified sequence
atggagcccaacgacagcaccagcaccgccgtggaggagcccgacagcctggaggtgctggtgaagaccctggacagccagaccagaaccttcatcgtgggcgcccagatgaacgtgaaggagttcaaggagcacatcgccgccagcgtgagcatccccagcgagaagcagagactgatctaccagggcagagtgctgcaggacgacaagaagctgcaggagtacaacgtgggcggcaaggtgatccacctggtggagagagcccccccccagacccacctgcccagcggcgccagcagcggcaccggcagcgccagcgccacccacggcggcggcagcccccccggcaccagaggccccggcgccagcgtgcacgacagaaacgccaacagctacgtgatggtgggcaccttcaacctgcccagcgacggcagcgccgtggacgtgcacatcaacatggagcaggcccccatccagagcgagcccagagtgagactggtgatggcccagcacatgatcagagacatccagaccctgctgagcagaatggagtgcagaggcggcccccagccccagcacagccagccccccccccagccccccgccgtgacccccgagcccgtggccctgagcagccagaccagcgagcccgtggagagcgaggccccccccagagagcccatggaggccgaggaggtggaggagagagcccccgcccagaaccccgagctgacccccggccccgcccccgccggccccacccccgcccccgagaccaacgcccccaaccaccccagccccgccgagtacgtggaggtgctgcaggagctgcagagactggagagcagactgcagcccttcctgcagagatactacgaggtgctgggcgccgccgccaccaccgactacaacaacaaccacgagggcagagaggaggaccagagactgatcaacctggtgggcgagagcctgagactgctgggcaacaccttcgtggccctgagcgacctgagatgcaacctggcctgcaccccccccagacacctgcacgtggtgagacccatgagccactacaccacccccatggtgctgcagcaggccgccatccccatccagatcaacgtgggcaccaccgtgaccatgaccggcaacggcaccagacccccccccacccccaacgccgaggcccccccccccggccccggccaggccagcagcgtggcccccagcagcaccaacgtggagagcagcgccgagggcgcccccccccccggccccgcccccccccccgccaccagccaccccagagtgatcagaatcagccaccagagcgtggagcccgtggtgatgatgcacatgaacatccaggacagcggcacccagcccggcggcgtgcccagcgcccccaccggccccctgggcccccccggccacggccagaccctgggcagcaccctgatccagctgcccagcctgccccccgagttcatgcacgccgtggcccaccagatcacccaccaggccatggtggccgccgtggccagcgccgccgccggccagcaggtgcccggcttccccaccgcccccaccagagtggtgatcgccagacccacccccccccaggccagacccagccaccccggcggcccccccgtgagcggcaccctgcagggcgccggcctgggcaccaacgccagcctggcccagatggtgagcggcctggtgggccagctgctgatgcagcccgtgctggtggcccagggcacccccggcatggcccccccccccgcccccgccaccgccagcgccagcgccggcaccaccaacaccgccaccaccgccggccccgcccccggcggccccgcccagcccccccccaccccccagcccagcatggccgacctgcagttcagccagctgctgggcaacctgctgggccccgccggccccggcgccggcggccccggcgtggccagccccaccatcaccgtggccatgcccggcgtgcccgccttcctgcagggcatgaccgacttcctgcaggccacccagaccgccccccccccccccccccccccccccccccccccccccgcccccgagcagcagaccatgcccccccccggcagccccagcggcggcgccggcagccccggcggcctgggcctggagagcctgagccccgagttcttcaccagcgtggtgcagggcgtgctgagcagcctgctgggcagcctgggcgccagagccggcagcagcgagagcatcgccgccttcatccagagactgagcggcagcagcaacatcttcgagcccggcgccgacggcgccctgggcttcttcggcgccctgctgagcctgctgtgccagaacttcagcatggtggacgtggtgatgctgctgcacggccacttccagcccctgcagagactgcagccccagctgagaagcttcttccaccagcactacctgggcggccaggagcccacccccagcaacatcagaatggccacccacaccctgatcaccggcctggaggagtacgtgagagagagcttcagcctggtgcaggtgcagcccggcgtggacatcatcagaaccaacctggagttcctgcaggagcagttcaacagcatcgccgcccacgtgctgcactgcaccgacagcggcttcggcgccagactgctggagctgtgcaaccagggcctgttcgagtgcctggccctgaacctgcactgcctgggcggccagcagatggagctggccgccgtgatcaacggcagaatcagaagaatgagcagaggcgtgaaccccagcctggtgagctggctgaccaccatgatgggcctgagactgcaggtggtgctggagcacatgcccgtgggccccgacgccatcctgagatacgtgagaagagtgggcgaccccccccagcccctgcccgaggagcccatggaggtgcagggcgccgagagagccagccccgagccccagagagagaacgccagccccgcccccggcaccaccgccgaggaggccatgagcagaggccccccccccgcccccgagggcggcagcagagacgagcaggacggcgccagcgccgagaccgagccctgggccgccgccgtgccccccgagtgggtgcccatcatccagcaggacatccagagccagagaaaggtgaagccccagccccccctgagcgacgcctacctgagcggcatgcccgccaagagaagaaagaccatgcagggcgagggcccccagctgctgctgagcgaggccgtgagcagagccgccaaggccgccggcgccagacccctgaccagccccgagagcctgagcagagacctggaggcccccgaggtgcaggagagctacagacagcagctgagaagcgacatccagaagagactgcaggaggaccccaactacagcccccagagattccccaacgcccagagagccttcgccgacgacccctag

SEQ ID NO: 289121 - DNA, 681 bp, Artificial Sequence
  derived and/or modified sequence
tgaagtgggtttggagccagactgctcgaactgtgtaaccagggtctgttcgaatgtctggccctgaacctgcattgcctgggagggcagcaaatggaattggctgcagtgatcaacggccgcatccgaagaatgagtcgaggagtaaacccttcactggtatcatggctaaccaccatgatggggcttagactgcaggttgtactcgaacatatgccagtgggacccgatgctatactgcggtatgttagacgcgtcggggacccccctcagcccctcccagaggaacctatggaagtgcagggggcagagcgcgcctcccccgagccccagcgagaaaacgcatcaccagcccccgggactactgccgaggaggcgatgagtaggggcccccccccagcacctgagggcggctcaagggatgagcaggatggagccagtgctgagaccgaaccatgggccgcagcagtaccacccgagtgggttcccatcatccagcaggacatccagtctcagcggaaggtgaaaccccagcccccactgtcagatgcctacctcagtggcatgcccgccaagcgcagaaagcttcgaagtgacattcagaagcgcttgcaggaagatccaaactattctcctcagcgattccctaacgcacagcgagcctttgccgacgacccctag

SEQ ID NO: 289122 - DNA, 681 bp, Artificial Sequence
  derived and/or modified sequence
tgatcaggctttggcgctcgcctgctggaactgtgcaatcagggcttgtttgagtgcctcgcgctgaacctccactgtttagggggtcagcagatggagctggcagcggtcattaatgggaggattcgtcggatgtcgcgaggcgtcaatcctagcttagtatcatggttgacaactatgatggggcttaggctccaggtggtactagagcacatgcccgtgggcccagacgccatccttcgctacgtgagacgggtgggcgacccaccacagcccctccccgaagaacccatggaggtacaaggggctgaacgagcttctcccgaaccccagcgcgaaaacgcctcccccgcacccgggaccacggcagaggaggctatgtcccgggggcccccccccgcacccgagggtgggagcagagatgagcaagacggggcatcagctgaaacagagccctgggctgctgctgtgccgcctgaatgggttcctattatccagcaggatatacaatcacagcggaaggtgaaacctcagccgccccttagcgatgcttacctatctggaatgcccgccaagcgcaggaaattgagatccgatatccagaagcgtcttcaggaggatcccaactactcccctcagagatttcccaacgcccaacgggcattcgctgacgacccctag

SEQ ID NO: 289123 - DNA, 681 bp, Artificial Sequence
  derived and/or modified sequence
tagagtggtttcggcgctaggctcctggagctatgtaaccaagggcttttcgagtgtctggccctgaacctacattgtctgggcggccagcagatggaactggctgcggtgataaacggtaggatccgaagaatgtcacgaggagttaaccccagcttggttagctggctgacgacaatgatgggcttgcggctgcaggtagtgttagaacacatgcctgttggccctgacgccatactcaggtacgtgcgccgcgtcggtgaccctcctcagcctctgcctgaagagcctatggaagtccagggggccgaacgagcatcccccgagcctcaaagagaaaatgcaagccctgcccccggcaccactgccgaagaagcaatgagtagggggccgcctcccgcccctgaaggcggatctagggatgagcaggacggggcatctgccgaaacggaaccctgggccgccgcggtgccccccgagtgggtccctattatccagcaggacatacagagtcagaggaaagtcaaaccacagccaccgctgtcagatgcctacctatctggcatgcctgcaaaacgcagaaaactgaggtctgatatacagaagcggctgcaggaggatccaaactattcaccgcaacgttttcccaacgcccagcgtgccttcgccgatgacccctag

SEQ ID NO: 289124 - DNA, 681 bp, Artificial Sequence
  derived and/or modified sequence
taatccggctttggcgcacgccttcttgaattgtgtaatcagggcctgttcgagtgcctcgcacttaatctacattgtttgggggggcagcaaatggagttggccgcagtcattaatgggagaattcggcgcatgagtcgaggcgttaacccctcccttgtttcttggctaacgacaatgatggggttgcgtctccaggtggtgcttgagcacatgccagttgggcctgacgctatcctcaggtatgtgagacgggtcggtgacccccctcaacctttgccagaggaacccatggaagtgcaaggagccgaacgcgcaagcccagaacctcagcgcgaaaacgcaagtccagctcctggtactacagccgaagaggctatgagcagaggcccacctccagcccccgagggcgggtcacgcgatgagcaagacggcgcctctgcggagaccgagccatgggcagcagcagtcccccctgagtgggtacctattatacagcaggacatacagagccagaggaaagtgaaacctcaaccacctctgagcgacgcttacctctcaggaatgcccgccaagagaaggaaactccgatctgacatccagaaaaggctgcaggaggacccaaactacagtccgcagcggttcccaaatgctcagcgggcattcgcggacgatccctag

SEQ ID NO: 289125 - DNA, 681 bp, Artificial Sequence
  derived and/or modified sequence
tagtccggctttggggcgaggttgttagaattatgcaatcagggtctcttcgagtgccttgctctgaatttgcactgcctaggaggacagcagatggaattggccgcggttatcaatggaagaatacgacgcatgtcaaggggtgtcaacccaagtcttgtgtcctggctgactaccatgatgggtcttcggcttcaggtggttctcgaacacatgcctgtgggtcctgatgcaattctgaggtacgtgaggcgagttggagacccccctcaacctctgcctgaagaacccatggaagtacagggagctgaacgagcatctccggagcctcagcgggaaaatgcaagtcccgctcctggtactaccgccgaggaagccatgagtagaggcccaccccctgcccccgaaggagggagcagagacgagcaggatggcgctagtgccgaaaccgagccttgggccgccgctgtgccaccagaatgggtgccaatcatccagcaggacattcagtctcagaggaaagtaaaaccccagccccctctctccgatgcttacctctctggcatgccagccaagcgccgtaagctacgctccgacattcagaaacggctccaggaggaccccaactactcaccgcagcggtttccgaatgcgcaacgtgcatttgcagatgatccctag

SEQ ID NO: 289126 - DNA, 681 bp, Artificial Sequence
  derived and/or modified sequence
taaagcggctttggagctcggctgctggaattatgtaaccagggccttttcgagtgcctcgccttaaatcttcattgcctggggggccagcagatggaacttgccgccgtgattaatggaagaatcaggcgcatgagccgaggcgtcaacccatccttggtaagttggctgactactatgatgggcctgaggctccaggtcgtactggaacatatgccagtgggaccagacgcaatattgcggtatgtgcgcagagtgggagatcccccccagcccctgccagaggaacccatggaagtacagggcgcggaacgggcttcccccgagcctcagcgggaaaatgcaagccccgcgcccgggacaaccgccgaagaagccatgtctcgaggacctcccccagctcccgaaggaggatcacgggatgaacaggatggggcaagcgccgaaactgagccctgggcggctgccgtgccgccagagtgggtgccgatcatccagcaggatattcagagccagaggaaagttaagccccagccacccttgagcgatgcatatctgagcgggatgcctgctaaacggaggaaactccggagcgacatacaaaaaaggttgcaggaagatcccaattattcgccccagagattccccaacgcccagcgggcgtttgcagacgatccgtag

SEQ ID NO: 289127 - DNA, 681 bp, Artificial Sequence
  derived and/or modified sequence
tgatcaggcttcggtgcccggctgctggaactgtgcaaccagggcttattcgaatgcttggctttgaacctccattgcttgggtggtcagcagatggaacttgcagcggtaattaacggccgaataagacgaatgtcaaggggcgtcaaccccagcctagtcagttggctgaccaccatgatgggcttacggctccaggtggtcctggagcacatgcctgttggacctgatgcaatcttgcgctatgtcaggagagttggtgatcccccccagccactcccggaggaacccatggaagtacaaggagctgaacgcgccagtccagagccgcagcgggagaatgcatctccagcccctggcacaactgccgaagaagccatgagtagaggtccacccccagcacccgagggagggagccgcgatgaacaagatggggcttccgcagaaaccgagccctgggcagccgcagtaccaccagagtgggtccccattatacaacaggatatccaaagtcagcgtaaggtgaagccccagcctcctctctctgatgcgtatctttccggcatgcctgccaaacgtaggaagttgagaagcgatatccaaaagcgactacaggaagatcccaactacagtccacagcggttcccgaatgctcaaagggccttcgctgacgatccttag

SEQ ID NO: 289128 - DNA, 681 bp, Artificial Sequence
  derived and/or modified sequence
tgaagcggctttggagcccggctgctggagctgtgcaaccagggcctgtttgagtgcctggccctgaacctgcactgcctgggcggccagcagatggagctggccgccgtcatcaatggccgcatccggaggatgagccggggcgtgaaccccagcctggtgtcctggctgaccaccatgatgggcctgcggctgcaggtggtgctggagcacatgcctgtgggcccagatgccatcctgcgctacgtgcggcgggtgggggaccccccccagcccctgcctgaggagcccatggaggtgcagggcgctgagcgggccagccctgagccccagagagaaaatgccagccctgcccctggcaccacagctgaggaggccatgagccggggccccccaccagcccctgagggcggcagcagagatgagcaggatggagccagcgctgagacagagccctgggccgctgctgtgcccccagagtgggtgcccatcatccagcaggacatccagagccagaggaaggtgaagccccagccccccctgagtgatgcctacctgagcggcatgcctgccaagaggaggaagctgcggagtgacatccagaagaggctgcaggaggaccccaactacagcccccagcgcttccccaatgcccagagggcctttgctgatgacccctag

SEQ ID NO: 289129 - DNA, 681 bp, Artificial Sequence
  derived and/or modified sequence
tgaagcggcttcggcgcccggctgctggagctgtgcaaccagggcctttttgaatgtttggctctgaacctgcattgcttgggggggcagcagatggagttggcggcagtcatcaatggaaggatcagacgcatgagcaggggagtgaatccctctctggtgtcctggttgaccaccatgatggggctgcgcctgcaagtggtcttagaacacatgccggtcggacccgacgcaatcctcaggtatgtccgacgggtgggcgatccccctcagcccctgccagaggagccaatggaggtgcaaggagcggaacgagcatctcccgagccacagcgcgaaaacgccagtcctgcaccgggcaccacggcagaagaagccatgtctcgaggaccacctccggcccccgaaggcggctctagggatgagcaggacggagccagtgccgagactgaaccttgggcggcggcggtaccaccagaatgggtaccaataatacaacaggacatccaaagccagcgcaaagtgaaaccgcaaccaccgctatctgacgcctacctatcaggtatgcctgctaagcgtcggaagctgaggtcagacattcagaagcggttgcaggaggacccaaattactctcctcagcgctttccaaatgcccaaagggcttttgcagatgacccctag

SEQ ID NO: 289130 - DNA, 681 bp, Artificial Sequence
  derived and/or modified sequence
tgaagcggcttcggcgcccggctgctggagctgtgcaaccagggcttgtttgagtgtcttgcactgaatctgcactgcctgggaggtcaacagatggagctggcagcggtgatcaatgggcgcattcggcgcatgtccagaggagtgaatccctctctggtgtcttggttgacaacaatgatgggcctcaggctgcaagtcgtgctggagcacatgcctgttggcccagacgccatccttcgatatgtgcgccgcgttggagaccctccacagccccttcccgaagagccaatggaggtgcagggcgctgagagagcctcgcctgaaccccagagggagaatgcctcaccagcaccaggcacaacagcagaagaagccatgagcaggggacctccccctgctcctgaggggggaagcagagatgagcaggacggggcctccgcggagaccgagccctgggctgcagccgttccaccagagtgggttccaatcatccaacaggacatccaaagccaaaggaaggtcaaacctcagccccctctttctgacgcatacttgtccggtatgccagctaagcgtagaaaactcagatccgatatccagaaaaggctccaggaagaccccaactattcaccacagagattcccaaacgcccagagggccttcgccgacgatccctag

SEQ ID NO: 289131 - DNA, 681 bp, Artificial Sequence
  derived and/or modified sequence
tgaagcggcttcggcgcccggctgctggagctgtgcaaccagggcctctttgagtgtcttgccctgaacctacattgcctgggtgggcagcagatggagctcgcagctgtcatcaatggccggatacgccgcatgtctaggggagtcaacccatcccttgtgtcttggctgacaactatgatgggattacgcctccaggttgtgctcgaacatatgccagtcggacctgacgcaatcttgcggtacgtgaggcgcgttggggatccaccccagccactccctgaagagccgatggaggttcagggagctgaacgagctagtccagaaccccagcgcgaaaatgcctcaccggcacccgggaccaccgccgaagaggcgatgtctcggggtccacctcccgccccagagggcgggtccagggatgagcaagatggggccagcgcggagacggaaccgtgggctgccgctgttccacccgagtgggtacccatcattcagcaggatatacaaagccagagaaaggttaagccccagccccctctgtcagatgcttaccttagcggtatgcccgctaagcgccgtaagttgcgaagtgacatccagaagcgcctccaggaggacccaaattattcaccgcagcgtttccccaacgcccagcgggcttttgctgacgacccgtag

SEQ ID NO: 289132 - DNA, 681 bp, Artificial Sequence
  derived and/or modified sequence
tgaagcggcttcggcgcccggctgctggagctgtgcaaccagggccttttcgagtgtcttgctctcaatctccattgccttggcgggcagcagatggaattggcagccgtgattaacggaagaatccggcggatgtccagaggcgtgaatccctcactggtcagctggctcactaccatgatgggcctgaggctgcaagtagtgttggagcacatgcctgtagggcctgacgctattttgcggtatgtacgccgagttggtgacccgccccagccgctgccagaagagccaatggaagttcaaggcgcagaacgggcttcacctgagcctcaaagagagaatgccagccccgctcccggaaccactgccgaggaggccatgtctcgcggccctccccccgcccccgagggcgggtctcgggatgaacaggacggcgcttccgccgagaccgagccctgggctgctgctgtgccgcctgaatgggtgccaatcatccagcaggacatccagagtcagcgaaaggtcaagcctcagcctcccctgtctgacgcctacctgtccggcatgcccgcgaagcgacgtaagttaagatcggatatccaaaagcgcctgcaggaggatccgaactattcacctcaacgattccccaacgcccaacgtgcctttgccgacgatccttag

SEQ ID NO: 289133 - DNA, 681 bp, Artificial Sequence
  derived and/or modified sequence
tgaagcggcttcggcgcccggctgctggagctgtgcaaccagggcctgtttgagtgccttgcactcaatctacactgcttgggaggccagcaaatggagctggccgctgttataaacgggaggatccggcgaatgagccgcggagtgaacccaagtctagtatcctggctcaccacaatgatgggtctgcgtctgcaagtggtcctcgagcacatgccagtggggccagatgctattctccgttatgtccgtagggtaggcgacccaccccagcccctacctgaggagccaatggaggtacagggggccgagcgtgccagccctgaacctcagcgcgaaaatgcgtcccctgctccagggacgactgctgaggaggcaatgagtaggggccccccccctgcccccgaaggcggttcacgcgatgagcaggacggagcaagcgcagaaactgaaccatgggcagctgctgtcccacccgagtgggtccctatcattcagcaagacatacagagccaacggaaagtgaaacctcagcctcctctgtcggacgcctatttgtctggtatgcctgcaaaaaggcgaaagttgagaagcgacatccagaagagactccaagaggatccgaattactctccccaaaggttcccaaacgctcagcgggcttttgccgacgatccctag

SEQ ID NO: 289134 - DNA, 681 bp, Artificial Sequence
  derived and/or modified sequence
tgaagcggcttcggcgcccggctgctggagctgtgcaaccagggcctcttcgagtgcttggccctgaacttgcattgcttgggtgggcagcagatggagctagcagctgtcatcaatggtagaatcagaaggatgagcagaggagtgaatccatccctggtcagctggctgacgaccatgatgggcttgaggctgcaggtcgtattggagcacatgcctgtcggacctgacgctattctgagatatgtgcgcagagtgggcgatccccctcaacccttgcctgaagagcccatggaggttcagggtgcagagcgcgcatcacccgaacctcagagagaaaatgctagccctgcgccggggacaaccgctgaggaagccatgtctaggggtcccccgcctgcacccgagggtggctctagagacgagcaagacggagcatccgccgagactgaaccttgggcagcagccgttcctcccgagtgggtcccgattatccagcaagatattcaatcacagcgaaaagtcaaacctcagcccccactatctgatgcttatctgtcaggtatgcccgctaagcggcgcaagctcagatctgacattcaaaaaagacttcaggaagacccaaattattcaccacaacgattccccaatgctcagagggcgtttgcggacgacccatag

SEQ ID NO: 289135 - DNA, 681 bp, Artificial Sequence
  derived and/or modified sequence
tgaagcggcttcggcgcccggctgctggagctgtgcaaccagggccttttcgaatgcctggctctcaatctccactgtctgggcggacagcagatggaactggctgccgtgattaacgggaggattcggcgaatgagccggggagtcaacccttctctggtgtcatggctgacaaccatgatgggcttgagactgcaggtcgtgctcgaacacatgcctgtcggaccggacgccattttgcgctacgtgcgtcgagttggcgacccgccacagcctctacccgaagaaccaatggaggtccagggtgccgaacgagccagtcctgagccacaacgtgagaacgcatcccctgcacctgggaccaccgcagaggaggctatgagccgtggacctcctcctgcacctgaaggtggcagtcgagacgagcaggatggagccagcgctgaaacagagccttgggccgccgctgtaccgcccgagtgggtgcctattatacagcaggacattcagagccagagaaaggttaagcctcaacctcccctgtcagacgcatacctgtcagggatgcccgccaagcggaggaagcttagatcggatatacagaaaagacttcaggaggaccccaattacagcccccagaggttcccaaacgcccagagagccttcgcagacgacccgtag

SEQ ID NO: 289136 - DNA, 681 bp, Artificial Sequence
  derived and/or modified sequence
tagagcggcttcggcgcacggctgcttgagctgtgtaatcaaggactgtttgagtgtctggctctcaatctgcactgcttaggagggcagcagatggagctagctgcagtgatcaatggcaggattcgcaggatgtctaggggggtgaacccctcactggtgtcatggttgacaacaatgatgggactgcgccttcaggtggtgctggaacatatgccagtgggccctgatgctattctccgctacgttcggagggtcggagatcccccacaacctctgcccgaggaaccgatggaggtgcagggtgcagagcgagcgtccccagagccgcagagagaaaatgcctcgcccgctcctggaaccacggcagaagaggccatgtctcgtggacctcctcctgctccggaaggcggaagccgagacgagcaggacggagctagcgccgaaacagagccctgggcagcggcagtgccacccgagtgggttccgatcatacagcaagatatccagagccaacggaaggtgaagccccaacccccactctccgatgcttacctatctggtatgcctgccaagcggcgtaagttacgtagcgacatacagaagaggctccaagaggaccctaactattcaccccagcgctttcccaacgcacaacgggctttcgccgacgacccatag

SEQ ID NO: 289137 - DNA, 681 bp, Artificial Sequence
  derived and/or modified sequence
taatctggctttggagcgaggctcctagaactgtgtaatcaagggctcttcgagtgcttggccctgaacttacattgcctcggcggtcaacaaatggagttggccgctgtgatcaatggacgaattagacgtatgagccgtggcgtcaacccatccctcgtgagttggctcacgactatgatgggattacgacttcaggtggtgttagagcacatgccagtgggacctgatgcgatactccgttatgtacggagagtcggcgaccccccacagcccctgccggaggaaccaatggaagtgcagggcgcagagcgcgcttcacctgagccacagagggaaaatgcatcccccgcacccggaaccaccgccgaagaagcaatgagccggggtccgcctcccgctccagagggcggaagccgggacgagcaggatggggcttctgccgagactgagccttgggccgctgccgtccccccagaatgggttcccataatccagcaggatatccaatcccaaagaaaggtaaaaccacagcctcctttgtcggacgcgtatctgtctggcatgcccgcaaaacgacggaagctgaggtcagacatccagaagaggttgcaggaggatcccaactacagcccacagagattccctaatgcacaacgcgcattcgcagatgacccttag

SEQ ID NO: 289138 - DNA, 681 bp, Artificial Sequence
  derived and/or modified sequence
taatccggcttcggagcccgactgctggagttatgtaaccaggggctgttcgagtgcctggccctgaatctccattgcttggggggacagcagatggaactagctgctgttataaacggcaggatcaggcggatgagcagaggggtcaatccttccttggtgagttggttgacaaccatgatgggcctcaggttacaggtcgtgttagagcatatgcccgtcggccctgacgccattctgcggtatgtgaggagagtcggcgacccccctcagcctctccccgaagagcccatggaagtgcagggcgcagaacgggctagtcctgaacctcagcgcgagaacgctagtccagccccaggcacaaccgccgaagaggccatgtcacggggacctccacctgcaccagaaggcggaagtagagacgagcaggacggggctagcgctgagactgagccgtgggccgctgccgtgccaccggagtgggtccctattatccagcaggatatacagtctcagcgaaaagtgaaacctcagccacccctttccgacgcctacctgtccggaatgcccgcaaaacggcgaaagctgaggtccgacattcagaaacgcctgcaggaggatcctaactattctccgcaaaggtttccaaacgcacagcgagctttcgccgatgacccttag

SEQ ID NO: 289139 - DNA, 681 bp, Artificial Sequence
  derived and/or modified sequence
tagtccggattcggggctcgcctgctggaactatgcaatcagggtttgttcgaatgtcttgctctgaacctgcattgtttaggcggacagcagatggagttggcagctgtgattaacggaagaatccgcaggatgtctagaggggttaatccttccctggtgtcctggttgaccactatgatgggactgagactgcaggtggtacttgaacatatgcctgtgggcccagatgccattctaagatacgtgcgcagggttggtgatcctccgcaacctcttcccgaagaaccgatggaggtgcagggggcagaacgagcatcccccgaacctcagagagagaacgcctcaccagcaccaggcaccaccgcagaagaggccatgagtagggggccaccgccagcgcctgagggaggttctcgggatgaacaggatggcgctagcgccgagaccgagccctgggctgcagctgttccccctgaatgggtccctatcatccagcaagacattcagagccagcggaaggtaaaaccacagccacctctcagcgacgcgtacttgtccggaatgcccgctaagcggcgaaaactgcgctccgacattcaaaaaaggctgcaggaggaccctaactacagtcctcagaggtttcctaatgcccaacgcgcatttgctgatgatccctag

SEQ ID NO: 289140 - DNA, 681 bp, Artificial Sequence
  derived and/or modified sequence
tgaagtggcttcggtgctcggctgctcgagctctgtaatcaaggtctctttgaatgtctggcgctcaatttgcactgtctgggaggacagcagatggagctcgccgcagtcatcaacggtagaatccgcagaatgtcacggggtgtgaacccttcactggtgagttggttaaccacaatgatgggcttaagattacaagttgtgctcgagcatatgcccgtcggtccggatgcgatcttaagatacgtgcgacgggttggggaccctccccagcccctcccagaggaacccatggaggtgcagggagctgagcgcgctagtccggagccacagagagagaatgcgtcccctgctcctggcaccaccgcagaggaggctatgtcccggggtcctccacccgcacccgagggcggttctcgggacgagcaggatggggcatccgctgagactgaaccctgggctgctgctgtgcccccagagtgggtgcctatcattcagcaggatattcagagtcaacgcaaggtgaaacctcagcccccactttccgacgcatacttgagcggaatgcccgcaaagcggaggaaactccgcagcgatattcaaaaacggctccaggaggaccccaattattccccccagaggtttcccaatgcccagcgggcttttgctgacgatccgtag

SEQ ID NO: 289141 - DNA, 681 bp, Artificial Sequence
  derived and/or modified sequence
tgaagtgggttcggagcgcgtttgttggagctatgcaaccaaggtctcttcgagtgcctagctctcaatttacactgcttgggcggacagcagatggagttggctgccgtcattaacggacgcatccgaagaatgtcccgcggagtgaaccctagcctggtaagctggctgactactatgatgggcctgcgccttcaagttgtcctcgaacacatgcccgtggggccagacgctattctgaggtatgtccggagagttggcgatccaccccagccattacccgaagagcctatggaggttcaaggcgcagagcgcgcatcccccgagcctcagcgcgaaaacgcaagccccgcaccaggtacaaccgctgaggaggccatgtctcgtggccctccaccagcccctgaagggggatcacgggacgagcaagacggagcttctgccgaaacagagccatgggctgcggcagtgccacccgagtgggttccaattattcagcaggatatacagagccagaggaaggtaaaaccccagccacctctgagcgatgcgtacctctctgggatgcctgccaagaggaggaagttgaggagcgatattcaaaaacgcttgcaggaggatccaaattatagtccccagcggtttccaaatgcacaaagggcctttgctgatgatccttag

SEQ ID NO: 289142 - DNA, 681 bp, Artificial Sequence
  derived and/or modified sequence
taaagcggtttcggagcgaggctcctggagttgtgcaaccaagggctgttcgagtgtctggcgctgaacctgcactgtctgggaggtcagcagatggagcttgctgccgtcatcaacggtcgcatacggcgtatgagtcggggtgtcaacccatccttggtctcgtggctcacaactatgatgggcctgcgactgcaagtggtgttagaacacatgcccgttggcccagacgctatattgcggtacgtacggagggtgggcgatccccctcaaccgttgcctgaggaacctatggaagtccagggtgcagagcgtgcatcccccgagccacaacgggagaacgcctcccctgccccaggcacaacagccgaagaagccatgtcacggggtcccccacctgcccctgaaggcggaagccgcgacgagcaggacggtgcaagtgctgagacagagccatgggcagctgccgttcccccagagtgggtccctataatccagcaggacatccaatctcaaaggaaagtgaaaccccagcctccactctctgatgcctatctctcagggatgccagcaaagagaaggaagctccggagcgatatccagaagcggctccaagaggaccctaactatagtccgcaacggttcccgaatgctcagagggcctttgctgacgacccttag

SEQ ID NO: 289143 - DNA, 680 bp, Artificial Sequence
  derived and/or modified sequence
atagtggatttggggcccggttgctggagttgtgtaaccaaggcctgtttgaatgcctggccctaaacctgcactgcttggggggacagcagatggagcttgctgctgttatcaatggccgaattcgtcgtatgtctcgtggggtgaatccctccttggtgagctggctgaccactatgatgggactgaggcttcaggtggtactggagcacatgcctgtaggccctgatgccattctcagatacgttcgcagggttggtgatcccccccagccacttcctgaggagccaatggaagttcagggagcagaaagagcttcccctgagcctcagcgggagaatgcttccccagcccctggaacaacagcagaagaggccatgtcccgaggtccacctcctgctcctgaggggggctcccgggatgaacaggatggagcttcagctgagacagaaccttgggcagctgcagtccccccagaatgggtccctattatccagcaggacattcagagccagcggaaggtgaaaccgcagccccctctgagtgatgcctacctcagtggtatgcctgccaagagacgcaagctccggtctgatatacaaaaacgactgcaggaagaccccaactacagtccccagcgcttccccaatgcccagcgggcctttgctgatgatccttag

SEQ ID NO: 289144 - DNA, 783 bp, Artificial Sequence
  derived and/or modified sequence
atagtggatttggggcccggttgctggagttgtgtaaccaaggcctgtttgaatgcctggccctaaacctgcactgcttggggggacagcagatggagcttgctgctgttatcaatggccgaattcgtcgtatgtctcgtggggtgaatccctccttggtgagctggctgaccactatgatgggactgaggcttcaggtggtactggagcacatgcctgtaggccctgatgccattctcagatacgttcgcagggttggtgatcccccccagccacttcctgaggagccaatggaagttcagggagcagaaagagcttcccctgagcctcagcgggagaatgcttccccagcccctggaacaacagcagaagaggccatgtcccgaggtccacctcctgctcctgaggggggctcccgggatgaacaggatggagcttcagctgagacagaaccttgggcagctgcagtccccccagaatgggtccctattatccagcaggacattcagagccagcggaaggtgaaaccgcagccccctctgagtgatgcctacctcagtggtatgcctgccaagagacgcaagctccggtctgatatacaaaaacgactgcaggaagaccccaactacagtccccagcgcttccccaatgcccagcgggcctttgctgatgatccttagctctttgctctatggcccttcctcatcaggggaccgtttcccccctcttccttcacagtatttaagaaataaaagtcggatttttctggctgctttctctcta

SEQ ID NO: 289145 - DNA, 787 bp, Artificial Sequence
  derived and/or modified sequence
atagtggatttggggcccggttgctggagttgtgtaaccaaggcctgtttgaatgcctggccctaaacctgcactgcttggggggacagcagatggagcttgctgctgttatcaatggccgaattcgtcgtatgtctcgtggggtgaatccctccttggtgagctggctgaccactatgatgggactgaggcttcaggtggtactggagcacatgcctgtaggccctgatgccattctcagatacgttcgcagggttggtgatcccccccagccacttcctgaggagccaatggaagttcagggagcagaaagagcttcccctgagcctcagcgggagaatgcttccccagcccctggaacaacagcagaagaggccatgtcccgaggtccacctcctgctcctgaggggggctcccgggatgaacaggatggagcttcagctgagacagaaccttgggcagctgcagtccccccagaatgggtccctattatccagcaggacattcagagccagcggaaggtgaaaccgcagccccctctgagtgatgcctacctcagtggtatgcctgccaagagacgcaagctccggtctgatatacaaaaacgactgcaggaagaccccaactacagtccccagcgcttccccaatgcccagcgggcctttgctgatgatccttagctctttctttgctctatggcccttcctcatcaggggaccgtttcccccctcttccttcacagtatttaagaaataaaagtcggatttttctggctgctttctctcta

SEQ ID NO: 289146 - DNA, 681 bp, Artificial Sequence
  derived and/or modified sequence
tgaagcggcttcggcgccagactgctggagctgtgcaaccagggcctgttcgagtgcctggccctgaacctgcactgcctgggcggccagcagatggagctggccgccgtgatcaacggcagaatcagaagaatgagcagaggcgtgaaccccagcctggtgagctggctgaccaccatgatgggcctgagactgcaggtggtgctggagcacatgcccgtgggccccgacgccatcctgagatacgtgagaagagtgggcgaccccccccagcccctgcccgaggagcccatggaggtgcagggcgccgagagagccagccccgagccccagagagagaacgccagccccgcccccggcaccaccgccgaggaggccatgagcagaggccccccccccgcccccgagggcggcagcagagacgagcaggacggcgccagcgccgagaccgagccctgggccgccgccgtgccccccgagtgggtgcccatcatccagcaggacatccagagccagagaaaggtgaagccccagccccccctgagcgacgcctacctgagcggcatgcccgccaagagaagaaagctgagaagcgacatccagaagagactgcaggaggaccccaactacagcccccagagattccccaacgcccagagagccttcgccgacgacccctag

SEQ ID NO: 289147 - protein, 350 aa, Artificial Sequence
  derived and/or modified sequence
MLVIPPGLSEEEEALQKKFNKLKKKKKALLALKKQSSSSTTSQGGVKRSLSEQPVMDTATATEQAKQLVKSGAISAIKAETKNSGFKRSRTLEGKLKDPEKGPVPTFQPFQRSISADDDLQESSRRPQRKSLYESFDWGYEERSGAHSSASPPRSRSRDRSHERNRDRDRDRERDRDRDRDRDRERDRDRDRDRDRDRERDRDRERDRDRDREGPFRRSDSFPERRAPRKGNTLYVYGEDMTPTLLRGAFSPFGNIIDLSMDPPRNCAFVTYEKMESADQAVAELNGTQVESVQLKVNIARKQPMLDAATGKSVWGSLAVQNSPKGCHRDKRTQIVYSDDVYKENLVDGF

SEQ ID NO: 289148 - protein, 334 aa, Artificial Sequence [sequence omitted]

SEQ ID NO: 289149 - protein, 240 aa, Artificial Sequence
  derived and/or modified sequence
MLVIPPGLSEEEEALQKKFNKLKKKKKALLALKKQSSSSTTSQGGVKRSLSEQPVMDTATATEQAKQLVKSGAISAIKAETKNSGFKRSRTLEGKLKDPEKGPVPTFQPFQRSISADDDLQESSRRPQRKSLYESDRLRELGPDGEEAEGPGAGDGPPRSFDWGYEERSGAHSSASPPRSRSRDRSHERNRDRDRDRERDRDRDRDRDRERDRDRDRDRDRDRERDRDRERDRDRDREGP

SEQ ID NO: 289150 - DNA, 1202 bp, Artificial Sequence
  derived and/or modified sequence
gagcccgctatcagcggccagcgcgggcgcggccggagaccgtggggcccccggttgccgccccctcgggagccaccatgttggtgataccccccggactgagcgaggaagaggaggctctgcagaagaaattcaacaagctcaagaaaaagaaaaaggcattgctggctctgaagaagcaaagtagcagcagcacaaccagccaaggtggtgtcaaacgctcactatcagagcagcctgtcatggacacagccacagcaacagagcaggcaaagcagctggtgaagtcaggagccatcagtgccatcaaggctgagaccaagaactcaggcttcaagcgttctcgaacccttgaggggaagttaaaggaccccgagaagggaccagtccccactttccagccgttccagaggagcatatctgctgatgatgacctgcaagagtcatccagacgtccccagaggaaatctctgtatgagagctttgactggggctatgaagaacgcagtggtgcccactcctcagcctcccctccccgaagccgcagccgggaccgcagccatgagaggaaccgggacagagaccgagatcgggagcgggatcgagaccgggatcgagacagagacagagagcgggacagggatcgggatcgggatcgagatcgagaccgggaacgggacagggatcgggagcgggatcgagaccgagaccgagagggtcctttccgcaggtcggattcattccctgaacggcgagcccctaggaaagggaatactctctatgtatatggagaagacatgacacccacccttctccgtggggccttctctccttttggaaacatcattgacctctccatggacccacccagaaactgtgccttcgtcacctatgaaaagatggagtcagcagatcaggccgttgctgagctcaacgggacccaggtggagtctgtacagctcaaagtcaacatagcccgaaaacagcccatgctggatgccgctactggcaagtctgtctggggctccctcgctgtccagaacagccctaagggttgccaccgggacaagaggacccagattgtctacagtgatgacgtctacaaggaaaaccttgtggatggcttctagggaacagagctggattccttgtgcctcatatgccccaatgctggtctcagtaaaacactgaggtggaagctt

SEQ ID NO: 289151 - DNA, 1075 bp, Artificial Sequence
  derived and/or modified sequence
cccgctatcagcggccagcgcgggcgcggccggagaccgtggggcccccggttgccgccccctcgggagccaccatgttggtgataccccccggactgagcgaggaagaggaggctctgcagaagaaattcaacaagctcaagaaaaagaaaaaggcattgctggctctgaagaagcaaagtagcagcagcacaaccagccaaggtggtgtcaaacgctcactatcagagcagcctgtcatggacacagccacagcaacagagcaggcaaagcagctggtgaagtcaggagccatcagtgccatcaaggctgagaccaagaactcaggcttcaagcgttctcgaacccttgaggggaagttaaaggaccccgagaagggaccagtccccactttccagccgttccagaggagcatatctgctgatgatgacctgcaagagtcatccagacgtccccagaggaaatctctgtatgagagtgatcgacttcgagaactaggaccagatggagaagaggcagagggcccaggggctggtgatggtccccctcgaagctttgactggggctatgaagaacgcagtggtgcccactcctcagcctcccctccccgaagccgcagccgggaccgcagccatgagaggaaccgggacagagaccgagatcgggagcgggatcgagaccgggatcgagacagagacagagagcgggacagggatcgggatcgggatcgagatcgagaccgggaacgggacagggatcgggagcgggatcgagaccgagaccgagagggtcctttccgcaggtcggattcattccctgaacggcgagcccctaggaaagggaatactctctatgtatatggagaagacatgacacccacccttctccgtggggccttctctccttttggaaacatcattgacctctccatggacccacccagaaactgtgccttcgtcacctatgaaaagatggagtcagcagatcaggccgttgctgagctcaacgggacccaggtggagtctgtacagctcaaagtcaacatagcccgaaaacagcccatgctggatgccgc

SEQ ID NO: 289152 - DNA, 847 bp, Artificial Sequence
  derived and/or modified sequence
agccaaagacaagagtaggcagacctgaaggggtggggttgggtacagtgtggacggcgtgtgaaccccgggtggtaacagtggagaaagatgtcttgggccctgcccctgaactaggagccaccatgttggtgataccccccggactgagcgaggaagaggaggctctgcagaagaaattcaacaagctcaagaaaaagaaaaaggcattgctggctctgaagaagcaaagtagcagcagcacaaccagccaaggtggtgtcaaacgctcactatcagagcagcctgtcatggacacagccacagcaacagagcaggcaaagcagctggtgaagtcaggagccatcagtgccatcaaggctgagaccaagaactcaggcttcaagcgttctcgaacccttgaggggaagttaaaggaccccgagaagggaccagtccccactttccagccgttccagaggagcatatctgctgatgatgacctgcaagagtcatccagacgtccccagaggaaatctctgtatgagagtgatcgacttcgagaactaggaccagatggagaagaggcagagggcccaggggctggtgatggtccccctcgaagctttgactggggctatgaagaacgcagtggtgcccactcctcagcctcccctccccgaagccgcagccgggaccgcagccatgagaggaaccgggacagagaccgagatcgggagcgggatcgagaccgggatcgagacagagacagagagcgggacagggatcgggatcgggatcgagatcgagaccgggaacgggacagggatcgggagcgggatcgagaccgagaccgagagggtccttt

SEQ ID NO: 289153 - DNA, 723 bp, Artificial Sequence
  derived and/or modified sequence
atgcttgtaatccctcccggtctatccgaagaggaagaggctttgcaaaaaaagttcaataaactaaagaagaaaaagaaagctctgttagctttgaagaagcagtcatctagttccacaacgtctcaggggggcgtgaagagatccctgagcgagcagcccgtgatggatactgctactgctactgagcaggcaaagcagctcgtcaaatctggcgctattagcgccatcaaagccgaaacaaagaatagcggttttaaaagaagtcgcaccctggagggcaaactgaaagaccctgagaaaggacccgtgcccacctttcagccatttcagaggagtatcagcgccgatgacgaccttcaagagagtagccgccgtccgcagaggaagagcctctatgaatcggaccggctaagagagctcggacccgacggcgaggaggccgagggacccggggcaggagacggccctccgcggtccttcgactggggctacgaagaacgttctggggcacattcctccgcaagccccccgcggtcgaggtcacgagataggtcccatgaacggaatagagaccgagaccgggaccgagaacgggatcgagatagagaccgcgaccgggaccgcgagcgggatagagatcgggaccgcgatcgagaccgcgatcgagagcgtgaccgggatcgcgagagagacagggacagagatagggaagggccgtag

SEQ ID NO: 289154 - DNA, 1005 bp, Artificial Sequence
  derived and/or modified sequence
atgctggtaatccctccgggcctatctgaggaggaagaagcactccaaaagaagttcaataagctcaaaaagaagaagaaggcactattagcactgaaaaaacagagctcgtcaagcacaacaagccagggcggagtgaaacggtccttaagcgaacagcccgtgatggatacagccaccgccacagagcaggccaaacaattggttaaatctggtgcaatcagcgctatcaaggctgagactaaaaatagtggtttcaagaggtcgcgtactcttgaaggcaaacttaaagatcctgaaaaggggcctgtgccgacctttcagccgttccagaggtcaatcagtgccgacgacgatctccaggagtcatcacgtaggccgcagcggaagagtctctatgagagtgaccgtttgcgggaactgggcccagacggtgaagaggccgaggggcccggggccggtgacggcccaccacgtagcttcgattggggatacgaagaacggtccggggcccattcttccgcctctccaccccgtagtaggtcgcgcgaccgctcccacgaaagaaaccgggacagggatagagatcgggagcgggaccgggatagagacagggatagagatcgagaacgcgatcgagaccgcgacagagatagggatcgggaccgcgaaagagatagagatagggaacgcgatcgggatcgcgatcgcgaaggaccattccgccgtagcgatagttttcctgaaagacgggcccccagaaaagggaacactctctacgtctatggcgaggatatgactcctacactgctcaggggcgccttctccccgtttggaaacatcatcgatctttcgatggatcctccgcggaactgcgcattcgttacatacgagaaaatggagtctgctgatcaagctgtggctgagcttaatggcactcaggtggagagtgtgcagctgaaagtaaatatcgcccggaaacagcccatgttagacgctgcctag

SEQ ID NO: 289155 - DNA, 723 bp, Artificial Sequence
  derived and/or modified sequence
atgctggtgatcccccccgggcttagcgaggaggaggaggcgctgcagaagaagttcaataagctaaaaaaaaagaagaaagccctgctggctcttaaaaagcaaagcagttcctcgaccacttcacaaggaggcgttaaaagatctctgtccgaacagcctgtgatggacaccgccacggctaccgaacaggctaagcagctcgtcaagagtggtgctatcagcgccataaaagcagagactaaaaattctggctttaaaagaagtcgaacactggagggcaaactcaaggatcccgagaagggaccagttcccaccttccagccattccaaaggagtatcagtgctgatgatgatttgcaggaatctagcagacgtccacaaaggaagtccctgtatgaatccgatcgactccgggaactgggtccagacggtgaagaggctgagggccctggtgccggtgatggcccccccagaagtttcgactggggttacgaggagaggagcggagcccacagcagcgcctctcctccaagatccaggtcccgggatcggtcccatgaacgaaatagagatagagatcgggatcgggagcgcgacagagatcgagatagagaccgtgatcgcgaaagggaccgggacagagacagggatagagatagggatagggaaagggatcgagatcgggaacgcgatagagaccgagatagagaagggccatag

SEQ ID NO: 289156 - DNA, 1005 bp, Artificial Sequence
  derived and/or modified sequence
atgttggttatcccaccagggctttccgaagaggaggaggcgcttcagaaaaagttcaataaactcaaaaagaaaaagaaggcactcctggccctaaagaagcagtcaagctcaagcacaacatcacagggaggagtcaagaggtcactgtccgagcaaccggtgatggacactgctacggcaactgaacaggccaaacagctggtgaaatcaggagccatttcggccattaaagccgaaaccaaaaactccggattcaaaaggagcaggacgctggagggcaaactaaaagatcctgagaaaggaccagtcccaacattccagccctttcagcgatccatctccgcagacgacgatctacaggagtccagccgacggccccagcgaaagtctctgtacgaaagtgatcgtttgcgcgagctgggtcccgacggggaagaggcggagggacccggagctggcgatggtcctcctcggagtttcgactgggggtacgaggaaagatcaggcgctcactcatctgcctcccctcccagatcaaggtcaagagaccgtagccacgagcgtaacagggatcgcgatcgggaccgcgagcgggacagggacagagaccgagatcgggaccgcgagagggacagggaccgggatagagacagagacagggaccgggagcgagaccgcgacagagagagagatcgagaccgggaccgggagggtccgtttagaaggagcgattcattccctgagcgcagagcaccaagaaaagggaacaccctctatgtgtatggcgaggacatgactccgacattattacggggtgcattttcccctttcggtaacatcatcgatctgtccatggaccccccaagaaactgcgcttttgtcacatatgagaaaatggagtcagctgatcaggctgtggcagagctgaacggaacgcaggttgagagcgtgcaattgaaagtgaacatcgcacgcaagcagcctatgctggacgcagcctag

SEQ ID NO: 289157 - DNA, 723 bp, Artificial Sequence
  derived and/or modified sequence
atgctggtgatccccccaggtctcagtgaggaggaagaggccctgcaaaagaagtttaataagcttaagaagaaaaagaaggctctgcttgccctcaagaaacagtctagcagttcgaccactagtcaaggtggagttaaaagaagtcttagcgagcaaccggtgatggataccgccacagcaactgaacaggcaaaacaattggtgaaatctggtgctatttctgcaataaaggctgaaacaaagaacagcggcttcaagcgcagtagaactctcgaagggaagctgaaagatcctgaaaagggccctgtcccaacctttcagcctttccagcggtctatctccgccgacgatgatctacaggagtcttctcgaagaccccagcggaagtccctgtatgagtccgaccgtcttcgtgagcttgggccggacggtgaggaggccgaaggccctggagctggcgacggccccccacggagctttgattggggatacgaggagcggagtggagcacattcatcagcttccccaccacgctcaaggagtcgggaccggtcacatgagcggaatagagaccgcgaccgcgatcgcgagagagacagggatcgggaccgcgatcgagaccgcgaacgtgacagagaccgggacagagacagagacagggaccgagaaagagatcgcgatcgagaacgcgaccgcgatcgggaccgggaagggccatag

SEQ ID NO: 289158 - DNA, 1005 bp, Artificial Sequence
  derived and/or modified sequence
atgctcgtgattcctcctggcctgagcgaagaggaagaagcacttcaaaagaagttcaacaagctcaagaaaaaaaagaaggccctcctagcccttaaaaaacaaagcagctcgagtactacctctcagggaggggtgaaaagatccctgtccgaacagccggttatggacaccgcaaccgctactgagcaggccaagcagcttgtgaaaagcggcgccatatcagctatcaaggcggaaacgaagaatagtggctttaagcgcagccgcaccctggaaggcaagttgaaagacccagaaaaagggcctgtgccgaccttccaaccgttccagcgatcaattagtgccgacgatgatctgcaagagtcgtcccggcgccctcagcgaaagagcttatacgagagcgacaggctgcgcgagctaggccccgacggcgaggaggccgagggccccggtgccggagacggccctcctaggtcctttgattggggatacgaagaacgaagtggcgcgcatagttccgcatcccccccccgtagtcggagtcgcgaccgctctcacgagcgcaatagagatcgcgatagagatcgggagcgcgaccgggatcgagaccgggaccgcgaccgggagagggacagagacagggatagggatcgggacagagaccgagagcgggacagggacagagagagggaccgcgatagagatcgtgagggtccctttagaaggtcagactcgtttcctgagaggcgtgcgccacgaaaaggtaataccctgtacgtttatggtgaggatatgacacctactctgctgagaggagccttctcaccttttggtaatatcattgatctgagtatggaccctcctaggaattgtgccttcgttacatacgagaaaatggaatctgccgatcaggccgtggcagagttaaacggcactcaggtggagtctgttcaattaaaggtgaacattgctcgaaagcagcctatgctggatgccgcctag

SEQ ID NO: 289159 - DNA, 1005 bp, Artificial Sequence
  derived and/or modified sequence
atgctggtcattcccccaggactgtccgaggaggaggaggcgttacagaagaagtttaacaagctcaaaaagaagaagaaggccttactggccctgaaaaaacagtccagctcaagcacgacatctcagggtggcgtgaaacggagcctcagtgagcagcctgtgatggatactgctacggccacggagcaggctaaacagctggtaaaatccggagccattagcgccatcaaggcggagaccaagaactccggcttcaaaagatcccggacgttggagggaaagctcaaggatccggaaaagggaccagttcccacatttcagcccttccaacgctcaatatctgctgatgacgacctccaagagagctcaaggagacctcagcgcaagagtctttacgaatccgaccggctcagagagctcgggcccgatggtgaagaggccgagggccccggcgccggtgacggccctcccagatccttcgattggggctacgaagagaggtccggagcacatagtagtgcctcaccaccaagatcacgaagtcgcgataggagtcatgagagaaacagggacagagatcgggaccgtgagcgggacagggacagagatagagaccgagaccgtgagagggaccgagaccgtgatcgggatagagatcgcgatcgagaacgagatagagatagggagcgggaccgcgaccgtgacagagaaggaccattcagaaggagcgatagcttccctgaacggcgagccccccgcaagggtaatactctgtacgtttacggggaggacatgacccccacactgctccgtggcgcattctcacccttcgggaacatcattgatctgtctatggacccgccacggaactgcgcatttgttacctacgagaagatggaaagtgcagaccaggctgtagctgagcttaacggcacacaggtggagagtgtacagttgaaagtcaacatcgcccgcaagcaacccatgctggatgccgcctag

SEQ ID NO: 289160 - DNA, 1005 bp, Artificial Sequence
  derived and/or modified sequence
atgctagtcataccacccgggctgtctgaagaggaagaggccttacagaagaaattcaacaaattgaagaaaaagaagaaggccctactggcacttaaaaaacagtcctccagtagtacgacctcacagggaggggttaaacgctctctgagcgaacaacccgtgatggacacagcaacagcgactgaacaggccaagcagctggtgaaatcaggcgccatctcagccataaaggcagaaacaaaaaattcaggattcaaaaggtcacggacattagaaggaaagcttaaggatcctgagaagggccctgtgcccacttttcagccattccagcggagtatttccgctgacgacgatctgcaggagtcctctcgcagaccccagcgcaagtcgctttatgagtctgaccgcctccgggagctgggccccgacggggaagaagcagaaggcccaggagccggggatggccccccccgcagctttgactgggggtatgaggagagaagcggcgcccatagtagcgcatcacctccacgtagcagaagccgggatcggagccacgagcggaaccgggatcgcgatagagacagagaaagagatagagatcgcgatcgcgaccgcgatagagagagagacagagatagagatagggaccgggacagggatagggaaagagaccgggacagagagcgtgaccgagatcgggaccgcgaggggccctttagaaggtcagactcttttccggagcgacgcgcaccaagaaaggggaataccctgtatgtttacggcgaagacatgactccaacccttctcaggggcgccttctccccattcggtaacatcatcgatctaagcatggacccccctaggaactgcgccttcgtgacttatgaaaagatggaaagcgctgaccaggccgtagcagaacttaatggcacacaagtagaaagcgtccagctcaaggtcaatatcgctcgcaagcagccaatgctcgacgccgcctag

SEQ ID NO: 289161 - DNA, 1053 bp, Artificial Sequence
  derived and/or modified sequence
atgctcgtgatcccacccgggttatctgaagaggaagaggccctgcagaagaagtttaacaagctgaagaaaaagaaaaaggccctcctggctctcaagaagcaatcctccagtagcaccacctctcaagggggcgtgaagagaagcctgtcagaacagccggtcatggataccgctaccgcgaccgagcaggcaaagcagctggtgaaatcgggagccatctcagcaattaaggcagagacgaagaattccgggttcaaacgctcaagaaccctggagggtaagctgaaggaccctgagaaaggtcctgtccctactttccagccattccaacgtagtatcagcgccgacgatgacctccaggagtcgagtcgcaggccccaaaggaagagcctgtacgagagttttgattggggatatgaggagcggagcggggcccattcaagtgcgagcccgccacgctccaggtcccgagatagatcccacgaaagaaaccgcgaccgagaccgcgaccgcgagcgggaccgcgaccgggacagggaccgggaccgtgagagagatcgggatagggaccgagacagagacagagacagggagcgtgaccgggatagagagagagaccgcgaccgcgatagggaaggaccatttcgacgctccgattcttttcccgagcgcagagcccctcgcaaggggaatacgttgtatgtctacggggaggatatgacgccaactctcttgagaggcgccttctcgcctttcggtaacattatcgacctgtccatggatcccccaagaaactgcgcctttgtgacctacgaaaaaatggaaagtgctgaccaggctgtcgcagagctgaatggaacccaggtcgaaagcgtgcagttaaaagtaaacattgcccggaaacagcctatgctcgacgcagccactgggaagagtgtgtggggcagcctggccgtgcagaacagtcctaagggttgtcatcgggataagagaacccagattgtgtactctgatgatgtttataaggagaacctggtggatgggttctag

SEQ ID NO: 289162 - DNA, 723 bp, Artificial Sequence
  derived and/or modified sequence
atgctcgtgatcccacctggattgagtgaagaggaagaggccttacagaaaaagtttaacaagttgaaaaagaaaaagaaggctcttctcgcactcaagaagcaaagctcttcaagtactacaagccagggcggagtgaaaagatcgctttccgagcagcctgtcatggacaccgcaaccgcgacagaacaggcaaaacagcttgtgaaatctggcgcaatctcagccattaaagcagagacaaaaaatagtggatttaagcgcagcagaactctggaaggtaagctaaaggaccctgaaaagggccctgtccccacattccagcccttccaaagaagcattagcgcagatgatgaccttcaggaatccagccgccgacctcagcggaagtcattgtacgagtccgacagattgagggaattgggtcccgacggcgaggaagcagaagggccaggcgctggcgacggcccaccccggtccttcgattgggggtacgaagagcggtccggcgctcatagtagcgccagccctccacgatctcggagtcgagatagatcccatgagaggaaccgtgaccgcgatcgagacagggagcgggaccgtgatagggaccgggaccgtgatcgggaaagagatcgcgatagggaccgcgaccgcgacagggatcgggaaagggaccgggacagggagcgcgatagggatcgcgacagggagggcccctag

SEQ ID NO: 289163 - DNA, 1005 bp, Artificial Sequence
  derived and/or modified sequence
atgttggtcatacctcccgggttaagcgaagaggaggaggcgttgcagaaaaagtttaacaaactgaagaagaagaagaaggcactgctcgcgttgaagaagcagtcatcatcatctacaacaagccagggaggggtgaaaaggtctttgtcagaacagcccgtgatggatactgcaacagctaccgagcaggctaagcagctggtaaaaagcggagctataagtgccattaaggctgagactaaaaactccggattcaagaggtcccgcactctggaaggcaaacttaaagaccctgaaaaaggccctgtgcccaccttccagccctttcagagatctatctccgccgatgacgacttgcaggagtctagccgacgcccacagagaaaaagtttgtacgagtccgatcgtctaagagagcttggtccagacggagaagaagccgaagggccgggcgccggtgatggccctccaaggtctttcgattggggctacgaagaacgtagtggagcccattcatctgcatctcctccccggagtaggtcccgcgaccggtcccacgaaaggaatagagacagggatcgcgaccgagaacgtgacagagacagagaccgggaccgtgatcgtgagcgggacagagaccgagatagagaccgagacagagaccgtgagagggatagagaccgggagcgagacagagaccgcgaccgcgaagggcctttcagaaggtccgactccttccccgaacgcagagctccccgtaagggaaacacgctgtatgtgtatggtgaggatatgaccccaacactcctgcgaggagcattttccccgtttggtaatattatcgacctttccatggatccaccccggaattgtgccttcgtgacatacgagaagatggagtctgccgatcaggcagttgcagagctcaacggaacacaggtcgagtcagtccagctcaaggtcaatatagctcgaaagcagcctatgctggatgctgcctag

SEQ ID NO: 289164 - DNA, 723 bp, Artificial Sequence
  derived and/or modified sequence
atgctggtcatcccgcccggcctatccgaggaagaggaggctttacaaaaaaagttcaataaactcaagaagaagaaaaaggcactgctagctctcaaaaagcagtcatctagctcaactacttcgcaagggggcgtgaagcggtctctgagtgagcagcctgtgatggacactgccaccgccaccgaacaggccaagcagctcgtgaagtccggggccatctccgccattaaggccgagacaaagaacagcggctttaaaagatcccggacgctggaaggcaagttaaaggatcctgagaagggcccagtcccgaccttccagccctttcagcgttctatctctgcagacgacgacttacaagaatctagcaggcggccacagcgaaaatcattgtatgaatccgatcgactaagagaattggggcccgatggggaagaggccgagggccccggagctggcgatggtcccccacgatcatttgactggggttatgaagagcgcagtggcgcacacagtagcgcgagccctccaagatccagaagtcgcgataggagccacgagcgtaaccgtgatcgggaccgcgacagggaaagagatcgcgatcgcgatcgcgaccgcgatcgggagcgcgaccgggaccgagatcgcgatcgcgatcgcgatagagagcgagatcgagatagagaacgagaccgcgatagagatagggaaggcccctag

SEQ ID NO: 289165 - DNA, 723 bp, Artificial Sequence
  derived and/or modified sequence
atgctggtgattcctcctggcctgtctgaggaggaggaggccctgcagaagaagttcaacaagctgaagaagaagaagaaggccctgctggccctgaagaagcagagcagcagcagcaccaccagccagggcggcgtgaagaggagcctgtctgagcagcctgtgatggacacagccacagccacagagcaggccaagcagctggtgaagagcggggccatcagcgccatcaaggccgagaccaagaacagcggcttcaagaggagcaggaccctggagggcaagctgaaggaccctgagaagggccctgtgcccaccttccagcccttccagaggagcatctctgcagatgatgacctgcaggagagcagcagaagaccccagaggaagagcctgtatgaaagtgaccggctgcgggagctgggcccagatggagaggaggccgagggccctggagctggagatggccccccaagaagctttgactggggctatgaggagaggtctggggcccacagcagcgccagccccccaagaagccgcagccgggacaggagccatgaaagaaacagagaccgggaccgggaccgggagcgggaccgggaccgggaccgggaccgggaccgggagcgggaccgggaccgggaccgggaccgggaccgggaccgggagcgggaccgggaccgggagcgggaccgggaccgggaccgggagggcccctag

SEQ ID NO: 289166 - DNA, 1005 bp, Artificial Sequence
  derived and/or modified sequence
atgctggtgattcctcctggcctgtctgaggaggaggaggccctgcagaagaagttcaacaagctgaagaagaagaagaaggccctgctggccctgaagaagcagagcagcagcagcaccaccagccagggcggcgtgaagaggagcctgtctgagcagcctgtgatggacacagccacagccacagagcaggccaagcagctggtgaagagcggggccatcagcgccatcaaggccgagaccaagaacagcggcttcaagaggagcaggaccctggagggcaagctgaaggaccctgagaagggccctgtgcccaccttccagcccttccagaggagcatctctgcagatgatgacctgcaggagagcagcagaagaccccagaggaagagcctgtatgaaagtgaccggctgcgggagctgggcccagatggagaggaggccgagggccctggagctggagatggccccccaagaagctttgactggggctatgaggagaggtctggggcccacagcagcgccagccccccaagaagccgcagccgggacaggagccatgaaagaaacagagaccgggaccgggaccgggagcgggaccgggaccgggaccgggaccgggaccgggagcgggaccgggaccgggaccgggaccgggaccgggaccgggagcgggaccgggaccgggagcgggaccgggaccgggaccgggagggccccttccgccgcagtgacagcttccctgagcggcgggcccccaggaaaggaaacaccctgtatgtgtatggagaggacatgacccccaccctgctgcggggggccttcagccccttcggcaacatcatcgacctgtccatggacccccccaggaactgtgcctttgtgacctatgagaagatggagagcgctgaccaggccgtggccgagctgaatggcacccaggtggagagcgtgcagctgaaggtgaacatcgccaggaagcagcccatgctggatgctgcctag

SEQ ID NO: 289167 - DNA, 1053 bp, Artificial Sequence
  derived and/or modified sequence
atgctggtgattcctcctggcctgtctgaggaggaggaggccctgcagaagaagttcaacaagctgaagaagaagaagaaggccctgctggccctgaagaagcagagcagcagcagcaccaccagccagggcggcgtgaagaggagcctgtctgagcagcctgtgatggacacagccacagccacagagcaggccaagcagctggtgaagagcggggccatcagcgccatcaaggccgagaccaagaacagcggcttcaagaggagcaggaccctggagggcaagctgaaggaccctgagaagggccctgtgcccaccttccagcccttccagaggagcatctctgcagatgatgacctgcaggagagcagcagaagaccccagaggaagagcctgtatgagagctttgactggggctatgaggagaggtctggggcccacagcagcgccagcccccccaggagccgcagccgggacaggagccatgagaggaacagagaccgggaccgggaccgggagcgggaccgggaccgggaccgggaccgggaccgggagcgggaccgggaccgggaccgggaccgggaccgggaccgggagcgggaccgggaccgggagcgggaccgggaccgggaccgggagggccccttcagaagaagtgacagcttccctgagcggcgggcccccaggaagggcaacaccctgtatgtgtatggagaggacatgacccccaccctgctgcggggggccttcagcccctttggaaacatcatcgacctgtccatggaccccccaagaaactgtgcctttgtgacctatgagaagatggagagcgctgaccaggccgtggccgagctgaatggcacccaggtggagagcgtgcagctgaaggtgaacatcgccaggaagcagcccatgctggatgctgccaccgggaagtctgtgtggggcagcctggccgtgcagaacagccccaagggctgccaccgggacaagaggacccagatcgtgtacagtgatgatgtgtacaaggagaacctggtggatggcttctag

SEQ ID NO: 289168 - DNA, 723 bp, Artificial Sequence
  derived and/or modified sequence
atgctggtgatcccccccggcctgagcgaggaggaggaggccctgcagaagaaattcaataaactgaagaaaaagaaaaaggctctgttggctttgaaaaaacagagctcatcctcaactacttcgcagggaggtgtgaagcggagcctctctgagcagcccgtaatggatacagctacggccaccgagcaggccaagcagctagtgaaatctggagccatctccgcgataaaagccgagacaaagaacagcggatttaagcgatccaggactctcgagggcaagctgaaagatcctgagaagggaccagtccctacttttcaacccttccagcgtagtatatcagcagatgatgacctgcaggaatcttcacgaagacctcagagaaagtccctgtacgaaagcgaccgactccgggagctgggacccgacggcgaggaagcagagggtcctggtgctggggatggacctccaaggtcattcgactggggatacgaagagagaagcggtgcccattccagcgcctctccacctcgcagtcggtcgcgggaccggtcacatgagagaaaccgagaccgcgatagggaccgagaacgggaccgggatagggatcgggatagagaccgggagcgcgatcgcgatcgcgaccgcgaccgggaccgagacagagaaagagacagagaccgagaacgggacagggatagggaccgcgaaggtccttag

SEQ ID NO: 289169 - DNA, 1005 bp, Artificial Sequence
  derived and/or modified sequence
atgctggtgatcccccccggcctgagcgaggaggaggaggccctgcagaagaaattcaataagctcaagaaaaagaagaaggctctgctagcgttgaagaaacagtcctcctcaagcacaacatctcaggggggggtgaagcggagtttgagtgaacagcccgttatggacaccgccacggcaacggaacaggccaaacagttggtgaagagcggggcgatttccgccatcaaggccgagactaagaacagtggattcaagagatcacggaccttagaaggcaagctcaaggaccccgagaaagggcctgtgccgacctttcaaccctttcagagatcaatttctgccgacgatgaccttcaggagtcaagcagaaggccccagcgcaagagtctgtatgagagtgacaggctgagagagttggggcccgacggcgaggaagccgaggggcctggagccggcgacgggccaccaaggtccttcgactggggatatgaggaaaggtcgggagcccattctagtgcaagcccacccagatcccgctcacgcgacaggtctcatgaacggaatagagacagagatcgtgacagagaacgcgaccgggaccgcgatcgcgatagggatagggagcgggacagagaccgggaccgggaccgcgatagggacagggaacgggatcgggatagggaaagggaccgtgaccgggacagagaaggaccttttcgtcgcagtgactcatttccagagcgtcgggcacccagaaagggtaacactttatatgtttacggagaggatatgactccaaccttgctacgcggggcatttagcccattcggaaatattatcgatctttctatggaccccccccgcaactgcgccttcgtcacctacgaaaaaatggaaagcgctgaccaggccgtggctgaactgaatggcacacaggtggaatccgtacagctgaaggtcaacattgcccgcaagcaacctatgctggatgcagcatag

SEQ ID NO: 289170 - DNA, 723 bp, Artificial Sequence
  derived and/or modified sequence
atgctggtgatcccccccggcctgagcgaggaggaggaggccctgcagaaaaagtttaataaactgaaaaaaaagaagaaggccctccttgccttgaaaaagcagagctcctcttccaccacctcccaaggcggagtgaagcggtctctcagcgagcagccagtgatggatacggccacagctactgagcaggctaaacaactggtgaaatccggagctatcagtgcgataaaagccgagacaaagaactctgggttcaaacgcagccgcacccttgagggaaagctgaaggaccctgaaaagggccctgtccccacttttcaaccattccagaggagcatttccgccgacgatgacttacaggagtccagccgaagaccccaaagaaagagcctctatgaatcagacagactacgcgagctagggcctgacggcgaggaagccgagggtcccggggccggggacgggcctcctcgctcttttgactgggggtatgaagagcggagcggcgcacactcctctgctagtccaccccgctcacggtccagggatcgcagccacgaacgaaatcgggatagagatcgtgaccgtgagcgggaccgcgatcgggatagggatcgggatcgtgaacgggatagagaccgcgaccgggaccgcgacagggaccgggagcgggacagggaccgagagagagatagggacagggacagagagggaccatag

SEQ ID NO: 289171 - DNA, 1005 bp, Artificial Sequence
  derived and/or modified sequence
atgctggtgatcccccccggcctgagcgaggaggaggaggccctgcagaagaagtttaacaagctgaaaaagaaaaagaaagccctgctggctctcaaaaagcaatcttcaagttctacaaccagtcaggggggtgtgaagcgctctctatcagaacaaccagttatggacaccgctacagcaacagagcaagcaaaacaactggtcaagagtggcgcaatctccgccatcaaagctgaaacgaagaactcgggcttcaagcggtcccgcacactcgaaggcaagttgaaggaccccgagaaaggacccgtcccaacctttcagccatttcagaggagcatctcagccgacgacgatcttcaggagtcttccaggaggcctcagcgtaaatcgctttatgaatcagatcggctgagagaattgggccctgacggagaagaagcagaaggtccgggagccggcgacggccccccccgctcttttgactggggatacgaagagcggagtggtgcacattcctccgcctcaccccctagatcacgtagtagagaccgctctcacgagagaaatcgggacagagatagagaccgggaacgtgatcgagaccgagacagggatagagatagagaaagggacagagaccgagaccgtgatagagaccgcgatcgggagcgcgaccgagatagagaaagagatagagatagagatagggaagggccgttccgtcgcagtgatagcttcccagaaaggagggcgccacggaaaggcaatactctctacgtgtacggcgaggacatgaccccaactctgctgaggggagctttttctccattcgggaacattattgatctttccatggatcctcccagaaattgcgctttcgtcacctacgagaagatggagtctgccgatcaggctgtcgccgaattgaatggtactcaggtcgagtctgtgcaactaaaagtcaacattgccagaaaacagccgatgctggatgcagcctag

SEQ ID NO: 289172 - DNA, 723 bp, Artificial Sequence
  derived and/or modified sequence
atgctggtgatcccccccggcctgagcgaggaggaggaggccctgcaaaagaaattcaacaaactcaagaagaaaaaaaaagccctgttagcactgaagaaacaatcaagttcctccactacatcgcaaggaggcgttaagcgctcactgagcgagcagcccgtcatggacactgcgaccgctaccgaacaggctaagcagctggttaaaagcggggcaatcagcgctatcaaggctgagactaaaaacagcggattcaaacgttcacgcaccttagaaggaaagctgaaggaccccgagaaaggacccgtaccaacgtttcagcctttccagcgatcgatcagtgccgatgacgacctacaagaatcgagccgtcggccacagcgaaaatcattatacgagagcgacaggcttcgcgagctgggacccgatggcgaggaagccgaaggacctggggccggcgacggaccccctcgttctttcgactgggggtatgaggagcggtcaggagcccactcctctgcaagcccaccccggagtcggagccgtgaccgcagccatgagaggaatcgagatcgtgatagggatagggaacgtgatcgagatcgcgatcgcgatagggaccgcgagcgggatagagatagggatcgcgatcgggatcgcgacagagaaagagacagggaccgagaaagagaccgcgatagggacagagagggcccttag

SEQ ID NO: 289173 - DNA, 1005 bp, Artificial Sequence
  derived and/or modified sequence
atgctggtgatcccccccggcctgagcgaggaggaggaggccctgcagaagaagtttaataagctcaaaaagaagaaaaaagccttgctggccctgaaaaaacaaagcagttccagcactacttctcagggtggggttaaacgctcattgtccgagcagcccgtcatggacacagcaacggcaactgagcaggcaaaacagctggtgaagtccggggctataagcgctattaaagctgagacaaaaaactcaggcttcaaacggtcccgtactctggaaggaaaactgaaagatccggagaagggaccagtgccgacatttcaacccttccagagatcaatctctgccgacgacgacctacaggagagctcaaggagacctcaacggaaatctctgtatgagagcgaccgactgagggagctgggcccagatggagaagaggcagaaggacccggggccggggatggacccccaaggagcttcgattgggggtatgaggagcggtccggggcacattccagcgctagccctcctaggtcccgctccagagaccgatcccacgagcgtaatcgagaccgggacagggacagggaaagggatcgcgaccgcgaccgtgaccgggatcgggagcgtgatagggacagggatagggaccgggatcgcgacagggaacgcgatagagatcgcgaaagagatagggatagggaccgcgaaggacccttccgccgctccgacagttttccagaacggagagccccacggaagggaaatacgctctacgtgtacggcgaagacatgacaccaacgctgctgcggggcgcctttagcccattcggcaacattatcgatttatccatggatccaccacgaaattgcgcatttgtaacatacgaaaagatggaatccgcagatcaggccgtagcagaactcaacgggacccaagttgaatcagttcagctgaaagtgaacatcgctcggaaacaaccaatgctggatgccgcatag

SEQ ID NO: 289174 - DNA, 1005 bp, Artificial Sequence
  derived and/or modified sequence
atgctggtgatcccccccggcctgagcgaggaggaggaggccctgcagaaaaaattcaacaagctgaagaagaagaaaaaggccctcctagccctgaaaaagcagtcgtcaagtagcacaacgtcacaggggggggttaaacgtagcctttcagagcagcctgtgatggacaccgctactgccacagaacaagcgaagcagctggtcaagtcaggcgcaatctctgctatcaaagccgaaactaagaattccgggtttaagagatccaggacgttagaggggaagttgaaagacccagaaaaaggccccgtgcctacattccagcccttccaaaggagcatttcagccgatgacgacctgcaggaatcatcccggaggccccagcggaagtctctttacgagtctgaccgacttagagaacttggacctgatggcgaggaagccgagggcccaggggctggtgacggacctcctcgctctttcgattgggggtatgaggagaggagcggagcacatagctctgcctccccacctaggtccaggagcagggataggtctcatgagaggaatcgggaccgcgacagagaccgtgagagagatagagacagggatagggaccgcgaccgcgaacgcgaccgagaccgtgaccgcgaccgggatcgggaccgtgaacgggacagagacagggagagggatcgcgaccgggatcgtgaagggccgttcaggagaagcgactctttcccagagaggcgcgccccgcggaaggggaatacactatatgtctatggcgaggacatgacccctaccttactcaggggcgcattctctcctttcggaaatatcatagacttaagcatggacccccccagaaactgtgccttcgtgacctacgaaaaaatggaatcagcagatcaggctgtagccgaactgaacggaacccaagttgagtccgtgcagcttaaggtaaacattgcgaggaagcaacccatgcttgacgccgcctag

SEQ ID NO: 289175 - DNA, 1005 bp, Artificial Sequence
  derived and/or modified sequence
atgctggtgatcccccccggcctgagcgaggaggaggaggccctgcagaaaaaatttaacaaactgaagaagaaaaagaaggcccttctggcccttaaaaagcaatcatcatccagtactacctcccaaggcggtgtaaagcgaagtctgagcgagcaacccgtgatggacactgcaactgcaactgagcaggcgaagcagctggtgaaatctggggctatctctgctatcaaggcggagactaagaacagcgggtttaagaggagtcggactcttgagggcaaactcaaagatccggaaaaaggcccggtgcctacctttcagccctttcaaagatctatctcagcagacgacgatctgcaggaaagcagcagaaggccacagagaaagtctttatatgaatccgatcgcttaagggagctgggtcccgatggagaagaagccgagggtcctggagctggggatggcccacctcgatcattcgattggggatatgaggaacgctctggggcgcactctagcgctagccccccccggtccagatcacgagatcgctcccatgaaaggaacagagaccgagacagagaccgtgagcgggacagggatcgggatcgagaccgcgatagggagagggacagggacagagacagagatagagatagagaccgcgaacgggatcgggacagggagcgggatagggatcgagatcgggaagggccttttcgccggtcagacagcttccccgaacgccgggccccaagaaaaggaaataccctgtacgtatacggtgaggacatgacacctacactgttgcgcggggcgttcagcccatttggcaatattattgacctgagtatggacccgccaagaaattgtgctttcgttacctatgaaaaaatggagagcgccgaccaggctgtcgcagagctgaacggaacccaggttgagtcagtccagttgaaggtgaacatcgcccgaaaacaacctatgctagacgctgcatag

SEQ ID NO: 289176 - DNA, 1053 bp, Artificial Sequence
  derived and/or modified sequence
atgctggtgatcccccccggcctgagcgaggaggaggaggccctgcagaaaaagttcaataaactgaaaaaaaagaagaaagccctactagctttgaagaagcaaagctcttcttccaccacgagtcaggggggagttaaacgctccctatcggagcagccagttatggacacagctaccgcaacagagcaggccaaacaactggttaagtcgggagccatttcagccatcaaagctgagacaaagaattctgggttcaaaaggtctaggacccttgagggaaagttaaaagaccctgaaaagggccccgtgccaaccttccaaccttttcagcgctccatctccgctgatgatgatcttcaggaatcttctcgcaggccccaacggaagtcattgtacgaatctttcgactggggatacgaggagcgtagtggagcccacagctctgcgagtcctcctagaagccgttcccgggatcgtagccacgaacgcaaccgtgaccgagatcgcgatcgcgaacgggatagggatagggaccgggatcgggacagagagcgagatagggaccgggaccgtgacagagacagagatagagagcgcgatcgggaccgcgagcgggatagggatcgtgatagagagggcccgtttcggagaagtgactcgttccccgagagacgggctcccaggaaaggaaatactctgtacgtctacggcgaagatatgactccaacattgctgagaggcgccttcagcccttttgggaacattatcgacctgtctatggatccacccaggaattgtgcctttgttacttatgagaaaatggaaagcgcggatcaggccgtcgcagagcttaacgggacgcaggtcgagtccgtgcagctgaaagtaaatatcgctagaaagcagcctatgcttgatgcagccactggaaagtcagtctgggggtctttggcggtgcaaaattctccaaaaggatgtcaccgcgataagaggacgcagatcgtctacagcgacgatgtatataaggagaatctcgtggacgggttttag

SEQ ID NO: 289177 - DNA, 723 bp, Artificial Sequence
  derived and/or modified sequence
atgctggtgatcccccccggcctgagcgaggaggaggaggccctgcaaaaaaaatttaataaactaaagaaaaagaaaaaggctctactggctttgaaaaaacaatcatctagcagcacaacctctcaaggaggagtcaaacgcagtctgagcgaacagcccgtgatggacacagctaccgccacagaacaggcaaagcagctggtgaagtcaggggccatatccgcaatcaaggcggaaaccaagaactccggatttaaaaggtcacggaccttagaaggcaagctaaaagacccggagaagggacccgtacccacattccagcccttccaacggagcatttctgccgatgatgatctacaggaatcctcacggcgaccccagagaaagtctctgtatgagtccgatcggttacgcgagctggggcccgacggggaggaagccgagggacccggagccggtgacggccctccaaggtcttttgactgggggtatgaagagcggagtggagctcattcctctgctagccctcctcggagccgatcccgcgatcgtagccacgaaaggaaccgcgaccgcgaccgagaccgtgagcgggatcgggatagagacagggaccgggatcgggaaagagacagagaccgggaccgcgatcgagaccgcgatcgcgagcgagatcgtgatagagagcgcgacagggaccgggaccgcgaggggccctag

SEQ ID NO: 289178 - DNA, 1005 bp, Artificial Sequence
  derived and/or modified sequence
atgctggtgatcccccccggcctgagcgaggaggaggaggccctgcagaaaaagtttaataaactgaagaaaaagaaaaaggcgctgctcgcattaaagaagcaatctagcagtagcaccacctcgcaggggggtgtgaaacggagcctctctgagcagcccgtgatggacaccgccacagccactgaacaggcaaagcagctggtcaaaagtggagccatttctgccatcaaagccgagaccaaaaactccggttttaagaggtctagaaccctagaggggaaattgaaggatccggaaaaaggaccagtgcctaccttccaacccttccagcgttctatcagcgcagacgacgatctgcaggaatcaagtagacggccacagcggaaaagcctttacgagtccgatagactgagggagctgggacctgacggagaagaagctgaggggccaggagccggtgatgggccgccacggagcttcgattggggatacgaggagcgctccggcgcgcacagtagcgcttctcccccacgcagccgctctcgcgatcggagccacgaaagaaacagagatcgcgatcgggatcgcgaaagggatcgggacagagatagggatagggacagagaaagagatcgcgaccgagatagagatcgtgaccgggatcgggaacgggatagggatcgtgagcgagatcgcgatagggacagagaaggacctttcagaaggtccgacagtttcccagagagacgcgccccacggaaagggaatacattatatgtgtacggcgaggacatgacccccaccctgctgcgcggtgccttcagcccatttggcaacattattgatttgtccatggacccgccaagaaactgtgctttcgtgacttacgagaaaatggagagtgccgaccaggccgtggctgaactaaacggcacgcaggtcgaatcggtgcagctgaaagtgaatattgcacgcaaacagccaatgctggacgcagcctag

SEQ ID NO: 289179 - DNA, 723 bp, Artificial Sequence
  derived and/or modified sequence
atgctggtgatcccccccggcctgagcgaggaggaggaggccctgcagaagaagttcaataaacttaagaagaagaagaaggccttgctggcactgaaaaagcagtcaagtagctcaactacatcccaaggcggggtgaagcgatcactctctgagcagccagtgatggacacggccactgccactgagcaggctaagcaattagtcaagtcaggcgccattagcgccatcaaggccgagacaaaaaattcaggcttcaaacgctcacggactctggaagggaagctgaaggacccagaaaagggaccagttcccacatttcagcccttccaaaggtcgatcagtgccgacgacgacctgcaagagtcaagtcgacgcccacaaaggaagtctctgtacgaaagcgaccgcctgcgggagctggggcccgatggagaggaagctgaaggcccaggagctggcgatggccctccccgcagtttcgattggggatatgaggaaagatcaggcgctcattcaagcgcctccccacctcggtctaggagccgggatcggtcgcacgaacgcaatcgagaccgggatagagatcgggaaagagatcgcgatcgtgatcgtgaccgtgaccgcgaacgagatagagacagagacagagatagggatagggaccgagagagggacagagatcgggagcgggaccgggaccgggaccgggagggcccttag

SEQ ID NO: 289180 - DNA, 723 bp, Artificial Sequence
  derived and/or modified sequence
atgttggtcatacccccaggattaagtgaggaggaagaagccctgcagaagaaattcaataagctcaaaaagaaaaagaaagctctccttgcactcaagaaacagtcaagcagttcaacgacatcacaaggaggggtaaaacgttccctgtccgagcagccagtgatggataccgcaacagctacagagcaggcaaagcaattagtgaaaagcggtgcgatttctgctatcaaagcggagaccaaaaactcaggattcaagaggtcccggaccctcgaaggcaaactcaaagatcccgagaaaggacctgttcctacgtttcagccattccagaggagcattagcgcagacgacgacctccaggaaagctctaggcggccacagaggaaatcactctacgagagcgatcgcctccgtgaactggggcctgatggcgaagaggccgaagggcctggggctggagacggtcccccacgtagcttcgactggggatacgaagagaggagtggagcgcactccagcgcatcccccccacggagcagatcccgggataggagccacgaaagaaacagagacagagatagagacagagagcgagaccgggacagggatcgtgaccgtgatcgtgagcgtgacagagaccgcgatagagaccgcgaccgggatagagaacgagacagggatcgggaaagggatcgggatagggatcgtgagggtccttag

SEQ ID NO: 289181 - DNA, 1005 bp, Artificial Sequence
  derived and/or modified sequence
atgctggtaatccctcctggcttgtccgaggaagaggaggccctccagaaaaagttcaataagctcaaaaagaagaagaaagctctgcttgcactcaagaaacagagcagttccagcactaccagccaaggcggagtcaagagatccctcagtgagcagcccgttatggatacggccacagcaactgagcaggccaaacagctggtaaaatctggtgctattagtgccatcaaggccgagactaagaacagcgggttcaagagaagccgcacactggaaggcaagcttaaggaccccgagaagggacccgtccctacttttcagcccttccagagatctatctccgcagatgatgacctgcaggaatccagtaggaggccccagcggaagtcgctgtatgaatctgaccgcttgagggagctcggacccgatggagaggaagccgagggacctggagcaggggatggacctccgagatccttcgattgggggtacgaggaacggtctggcgctcactcctccgcatcccctccaagatctagaagcagggacaggtcccacgagcgaaatcgagaccgtgaccgggatcgggaaagggatagagatagagatcgcgacagggaccgcgagcgcgatagggatcgcgatagagacagggatagggatagagaaagagaccgcgatagggaaagggacagggacagagaccgggagggaccattccggagatcggattccttcccagagagacgcgctcccagaaagggcaatacactgtacgtatacggggaagatatgacgccaacactgctcagaggagccttctcaccgttcggcaatatcatcgatctctccatggatcctcccagaaactgcgccttcgttacctatgagaagatggaatcagcagaccaggccgtggccgagctcaatggcactcaggtcgagtccgtccagttgaaggtaaacatcgcaagaaagcagccgatgctagatgcagcttag

SEQ ID NO: 289182 - DNA, 723 bp, Artificial Sequence
  derived and/or modified sequence
atgcttgttatcccccctggactgagcgaggaggaagaagctctccaaaagaagtttaacaagctcaagaaaaagaagaaagctctgttggccctcaagaaacagtcatcaagttcaacaactagccagggaggcgtcaaacggtccctaagcgagcagcctgtcatggataccgccaccgccacagagcaagccaagcaactggtgaagtcgggggcaatctcggccattaaggccgaaaccaaaaatagcggctttaagcgcagtaggaccctcgaggggaaactgaaggatcctgaaaaggggcctgtaccaacgtttcagccattccagagaagtatctccgccgatgacgaccttcaggagtctagtagacgtccccagcgtaagtcattgtacgagagcgaccgtctgcgtgaattagggccagatggcgaagaggccgagggcccaggcgcaggcgatgggcctccaaggtcctttgattggggatatgaagaacggtctggggctcactcatccgcgagcccaccacgcagtagaagtcgagaccggagtcatgagaggaatcgagaccgcgatcgggacagagagcgtgatcgtgacagagacagggatcgggatcgtgagagagatcgtgaccgcgaccgtgatagggatagggatagggagcgggaccgcgatagagagcgagatcgagatagagaccgggagggcccttag

SEQ ID NO: 289183 - DNA, 1005 bp, Artificial Sequence
  derived and/or modified sequence
atgctcgtgatccctcctggtctctcggaggaggaagaagcactgcaaaagaaatttaacaagctgaagaaaaagaagaaagcacttctggccctcaagaagcagtctagcagctcaaccacgtctcaggggggtgtgaagagaagccttagtgagcagcccgttatggatacagctacagctactgagcaggccaagcagctcgtaaagtcaggagccatatctgcaatcaaggccgagactaagaatagtggatttaagcgttcccggaccttagaggggaagctgaaggatcctgaaaagggccctgttccgaccttccaaccatttcaaagatccatcagcgccgacgacgatctccaggagtcttccagacggccacagagaaaatcactgtacgagtcagataggttacgagagctgggccctgacggggaagaggcagaggggcctggtgcgggtgacggaccccctaggagcttcgattggggttacgaagagaggagcggagcacacagctctgcgtcgcccccaagaagtagatcacgcgaccgatcccacgagaggaaccgcgaccgagacagagatcgggaacgcgacagggaccgcgaccgggatcgggacagagagagagaccgcgaccgagatcgagaccgcgatcgggacagagagagggatcgcgacagagaacgcgaccgtgatagagatagagaagggcctttccggagatccgactccttccctgagcggagagcccctagaaagggtaacactttatatgtttacggcgaagacatgacccctactcttctcagaggcgcatttagcccatttgggaacattattgatttgtcgatggatcctccgagaaactgcgcctttgtaacttacgagaagatggagagcgctgatcaggctgtggctgagctaaatgggacccaggtcgaatccgtccaactgaaggtaaacatagctagaaagcagccgatgcttgacgctgcatag

SEQ ID NO: 289184 - DNA, 723 bp, Artificial Sequence
  derived and/or modified sequence
atgttagtcattccacctgggctctccgaggaagaggaggctctccagaagaagttcaataagttaaagaagaaaaagaaggccctgttagcattaaagaaacagagtagctcttcaacaacctcccaagggggtgttaaaaggagcctcagtgagcaacccgttatggacaccgcaaccgccacagaacaagctaagcagctggtcaaatccggggctatctcggctattaaggcagagacaaagaactctgggttcaagaggtcacggaccctcgaaggaaagctcaaagatcctgagaagggtcctgtccctactttccagccgttccagcggagcatttccgccgatgatgatttgcaggaaagctctagaaggccgcagcggaagagtttatatgaaagtgatcgtctgcgggaactggggcctgacggcgaagaagccgaggggccaggcgctggagatggaccgcctcggtcattcgattggggttacgaggaacgatccggcgctcattcatccgctagccccccaaggtctcgatctcgcgatagaagccacgaacggaatcgtgacagagaccgcgacagggagcgcgatcgggacagagatagggatcgggacagagagcgcgaccgggatagggatagagaccgtgacagggatcgggagcgagatcgtgacagggagagagatagggaccgagacagggagggcccttag

SEQ ID NO: 289185 - DNA, 1005 bp, Artificial Sequence
  derived and/or modified sequence
atgctcgttatcccacctggcctgtcagaggaggaggaagcactccaaaaaaagtttaacaagctgaaaaagaaaaagaaggcgctactggctctgaaaaaacagagtagctcatctacaacaagtcagggcggagttaaacgatcattgagtgaacagccagttatggacactgcgaccgcaacggagcaggctaaacaactcgtaaaaagcggagctatttcagctatcaaagcagagacaaagaactctgggtttaagcggtcacggactctcgaaggcaaactgaaagatcctgaaaaagggccagtgcctactttccaaccttttcaacggagcatctcagccgacgatgacctccaggaaagctccaggagaccccagagaaagagcctctacgagtctgatagactgcgcgagctcggtcctgacggggaagaagccgaaggcccaggagccggagacgggccacccagatccttcgactggggctatgaagagagaagcggagctcattcatctgcttccccccctcgctcacgatctcgtgacagaagccatgaaaggaaccgcgatcgagatcgcgaccgcgagcgagacagagaccgagatcgagatagggatcgcgagcgggatcgcgaccgcgacagagatagagaccgcgacagggagcgcgatagagatagggagcgggaccgagacagggaccgtgaggggcctttccgcaggtccgactcttttccagagcgacgcgctccacgcaaagggaataccttatatgtgtatggagaggacatgacccctaccttgcttagaggagcctttagcccttttggaaatattatcgatctttcaatggatcccccacggaactgtgcctttgtgacttatgaaaagatggagtcggctgaccaggccgtagctgaactgaatggtacccaggtagagtctgttcaactgaaagtcaacatagccaggaagcaacctatgctcgacgccgcttag

SEQ ID NO: 289186 - DNA, 1005 bp, Artificial Sequence
  derived and/or modified sequence
atgctcgtgattccacctggactgagcgaggaagaggaggccctgcaaaaaaagttcaacaagcttaagaagaaaaagaaagcccttctggcacttaaaaagcagtcaagtagtagtacaacgtctcagggtggcgtcaagcgttctctgagcgaacagcccgttatggacaccgcaactgccaccgagcaggctaagcagctggtgaaaagtggggctatctccgcaattaaagcggagactaagaatagtggtttcaagcgttccagaaccttggagggaaagctgaaggaccccgagaagggtccagtccccactttccagccctttcagagaagcatttcagcagatgatgacctccaggaatcgagtcgcagacctcagcgcaagtcgctgtatgagagcgataggctgcgggaattggggccagacggggaagaagcagaaggcccaggcgctggggatgggcctcctcgatctttcgattggggatatgaggagcgctcaggggcacatagtagcgctagcccaccgcgaagtagaagtcgcgacaggagccacgagcggaatagagatagagaccgggaccgggaacgagatagggatcgcgaccgggacagggacagagagcgcgatcgagaccgtgacagggatcgagatagggacagggaacgcgatcgagatcgggagagggatagagaccgtgacagagaggggcctttcagaaggtccgacagtttcccggagcgaagggcaccacggaaggggaatactctttatgtgtatggtgaagacatgacccccacgttgctgcgcggtgccttttcccctttcggcaatataattgatctctcaatggacccacctcggaattgcgcttttgttacgtacgaaaagatggaatctgctgatcaggcagtggctgagctgaatggcactcaggttgagtcagttcagctgaaggttaatatcgcccgaaagcagcccatgcttgacgcagcatag

SEQ ID NO: 289187 - DNA, 1005 bp, Artificial Sequence
  derived and/or modified sequence
atgctggtcatccctcctggtctctccgaggaagaggaagcattgcagaaaaagtttaataaacttaaaaagaagaaaaaggctctgctggctctgaaaaagcagagcagcagcagcaccacgagtcagggaggcgtgaaacgcagtctgtccgagcagcccgttatggatacggcgacggctacagaacaggctaagcagttggtcaaatccggcgctatcagcgccataaaggctgaaactaagaacagcggctttaaacggtcacgtacactcgagggcaaactgaaggaccctgagaaagggccagttcccacattccaaccattccagcgtagcatttcggctgacgatgacctccaggagagttcacgaaggccccagcgaaagtcgctctatgaatccgatagactcagagagctgggacccgatggcgaggaagccgaggggccaggcgctggagatggcccacctaggagcttcgactggggatatgaagagagatctggtgcccactcctccgcaagccctccacgttcccgatcccgagacaggtcacacgagcggaaccgagacagggaccgggatagggaaagagatagagaccgagacagagacagagatagagagagagaccgcgacagagaccgggacagggaccgcgacagagagcgcgacagggatcgtgaaagggaccgcgaccgggacagggagggaccattcaggcgttctgactcctttcccgagaggagggcaccaagaaagggcaacaccctctacgtgtatggcgaggatatgacaccaactttgcttcggggtgcctttagtccttttggtaatatcattgatttatcgatggacccacctcgaaattgcgcctttgtcacttacgaaaaaatggagagcgccgaccaggcagtcgcagagctgaatggcactcaggtagaatctgttcagcttaaagtcaacatcgctcggaaacaacctatgttagatgccgcttag

SEQ ID NO: 289188 - DNA, 1053 bp, Artificial Sequence
  derived and/or modified sequence
atgttagtgatccctccaggattgagcgaggaggaggaggcattacagaagaaatttaataagctgaagaaaaagaaaaaagctctgctcgctttgaaaaaacagagcagttcaagtaccacctcccagggaggtgtgaaacgctcactctctgagcagcctgtgatggatactgccaccgccaccgagcaggcaaagcagctcgtgaagtcaggagcaatcagcgctattaaggctgagaccaagaacagcggtttcaaaagatccaggaccctggagggaaaattaaaagacccggaaaaaggcccagttccaacattccagccctttcaaagatccatcagcgccgacgatgatttacaggaaagcagcaggcgtccccagcgcaagagcctttacgagtccttcgactggggctacgaggagagatctggggcacactcctctgcttctcctccacgcagtaggtctagggacaggtcacatgaacgaaaccgagatcgggaccgcgatagggagcgcgacagagatagagatagggatcgggatcgcgagcgcgacagagatcgagatcgcgacagagatagggatcgcgagcgggacagggatagagaaagagatagagacagggatagagaaggcccatttcgcaggagtgattcatttcccgagaggcgggctccgagaaaaggcaacacactgtatgtgtatggagaagatatgacacccactctccttcggggagccttttcaccctttgggaacatcattgacctgagtatggatccacccaggaactgtgcctttgtcacctatgaaaaaatggagtccgccgatcaggccgtagccgagctgaatggtacgcaggtggagtctgtccagctcaaagtcaatattgcgaggaaacagcctatgctagacgcagccacaggaaagagcgtgtggggtagcctggccgtgcagaacagccctaaagggtgtcatagagacaaacggacccagatagtgtacagcgatgacgtctataaagaaaatctcgttgacgggttctag

SEQ ID NO: 289189 - DNA, 723 bp, Artificial Sequence
  derived and/or modified sequence
atgttggtgattcctcccggtctttctgaagaggaagaggcattacagaagaagttcaacaaacttaagaaaaagaagaaagccctgctcgcactcaaaaaacaatcgagcagcagcacaacgtcccaaggaggtgtcaaacggtctctctccgaacaaccagtaatggacactgcaacagcaactgagcaggctaagcagctggtaaaatctggcgcaattagtgctattaaggctgaaaccaaaaattcaggtttcaagagatccagaacactcgaaggcaagctcaaagatcctgagaagggtcctgttccaacgtttcagcctttccagcggagtatttccgccgatgacgacttacaggagtcaagtaggagaccacagcggaaatctctatatgagagcgatcgactcagagagctgggaccggacggggaggaggcggaaggcccaggggctggcgatgggcctcctagaagtttcgactgggggtacgaggagagatccggcgcacacagttctgcttctccgccacgatcacgaagcagggatcgctctcatgaacgcaatagggaccgggatcgggatagggagcgcgatcgagatagagacagggatagggatagagagagagaccgtgatcgggatagagacagagatcgagacagggagagggaccgagaccgtgaaagggaccgggaccgggaccgggagggtccctag

SEQ ID NO: 289190 - DNA, 1005 bp, Artificial Sequence
  derived and/or modified sequence
atgctggtgattccacctgggctctcggaggaggaggaggccctgcaaaagaagtttaataagttaaaaaaaaaaaaaaaggcactgttagcccttaaaaaacagtcatcaagtagcactaccagccagggaggggtaaagaggtccttgtcggaacagcctgtaatggacaccgcgactgcaactgaacaggccaaacagttggttaaaagtggggctatctccgcaatcaaggctgagaccaaaaactctgggttcaagagaagccgtaccctggaaggtaagctgaaagaccctgagaaaggtccggttcctaccttccaaccttttcagcggagcatcagtgccgacgacgacttacaggagtcaagtcgccgaccacagagaaaatcactgtacgagagcgatcgcctgcgggagttaggcccagacggggaagaggcagagggacccggagccggtgacgggccacccagatcttttgactggggctacgaggagaggagcggggcacactcttccgcctctccaccaaggtcaaggagtagagaccggtcacacgaaaggaatagagatagggatcgagaccgggaacgggaccgcgatagggaccgagaccgagacagggagcgagacagggaccgggatcgggatagagaccgggacagggagcgtgatcgggatcgcgaacgcgaccgagacagagacagagagggccctttcagacgcagtgactccttcccagaaaggagggcgcctaggaaagggaatacgctgtacgtgtacggggaagacatgacgcccaccctgttacggggagctttctctccttttggaaatattattgatttgtcaatggacccacctcgtaattgtgccttcgtgacatacgaaaagatggagtcagcagaccaggctgtcgcggagctaaacggcacacaagtggagtccgtgcagctgaaggttaacatagccagaaagcagccgatgttggacgcagcctag

SEQ ID NO: 289191 - DNA, 723 bp, Artificial Sequence
  derived and/or modified sequence
atgctggtgatccctccgggactcagtgaggaggaagaggccctgcagaagaaatttaacaagctgaagaaaaaaaagaaggcattactcgccctcaaaaagcagagcagcagcagtactacctcccagggaggggtcaagaggtcgctgtctgagcagccggtgatggacactgcaaccgcgacggagcaggctaaacagttggtcaaatctggggcaatcagcgctattaaggcggaaaccaagaatagtggattcaagcgatcccgtaccctagaaggcaaattgaaagacccagagaagggcccagtgccaacattccagcccttccaaagatctattagtgctgacgacgatttacaggagtcctcccgcaggccccagcggaaaagtctgtatgagtctgacaggctgcgcgagctgggtcccgatggtgaggaagcggaggggcctggagccggagacggtccaccaagaagtttcgactgggggtacgaagagaggtccggcgcacatagttctgcatcccctccacgttcaaggtccagggacagaagccacgaacgaaatcgagaccgtgaccgggatcgtgaacgggacagggaccgcgatcgggatagggaccgggaacgtgacagagaccgcgatcgggatcgcgatagagatcgggaaagagatcgggaccgcgagagggacagagatcgggatcgggaggggccatag

SEQ ID NO: 289192 - DNA, 723 bp, Artificial Sequence
  derived and/or modified sequence
atgctggtgatcccccccggcctgagcgaggaggaggaggccctgcagaagaagttcaacaagctgaagaagaagaagaaggccctgctggccctgaagaagcagagcagcagcagcaccaccagccagggcggcgtgaagagaagcctgagcgagcagcccgtgatggacaccgccaccgccaccgagcaggccaagcagctggtgaagagcggcgccatcagcgccatcaaggccgagaccaagaacagcggcttcaagagaagcagaaccctggagggcaagctgaaggaccccgagaagggccccgtgcccaccttccagcccttccagagaagcatcagcgccgacgacgacctgcaggagagcagcagaagaccccagagaaagagcctgtacgagagcgacagactgagagagctgggccccgacggcgaggaggccgagggccccggcgccggcgacggcccccccagaagcttcgactggggctacgaggagagaagcggcgcccacagcagcgccagcccccccagaagcagaagcagagacagaagccacgagagaaacagagacagagacagagacagagagagagacagagacagagacagagacagagacagagagagagacagagacagagacagagacagagacagagacagagagagagacagagacagagagagagacagagacagagacagagagggcccctag

SEQ ID NO: 289193 - DNA, 1005 bp, Artificial Sequence
  derived and/or modified sequence
atgctggtgatcccccccggcctgagcgaggaggaggaggccctgcagaagaagttcaacaagctgaagaagaagaagaaggccctgctggccctgaagaagcagagcagcagcagcaccaccagccagggcggcgtgaagagaagcctgagcgagcagcccgtgatggacaccgccaccgccaccgagcaggccaagcagctggtgaagagcggcgccatcagcgccatcaaggccgagaccaagaacagcggcttcaagagaagcagaaccctggagggcaagctgaaggaccccgagaagggccccgtgcccaccttccagcccttccagagaagcatcagcgccgacgacgacctgcaggagagcagcagaagaccccagagaaagagcctgtacgagagcgacagactgagagagctgggccccgacggcgaggaggccgagggccccggcgccggcgacggcccccccagaagcttcgactggggctacgaggagagaagcggcgcccacagcagcgccagcccccccagaagcagaagcagagacagaagccacgagagaaacagagacagagacagagacagagagagagacagagacagagacagagacagagacagagagagagacagagacagagacagagacagagacagagacagagagagagacagagacagagagagagacagagacagagacagagagggccccttcagaagaagcgacagcttccccgagagaagagcccccagaaagggcaacaccctgtacgtgtacggcgaggacatgacccccaccctgctgagaggcgccttcagccccttcggcaacatcatcgacctgagcatggacccccccagaaactgcgccttcgtgacctacgagaagatggagagcgccgaccaggccgtggccgagctgaacggcacccaggtggagagcgtgcagctgaaggtgaacatcgccagaaagcagcccatgctggacgccgcctag

SEQ ID NO: 289194 - DNA, 1053 bp, Artificial Sequence
  derived and/or modified sequence
atgctggtgatcccccccggcctgagcgaggaggaggaggccctgcagaagaagttcaacaagctgaagaagaagaagaaggccctgctggccctgaagaagcagagcagcagcagcaccaccagccagggcggcgtgaagagaagcctgagcgagcagcccgtgatggacaccgccaccgccaccgagcaggccaagcagctggtgaagagcggcgccatcagcgccatcaaggccgagaccaagaacagcggcttcaagagaagcagaaccctggagggcaagctgaaggaccccgagaagggccccgtgcccaccttccagcccttccagagaagcatcagcgccgacgacgacctgcaggagagcagcagaagaccccagagaaagagcctgtacgagagcttcgactggggctacgaggagagaagcggcgcccacagcagcgccagcccccccagaagcagaagcagagacagaagccacgagagaaacagagacagagacagagacagagagagagacagagacagagacagagacagagacagagagagagacagagacagagacagagacagagacagagacagagagagagacagagacagagagagagacagagacagagacagagagggccccttcagaagaagcgacagcttccccgagagaagagcccccagaaagggcaacaccctgtacgtgtacggcgaggacatgacccccaccctgctgagaggcgccttcagccccttcggcaacatcatcgacctgagcatggacccccccagaaactgcgccttcgtgacctacgagaagatggagagcgccgaccaggccgtggccgagctgaacggcacccaggtggagagcgtgcagctgaaggtgaacatcgccagaaagcagcccatgctggacgccgccaccggcaagagcgtgtggggcagcctggccgtgcagaacagccccaagggctgccacagagacaagagaacccagatcgtgtacagcgacgacgtgtacaaggagaacctggtggacggcttctag

SEQ ID NO: 289195 - protein, 73 aa, Artificial Sequence
  derived and/or modified sequence
MLSRNDVKRLERSWHLLSWSQAQGSSEQELHYASLQRLPVPSSEGPDLRGRDKRGTKEDPRADYACIAENKPT

SEQ ID NO: 289196 - protein, 91 aa, Artificial Sequence
  derived and/or modified sequence
MIYVSTGAWGWAGSCFWQWSFCPPACVGCIEEHLLSWSQAQGSSEQELHYASLQRLPVPSSEGPDLRGRDKRGTKEDPRADYACIAENKPT

SEQ ID NO: 289197 - DNA, 222 bp, Artificial Sequence
  derived and/or modified sequence
atgcttagccggaatgacgtgaagcgcctggaaagatcctggcacttactttcatggtcccaggcccaggggagcagcgaacaggagcttcactatgcttcccttcaaaggctgcctgtgccttcaagcgaggggcccgacttgcgaggtcgggataaaagaggaacgaaagaagatccaagggccgactacgcttgcatcgccgagaataagcctacatag

SEQ ID NO: 289198 - DNA, 276 bp, Artificial Sequence
  derived and/or modified sequence
atgatttatgtgtcgaccggcgcttggggctgggcaggcagttgtttctggcagtggtctttttgtccccccgcttgtgtaggttgtatcgaagagcacttgctctcgtggtcgcaggcccaaggttcctctgaacaagagctccactacgcttccctgcagagactgcccgtccccagcagcgaaggaccggatctgaggggacgtgacaaacgcggaaccaaagaggaccctagagcggattatgcttgcattgctgagaacaagcctacatag

SEQ ID NO: 289199 - DNA, 222 bp, Artificial Sequence
  derived and/or modified sequence
atgctgagcagaaatgatgttaaacggttagaacgctcatggcacttactgtcatggtcccaggcccaagggtctagcgagcaggaattgcactacgccagtctgcaaagactcccggttccatcctccgaagggccagaccttcgcggtagagataaaagaggtactaaagaagatccgcgggccgactacgcatgtatcgccgaaaataaacctacatag

SEQ ID NO: 289200 - DNA, 222 bp, Artificial Sequence
  derived and/or modified sequence
atgcttagccgaaatgatgtgaaaagactcgagcgttcgtggcacctgctgtcttggtcccaagcccagggcagctctgagcaagagctgcattacgcctcactccagaggctgcctgttccgtcctccgaagggcccgacctccgaggacgggataagcgaggaaccaaggaggacccaagggctgattatgcttgtatcgctgaaaacaaaccgacttag

SEQ ID NO: 289201 - DNA, 222 bp, Artificial Sequence
  derived and/or modified sequence
atgttgagcaggaacgatgtgaaaaggctggagagatcgtggcatctgttgagttggtcacaggcccaggggagctccgagcaggagctgcactatgcctcactgcaaaggttaccggtcccatcctctgagggccctgacctgcggggacgggacaaacgcggtacaaaagaagaccctagagctgactatgcctgcatagctgaaaataaaccaacatag

SEQ ID NO: 289202 - DNA, 222 bp, Artificial Sequence
  derived and/or modified sequence
atgcttagtaggaatgatgtgaaaaggttggaaagatcttggcacctgctctcctggagtcaggctcagggctcatctgagcaggagcttcattatgcaagcctccaacgactgccggtccctagctcagaaggccccgaccttagaggtagagataagcgagggaccaaggaggaccctcgcgcagattacgcctgcatcgccgagaataaacccacatag

SEQ ID NO: 289203 - DNA, 222 bp, Artificial Sequence
  derived and/or modified sequence
atgctttcaagaaatgacgtcaagcgtttagaaagaagctggcatctgttgtcctggtcacaggcacagggaagcagtgagcaggaactgcattacgccagtctccaaaggctgcctgtcccctcgtcagaagggcccgacttgaggggccgggataaacggggcacgaaagaggatcctcgcgctgattatgcatgtatcgccgaaaataagccaacatag

SEQ ID NO: 289204 - DNA, 222 bp, Artificial Sequence
  derived and/or modified sequence
atgctatcaagaaacgacgtgaaaagactggagcggtcctggcacctgctgtcatggtcccaagcgcagggcagctccgagcaggagttgcactacgcctcgctccagagactgcccgtgccctcctccgagggaccagaccttcgcgggagagacaagcgagggactaaggaagacccgagagcggactatgcctgcattgccgagaacaagccaacgtag

SEQ ID NO: 289205 - DNA, 222 bp, Artificial Sequence
  derived and/or modified sequence
atgctgagtaggaacgatgtcaaacgtctggaacgctcatggcaccttctgagttggtctcaggctcagggatctagtgaacaggagctacactacgccagtcttcagcgtctgccagttcccagttccgagggccccgatctgagaggacgtgacaagcgaggcacaaaagaggatccacgcgcagattacgcctgcattgccgaaaataagcctacttag

SEQ ID NO: 289206 - DNA, 276 bp, Artificial Sequence
  derived and/or modified sequence
atgatctacgtgagcacgggagcctggggctgggccggctcttgtttctggcagtggagcttttgtcctcccgcgtgcgttgggtgcatcgaagaacacctgctgtcatggtcccaggcacagggcagctcagaacaggagctgcactatgcaagcttgcagagacttccagtgccgtcatcggagggccctgatctgaggggccgagataagagaggtacgaaagaggacccacgggccgactacgcctgcatcgcagagaacaaaccaacctag

SEQ ID NO: 289207 - DNA, 276 bp, Artificial Sequence
  derived and/or modified sequence
atgatctacgtgtctacaggagcttgggggtgggctggaagttgcttttggcaatggagcttttgtccaccagcctgtgtcggctgtattgaagagcatctgctcagctggtcccaggcacagggctcatctgagcaggagctccactatgcctcgctgcagcgcctgccagtgccttcttccgaaggtccagatctgcgaggacgcgacaaacgcgggacaaaggaagacccccgggctgactacgcctgtatagccgagaacaagcctacatag

SEQ ID NO: 289208 - DNA, 276 bp, Artificial Sequence
  derived and/or modified sequence
atgatttatgtgtccacaggagcctgggggtgggctggatcctgcttctggcagtggtcattctgccctcctgcctgcgtgggctgtatagaggagcatctgttaagctggtctcaggcacaaggatcttccgagcaggaactgcactacgcgagcctccaacgcctcccagtgccaagctcagaagggcctgacctacggggacgcgacaagagaggtacaaaggaggaccctcgagcagactatgcatgcattgccgagaataaacctacctag

SEQ ID NO: 289209 - DNA, 276 bp, Artificial Sequence
  derived and/or modified sequence
atgatctatgtgagtacgggggcctggggttgggcaggcagctgtttttggcagtggagcttttgtccacccgcttgcgtgggctgtattgaggaacatctgcttagctggagccaggctcaggggtccagtgaacaggagctccactacgccagtctccagcgtctgccagtccctagctcagagggccctgatttgcgaggccgagataagcggggtaccaaggaagatcccagagctgattatgcttgcatagccgaaaacaaacccacctag

SEQ ID NO: 289210 - DNA, 276 bp, Artificial Sequence
  derived and/or modified sequence
atgatttacgtgagcacaggagcctggggctgggcgggcagttgcttttggcagtggagcttctgtccccccgcgtgtgtcggctgtattgaagaacacttgctgagttggtcacaggcccagggctccagtgagcaggagctgcattacgcttccctgcagagactgccagtcccctcctccgagggaccagacttaagaggccgagataagcggggaaccaaggaagatcctcgagcggactacgcgtgcatagccgagaataagcccacatag

SEQ ID NO: 289211 - DNA, 276 bp, Artificial Sequence
  derived and/or modified sequence
atgatctatgtatcgacaggcgcgtggggctgggctgggtcctgtttctggcagtggagcttctgcccacctgcttgtgtgggctgcattgaggaacatcttttgtcctggagccaggcacagggcagcagcgaacaggagctgcattacgcttctctgcagcggctgcccgtcccgtctagtgagggacccgacttgcgcggacgcgacaagagaggcaccaaagaagatccaagggccgattatgcatgcatcgctgagaataagcctacatag

SEQ ID NO: 289212 - DNA, 276 bp, Artificial Sequence
  derived and/or modified sequence
atgatctatgtgagtaccggcgcatggggctgggctggttcctgtttttggcagtggagcttttgtcctcctgcttgtgtaggatgcatcgaggaacacctgctcagctggtcacaagcacagggcagtagtgagcaggagctgcactacgcctctctacaacgactccctgttccatcttctgagggacctgatttacggggcagagacaagagaggcaccaaggaggaccctcgtgcggattatgcctgcattgccgaaaataagcccacctag

SEQ ID NO: 289213 - DNA, 222 bp, Artificial Sequence
  derived and/or modified sequence
atgctgagcagaaatgatgtgaagaggctggagaggtcctggcacctgctgtcctggagccaggcccagggcagcagcgagcaggagctgcactacgccagcctgcagaggctgcctgtgcccagcagcgagggccctgacctgcggggccgggacaagaggggcaccaaggaggaccccagggctgactatgcctgcatcgccgagaacaagcccacctag

SEQ ID NO: 289214 - DNA, 276 bp, Artificial Sequence
  derived and/or modified sequence
atgatctacgtgtccactggagcctggggctgggccggcagctgcttctggcagtggagcttctgccccccagcctgtgtgggctgcatcgaggagcacctgctgtcctggagccaggcccagggcagcagcgagcaggagctgcactacgccagcctgcagaggctgcctgtgcccagcagcgagggccctgacctgcggggccgggacaagaggggcaccaaggaggaccccagggctgactatgcctgcatcgccgagaacaagcccacctag

SEQ ID NO: 289215 - DNA, 624 bp, Artificial Sequence
  derived and/or modified sequence
gggattagcagtgaggaatgatgaggaacttgaggcaagtcaccagcccctgatcatttcgcctaaaagagcaaggactagagttcctgacctccaggccagtccctgatccctgacctaatgttatcgcggaatgatgatatatgtatctacgggggcctggggctgggcgggctcctgcttctggcagtggtccttctgtccgcctgcctgtgttggctgcatcgaagaggcccagggctcctcagagcaggaactccactatgcatctctgcagaggctgccagtgcccagcagtgagggacctgacctcaggggcagagacaagagaggcaccaaggaggatccaagagctgactatgcctgcattgctgagaacaaacccacctgagcaccccagacaccttcctcaacccaggcgggtggacagggtccccctgtggtccagccagtaaaaaccatggtccccccacttctgtgtctcagtcctctcagtccatctcgagcctccgttcaaattgatcatcatcaaaacttatgtggctttttgacctttgaatagggaattttttaaattttttaaaaattaaaataaaaaaaacacatggctcacccttccaccca

SEQ ID NO: 289216 - DNA, 635 bp, Artificial Sequence
  derived and/or modified sequence
acttcagccctagcagcatctgcctgtgggaagcagctctccacaccagccaagggggcccccacactcccgcgctgctctgcggctcagggagcagcccacctgctggatgaggaacttgaggcaagtcaccagcccctgatcatttcgcctaaaagagcaaggactagagttcctgacctccaggccagtccctgatccctgacctaatgttatcgcggaatgatgatatatgtatctacgggggcctggggctgggcgggctcctgcttctggcagtggtccttctgtccgcctgcctgtgttggctgcatcgaagagcaccttctgtcctggtcccaggcccagggctcctcagagcaggaactccactatgcatctctgcagaggctgccagtgcccagcagtgagggacctgacctcaggggcagagacaagagaggcaccaaggaggatccaagagctgactatgcctgcattgctgagaacaaacccacctgagcaccccagacaccttcctcaacccaggcgggtggacagggtccccctgtggtccagccagtaaaaaccatggtccccccacttctgtgtctcagtcctctcagtccatctcgagcctccgttcaaattgatca

SEQ ID NO: 289217 - DNA, 554 bp, Artificial Sequence
  derived and/or modified sequence
atgaggaacttgaggcaagtcaccagcccctgatcatttcgcctaaaagagcaaggactagagttcctgacctccaggccagtccctgatccctgacctaatgttatcgcggaatgatgtaaagaggctggagaggagctggcaccttctgtcctggtcccaggcccagggctcctcagagcaggaactccactatgcatctctgcagaggctgccagtgcccagcagtgagggacctgacctcaggggcagagacaagagaggcaccaaggaggatccaagagctgactatgcctgcattgctgagaacaaacccacctgagcaccccagacaccttcctcaacccaggcgggtggacagggtccccctgtggtccagccagtaaaaaccatggtccccccacttctgtgtctcagtcctctcagtccatctcgagcctccgttcaaattgatcatcatcaaaacttatgtggctttttgacctttgaatagggaattttttaaattttttaaaaattaaaataaaaaaaacacatggctcacccttccaccc

SEQ ID NO: 289218 - DNA, 285 bp, Artificial Sequence
  derived and/or modified sequence
atgaggaacttgaggcaagtcaccagcccctgatcatttcgcctaaaagagcaaggactagagttcctgacctccaggccagtccctgatccctgacctaatgttatcgcggaatgatgcaccttctgtcctggtcccaggcccagggctcctcagagcaggaactccactatgcatctctgcagaggctgccagtgcccagcagtgagggacctgacctcaggggcagagacaagagaggcaccaaggaggatccaagagctgactatgcctgcattgctgaga

SEQ ID NO: 289219 - DNA, 345 bp, Artificial Sequence
  derived and/or modified sequence
gctggggaggaacccaggctgggggagaagttaaagccagaggaggggcaggaatgtctgaggtggcaacacttctcttcagccagacagcactggccagtttggagtctgtccatcctgcaggccacaagctctggatgaggaacttgaggcaagtcaccagcccctgatcatttcgcctaaaagagcaaggactagagttcctgacctccaggccagtccctgatccctgacctaatgttatcgcggaatgatgcaccttctgtcctggtcccaggcccagggctcctcagagcaggaactccactatgcatctctgcagaggctgccagtgcccagcagtga

SEQ ID NO: 289220 - DNA, 624 bp, Artificial Sequence
  derived and/or modified sequence
atgaggaacttgaggcaagtcaccagcccctgatcatttcgcctaaaagagcaaggactagagttcctgacctccaggccagtccctgatccctgacctaatgttatcgcggaatgatgatatatgtatctacgggggcctggggctgggcgggctcctgcttctggcagtggtccttctgtccgcctgcctgtgttggctgcatcgaagagcaccttctgtcctggtcccaggcccagggctcctcagagcaggaactccactatgcatctctgcagaggctgccagtgcccagcagtgagggacctgacctcaggggcagagacaagagaggcaccaaggaggatccaagagctgactatgcctgcattgctgagaacaaacccacctgagcaccccagacaccttcctcaacccaggcgggtggacagggtccccctgtggtccagccagtaaaaaccatggtccccccacttctgtgtctcagtcctctcagtccatctcgagcctccgttcaaattgatcatcatcaaaacttatgtggctttttgacctttgaatagggaattttttaaattttttaaaaattaaaataaaaaaaacacatggctcacccttccaccc

SEQ ID NO: 289221 - DNA, 555 bp, Artificial Sequence
  derived and/or modified sequence
atgaggaacttgaggcaagtcaccagcccctgatcatttcgcctaaaagagcaaggactagagttcctgacctccaggccagtccctgatccctgacctaatgttatcgcggaatgatgtaaagaggctggagaggagctggcaccttctgtcctggtcccaggcccagggctcctcagagcaggaactccactatgcatctctgcagaggctgccagtgcccagcagtgagggacctgacctcaggggcagagacaagagaggcaccaaggaggatccaagagctgactatgcctgcattgctgagaacaaacccacctgagcaccccagacaccttcctcaacccaggcgggtggacagggtccccctgtggtccagccagtaaaaaccatggtccccccacttctgtgtctcagtcctctcagtccatctcgagcctccgttcaaattgatcatcatcaaaacttatgtggctttttgacctttgaatagggaattttttaaattttttaaaaattaaaataaaaaaaacacatggctcacccttccaccca

SEQ ID NO: 289222 - DNA, 532 bp, Artificial Sequence
  derived and/or modified sequence
atgaggaacttgaggcaagtcaccagcccctgatcatttcgcctaaaagagcaaggactagagttcctgacctccaggccagtccctgatccctgacctaatgttatcgcggaatgatgcaccttctgtcctggtcccaggcccagggctcctcagagcaggaactccactatgcatctctgcagaggctgccagtgcccagcagtgagggacctgacctcaggggcagagacaagagaggcaccaaggaggatccaagagctgactatgcctgcattgctgagaacaaacccacctgagcaccccagacaccttcctcaacccaggcgggtggacagggtccccctgtggtccagccagtaaaaaccatggtccccccacttctgtgtctcagtcctctcagtccatctcgagcctccgttcaaattgatcatcatcaaaacttatgtggctttttgacctttgaatagggaattttttaaattttttaaaaattaaaataaaaaaaacacatggctcacccttccaccca

SEQ ID NO: 289223 - DNA, 734 bp, Artificial Sequence
  derived and/or modified sequence
acttcagccctagcagcatctgcctgtgggaagcagctctccacaccagccaagggggcccccacactcccgcgctgctctgcggctcagggagcagcccacctgctggatgaggaacttgaggcaagtcaccagcccctgatcatttcgcctaaaagagcaaggactagagttcctgacctccaggccagtccctgatccctgacctaatgttatcgcggaatgatgatatatgtatctacgggggcctggggctgggcgggctcctgcttctggcagtggtccttctgtccgcctgcctgtgttggctgcatcgaagagcaccttctgtcctggtcccaggcccagggctcctcagagcaggaactccactatgcatctctgcagaggctgccagtgcccagcagtgagggacctgacctcaggggcagagacaagagaggcaccaaggaggatccaagagctgactatgcctgcattgctgagaacaaacccacctgagcaccccagacaccttcctcaacccaggcgggtggacagggtccccctgtggtccagccagtaaaaaccatggtccccccacttctgtgtctcagtcctctcagtccatctcgagcctccgttcaaattgatcatcatcaaaacttatgtggctttttgacctttgaatagggaattttttaaattttttaaaaattaaaataaaaaaaacacatggctcacccttccaccca

SEQ ID NO: 289224 - DNA, 532 bp, Artificial Sequence
  derived and/or modified sequence
atgaggaacttgaggcaagtcaccagcccctgatcatttcgcctaaaagagcaaggactagagttcctgacctccaggccagtccctgatccctgacctaatgttatcgcggaatgatgcaccttctgtcctggtcccaggcccagggctcctcagagcaggaactccactatgcatctctgcagaggctgccagtgcccagcagtgagggacctgacctcaggggcagagacaagagaggcaccaaggaggatccaagagctgactatgcctgcattgctgagaacaaacccacctgagcaccccagacaccttcctcaacccaggcgggtggacagggtccccctgtggtccagccagtaaaaaccatggtccccccacttctgtgtctcagtcctctcagtccatctcgagcctccgttcaaaatgatcatcatcaaaacttatgtggctttttgacctttgaatagggaattttttaaattttttaaaaattaaaataaaaaaaacacatggctcacccttccaccca

SEQ ID NO: 289225 - DNA, 734 bp, Artificial Sequence
  derived and/or modified sequence
acttcagccctagcagcatctgcctgtgggaagcagctctccacaccagccaagggggcccccacactcccgcgctgctctgcggctcagggagcagcccacctgctggatgaggaacttgaggcaagtcaccagcccctgatcatttcgcctaaaagagcaaggactagagttcctgacctccaggccagtccctgatccctgacctaatgttatcgcggaatgatgatatatgtatctacgggggcctggggctgggcgggctcctgcttctggcagtggtccttctgtccgcctgcctgtgttggctgcatcgaagagcaccttctgtcctggtcccaggcccagggctcctcagagcaggaactccactatgcatctctgcagaggctgccagtgcccagcagtgagggacctgacctcaggggcagagacaagagaggcaccaaggaggatccaagagctgactatgcctgcattgctgagaacaaacccacctgagcaccccagacaccttcctcaacccaggcgggtggacagggtccccctgtggtccagccagtaaaaaccatggtccccccacttctgtgtctcagtcctctcagtccatctcgagcctccgttcaaaatgatcatcatcaaaacttatgtggctttttgacctttgaatagggaattttttaaattttttaaaaattaaaataaaaaaaacacatggctcacccttccaccca

SEQ ID NO: 289226 - DNA, 624 bp, Artificial Sequence
  derived and/or modified sequence
gggattagcagtgaggaatgatgaggaacttgaggcaagtcaccagcccctgatcatttcgcctaaaagagcaaggactagagttcctgacctccaggccagtccctgatccctgacctaatgttatcgcggaatgatgatatatgtatctacgggggcctggggctgggcgggctcctgcttctggcagtggtccttctgtccgcctgcctgtgttggctgcatcgaagaggcccagggctcctcagagcaggaactccactatgcatctctgcagaggctgccagtgcccagcagtgagggacctgacctcaggggcagagacaagagaggcaccaaggaggatccaagagctgactatgcctgcattgctgagaacaaacccacctgagcaccccagacaccttcctcaacccaggcgggtggacagggtccccctgtggtccagccagtaaaaaccatggtccccccacttctgtgtctcagtcctctcagtccatctcgagcctccgttcaaaatgatcatcatcaaaacttatgtggctttttgacctttgaatagggaattttttaaattttttaaaaattaaaattaaaaaaacacatggctcacccttccaccca

SEQ ID NO: 289227 - DNA, 532 bp, Artificial Sequence
  derived and/or modified sequence
atgaggaacttgaggcaagtcaccagcccctgatcatttcgcctaaaagagcaaggactagagttcctgacctccaggccagtccctgatccctgacctaatgttatcgcggaatgatgcaccttctgtcctggtcccaggcccagggctcctcagagcaggaactccactatgcatctctgcagaggctgccagtgcccagcagtgagggacctgacctcaggggcagagacaagagaggcaccaaggaggatccaagagctgactatgcctgcattgctgagaacaaacccacctgagcaccccagacaccttcctcaacccaggcgggtggacagggtccccctgtggtccagccagtaaaaaccatggtccccccacttctgtgtctcagtcctctcagtccatctcgagcctccgttcaaaatgatcatcatcaaaacttatgtggctttttgacctttgaatagggaattttttaaattttttaaaaattaaaattaaaaaaacacatggctcacccttccaccca

SEQ ID NO: 289228 - DNA, 555 bp, Artificial Sequence
  derived and/or modified sequence
atgaggaacttgaggcaagtcaccagcccctgatcatttcgcctaaaagagcaaggactagagttcctgacctccaggccagtccctgatccctgacctaatgttatcgcggaatgatgtaaagaggctggagaggagctggcaccttctgtcctggtcccaggcccagggctcctcagagcaggaactccactatgcatctctgcagaggctgccagtgcccagcagtgagggacctgacctcaggggcagagacaagagaggcaccaaggaggatccaagagctgactatgcctgcattgctgagaacaaacccacctgagcaccccagacaccttcctcaacccaggcgggtggacagggtccccctgtggtccagccagtaaaaaccatggtccccccacttctgtgtctcagtcctctcagtccatctcgagcctccgttcaaaatgatcatcatcaaaacttatgtggctttttgacctttgaatagggaattttttaaattttttaaaaattaaaattaaaaaaacacatggctcacccttccaccca

SEQ ID NO: 289229 - DNA, 624 bp, Artificial Sequence
  derived and/or modified sequence
gggattagcagtgaggaatgatgaggaacttgaggcaagtcaccagcccctgatcatttcgcctaaaagagcaaggactagagttcctgacctccaggccagtccctgatccctgacctaatgttatcgcggaatgatgatatatgtatctacgggggcctggggctgggcgggctcctgcttctggcagtggtccttctgtccgcctgcctgtgttggctgcatcgaagaggcccagggctcctcagagcaggaactccactatgcatctctgcagaggctgccagtgcccagcagtgagggacctgacctcaggggcagagacaagagaggcaccaaggaggatccaagagctgactatgcctgcattgctgagaacaaacccacctgagcaccccagacaccttcctcaacccaggcgggtggacagggtccccctgtggtccagccagtaaaaaccatggtccccccacttctgtgtctcagtcctctcagtccatctcgagcctccgttcaaaatgatcatcatcaaaacttatgtggctttttgacctttgaatagggaattttttaaattttttaaaaattaaaataaaaaaaacacatggctcacccttccaccca

SEQ ID NO: 289230 - DNA, 734 bp, Artificial Sequence
  derived and/or modified sequence
acttcagccctagcagcatctgcctgtgggaagcagctctccacaccagccaagggggcccccacactcccgcgctgctctgcggctcagggagcagcccacctgctggatgaggaacttgaggcaagtcaccagcccctgatcatttcgcctaaaagagcaaggactagagttcctgacctccaggccagtccctgatccctgacctaatgttatcgcggaatgatgatatatgtatctacgggggcctggggctgggcgggctcctgcttctggcagtggtccttctgtccgcctgcctgtgttggctgcatcgaagagcaccttctgtcctggtcccaggcccagggctcctcagagcaggaactccactatgcatctctgcagaggctgccagtgcccagcagtgagggacctgacctcaggggcagagacaagagaggcaccaaggaggatccaagagctgactatgcctgcattgctgagaacaaacccacctgagcaccccagacaccttcctcaacccaggcgggtggacagggtccccctgtggtccagccagtaaaaaccatggtccccccacttctgtgtctcagtcctctcagtccatctcgagcctccgttcaaaatgatcatcatcaaaacttatgtggctttttgacctttgaatagggaattttttaaattttttaaaaattaaaattaaaaaaacacatggctcacccttccaccca

SEQ ID NO: 289231 - DNA, 555 bp, Artificial Sequence
  derived and/or modified sequence
atgaggaacttgaggcaagtcaccagcccctgatcatttcgcctaaaagagcaaggactagagttcctgacctccaggccagtccctgatccctgacctaatgttatcgcggaatgatgtaaagaggctggagaggagctggcaccttctgtcctggtcccaggcccagggctcctcagagcaggaactccactatgcatctctgcagaggctgccagtgcccagcagtgagggacctgacctcaggggcagagacaagagaggcaccaaggaggatccaagagctgactatgcctgcattgctgagaacaaacccacctgagcaccccagacaccttcctcaacccaggcgggtggacagggtccccctgtggtccagccagtaaaaaccatggtccccccacttctgtgtctcagtcctctcagtccatctcgagcctccgttcaaaatgatcatcatcaaaacttatgtggctttttgacctttgaatagggaattttttaaattttttaaaaattaaaataaaaaaaacacatggctcacccttccaccca

SEQ ID NO: 289232 - DNA, 624 bp, Artificial Sequence
  derived and/or modified sequence
atgaggaacttgaggcaagtcaccagcccctgatcatttcgcctaaaagagcaaggactagagttcctgacctccaggccagtccctgatccctgacctaatgttatcgcggaatgatgatatatgtatctacgggggcctggggctgggcgggctcctgcttctggcagtggtccttctgtccgcctgcctgtgttggctgcatcgaagagcaccttctgtcctggtcccaggcccagggctcctcagagcaggaactccactatgcatctctgcagaggctgccagtgcccagcagtgagggacctgacctcaggggcagagacaagagaggcaccaaggaggatccaagagctgactatgcctgcattgctgagaacaaacccacctgagcaccccagacaccttcctcaacccaggcgggtggacagggtccccctgtggtccagccagtaaaaaccatggtccccccacttctgtgtctcagtcctctcagtccatctcgagcctccgttcaaaatgatcatcatcaaaacttatgtggctttttgacctttgaatagggaattttttaaattttttaaaaattaaaataaaaaaaacacatggctcacccttccaccc

SEQ ID NO: 289233 - DNA, 624 bp, Artificial Sequence
  derived and/or modified sequence
atgaggaacttgaggcaagtcaccagcccctgatcatttcgcctaaaagagcaaggactagagttcctgacctccaggccagtccctgatccctgacctaatgttatcgcggaatgatgatatatgtatctacgggggcctggggctgggcgggctcctgcttctggcagtggtccttctgtccgcctgcctgtgttggctgcatcgaagagcaccttctgtcctggtcccaggcccagggctcctcagagcaggaactccactatgcatctctgcagaggctgccagtgcccagcagtgagggacctgacctcaggggcagagacaagagaggcaccaaggaggatccaagagctgactatgcctgcattgctgagaacaaacccacctgagcaccccagacaccttcctcaacccaggcgggtggacagggtccccctgtggtccagccagtaaaaaccatggtccccccacttctgtgtctcagtcctctcagtccatctcgagcctccgttcaaaatgatcatcatcaaaacttatgtggctttttgacctttgaatagggaattttttaaattttttaaaaattaaaattaaaaaaacacatggctcacccttccaccc

SEQ ID NO: 289234 - DNA, 222 bp, Artificial Sequence
  derived and/or modified sequence
atgctgagccggaacgacgtgaagcggctggagcggagctggcacctcttaagttggtcccaagctcagggcagcagcgaacaggaactccactacgcctctctgcagcgcctgcctgtcccttcctcagaaggtcctgatctgagaggacgggataaacggggaactaaggaggatccacgagccgattacgcatgcatcgccgagaacaaacccacgtag

SEQ ID NO: 289235 - DNA, 276 bp, Artificial Sequence
  derived and/or modified sequence
atgatctacgtgagcaccggcgcctggggctgggccggcagctgcttttggcagtggtccttttgtccgcctgcctgtgtgggatgcattgaggaacatctgctctcttggagccaagcccaagggtcctccgagcaggagctgcactatgcctccctccagagactccccgttcctagtagcgaaggacctgacctccgtggccgagacaaaaggggcactaaggaggacccaagagctgattacgcatgcatcgccgaaaacaaacctacgtag

SEQ ID NO: 289236 - DNA, 222 bp, Artificial Sequence
  derived and/or modified sequence
atgctgagccggaacgacgtgaagcggctggagcggagctggcacctgctgagctggtcacaagcgcagggatcaagtgaacaggaactgcattatgcctctttgcagcgtttgccagtaccttctagcgaaggacctgatcttcgaggaagggacaaacgcgggaccaaggaggacccaagagctgattatgcctgtatcgcggaaaacaagccaacctag

SEQ ID NO: 289237 - DNA, 222 bp, Artificial Sequence
  derived and/or modified sequence
atgctgagccggaacgacgtgaagcggctggagcggagctggcacctcctgtcatggtcacaggcccaaggctcctcagaacaggagctgcactatgcatccctccagagactgcccgtcccctcatcggagggacctgatttacgcggccgcgataagagagggaccaaggaggacccgcgggctgattacgcttgtatcgcagagaacaagcccacttag

SEQ ID NO: 289238 - DNA, 222 bp, Artificial Sequence
  derived and/or modified sequence
atgctgagccggaacgacgtgaagcggctggagcggagctggcacctcctgagctggtcacaggcccaaggcagtagtgagcaggagctgcattatgcctccctgcagagactgccagtgccgagcagcgagggcccggatttaagggggcgcgacaaacggggaacaaaggaggacccaagggccgattacgcttgcatcgctgaaaacaagcccacttag

SEQ ID NO: 289239 - DNA, 222 bp, Artificial Sequence
  derived and/or modified sequence
atgctgagccggaacgacgtgaagcggctggagcggagctggcaccttctaagttggagtcaggcccaagggtcatcggaacaagaactccattatgctagcctgcagagactgcctgtgcctagcagcgaaggtccagacttaagaggccgtgacaaacgcgggacgaaagaagatccaagggctgattatgcttgcattgcagaaaataagccaacatag

SEQ ID NO: 289240 - DNA, 222 bp, Artificial Sequence
  derived and/or modified sequence
atgctgagccggaacgacgtgaagcggctggagcggagctggcacctcctgagctggagtcaggcccagggatcctctgaacaggaactgcattacgcaagtctccagcgtctccccgtcccatcaagcgaaggccccgacctgcgggggagagataagagaggaaccaaagaagacccgcgcgctgattatgcttgcattgccgagaataagccgacatag

SEQ ID NO: 289241 - DNA, 222 bp, Artificial Sequence
  derived and/or modified sequence
atgctgagccggaacgacgtgaagcggctggagcggagctggcacctcctcagctggagccaagcacaaggcagttcagaacaggagctccactatgcttcccttcagcgcttaccggtgccatcttccgaagggcctgatctaagaggtcgcgataagcggggaaccaaagaagatcctagagcagattatgcatgcatagccgagaataaaccaacgtag

SEQ ID NO: 289242 - DNA, 222 bp, Artificial Sequence
  derived and/or modified sequence
atgctgagccggaacgacgtgaagcggctggagcggagctggcacctgttgagctggtcgcaggcgcagggaagttcagagcaggagctgcactacgccagcctgcagcgcctgcctgtcccaagtagtgaaggcccggatctgcgaggcagagacaaacgtggaaccaaagaggacccacgcgcagattatgcctgtattgcagagaacaagcccacatag

SEQ ID NO: 289243 - DNA, 276 bp, Artificial Sequence
  derived and/or modified sequence
atgatctacgtgagcaccggcgcctggggctgggccggcagctgcttctggcagtggtctttttgccctcccgcatgtgtgggctgcattgaagagcacctgctaagctggtctcaggcccagggatcaagtgagcaggaactgcattacgcctccctccagcgattaccggtcccctcatccgagggaccggacttgcgaggcagagataaaagagggactaaggaggaccccagggcagactacgcatgtattgccgaaaataaacctacatag

SEQ ID NO: 289244 - DNA, 276 bp, Artificial Sequence
  derived and/or modified sequence
atgatctacgtgagcaccggcgcctggggctgggccggcagctgcttttggcaatggtcattctgtcctccagcctgcgtgggatgtatcgaagaacacctgctgagctggagtcaggcacaaggttcgagtgaacaagagctacattatgcctctctccagcgcttgcctgtcccttcctccgaggggcccgacctgcgcggtcgggacaagcgtggaacaaaagaggacccacgggctgattacgcttgtatcgctgaaaacaagccgacctag

SEQ ID NO: 289245 - DNA, 276 bp, Artificial Sequence
  derived and/or modified sequence
atgatctacgtgagcaccggcgcctggggctgggccggcagctgcttttggcagtggtctttctgtcccccggcatgcgtgggctgcattgaggaacaccttttgagctggagtcaggcccaggggagttcggagcaagaactccattacgccagcttgcaacggcttccagtgccctcaagtgagggcccagatctgaggggacgcgataagcgcggcacgaaagaggatcctcgcgctgattacgcttgcatagccgagaataaacctacttag

SEQ ID NO: 289246 - DNA, 276 bp, Artificial Sequence
  derived and/or modified sequence
atgatctacgtgagcaccggcgcctggggctgggccggcagctgcttctggcagtggtctttctgtccgcccgcatgcgtgggctgcattgaagaacacctcctgtcttggagtcaagcccaagggtcatctgagcaggaactgcactatgcaagtttgcaaaggcttcctgtgccctcctcagaggggcccgatctgagaggccgagataaaagggggacgaaggaagacccgagggccgattatgcatgtatcgccgagaacaaacccacctag

SEQ ID NO: 289247 - DNA, 276 bp, Artificial Sequence
  derived and/or modified sequence
atgatctacgtgagcaccggcgcctggggctgggccggcagctgcttttggcaatggtccttctgccctcccgcttgtgtggggtgcattgaggagcacctcctgtcctggtcacaagcacagggcagctctgagcaggaacttcactatgcgtcactgcagagattgcccgttcctagctcagagggcccggatctccgcgggagagataagcgagggaccaaagaggatcccagagccgactatgcctgcatcgctgaaaacaaacctacctag

SEQ ID NO: 289248 - DNA, 276 bp, Artificial Sequence
  derived and/or modified sequence
atgatctacgtgagcaccggcgcctggggctgggccggcagctgcttctggcaatggagtttctgtccgcctgcctgtgtcgggtgcatcgaggaacacctgctgagttggtcacaggcccaaggaagcagtgaacaggaattacactatgccagtctccagagattaccagtcccaagctctgaagggcccgatttgcgcggccgggacaaacgcggaacgaaggaagaccccagggccgattacgcctgtatagccgaaaataagccgacctag

SEQ ID NO: 289249 - DNA, 276 bp, Artificial Sequence
  derived and/or modified sequence
atgatctacgtgagcaccggcgcctggggctgggccggcagctgcttttggcagtggagtttttgtccgcctgcctgcgtcggatgcattgaggagcacttgttaagctggtcccaggcacaggggtcttctgaacaggaactgcattacgcctcattgcaacgactgcccgtcccttcgagtgagggacctgacctgagaggcagggacaagagagggactaaagaggaccctcgggctgactatgcatgtatcgccgagaataagccgacttag

SEQ ID NO: 289250 - DNA, 222 bp, Artificial Sequence
  derived and/or modified sequence
atgctgtcccgaaacgatgtgaaaagactggagagaagctggcatctgctgtcctggagtcaggcccagggttcttccgagcaggaactacactacgcctcactgcagagattgcccgtgccttccagcgagggacctgatctgcgtgggagggataagagaggtacaaaggaggatccccgtgctgactatgcatgtatcgccgagaacaaacctacctag

SEQ ID NO: 289251 - DNA, 276 bp, Artificial Sequence
  derived and/or modified sequence
atgatatatgtaagcactggagcctgggggtgggcaggcagctgtttttggcagtggtccttttgtccccctgcctgtgtgggctgcatagaggagcacctgctgagttggtcacaggcccagggatcctccgagcaggaattgcattacgcctcactgcagcgcctccccgtgccctcttctgaggggccagatctgagggggcgtgataaaaggggaactaaagaggaccctcgggcagactacgcatgtatcgccgagaacaaaccaacatag

SEQ ID NO: 289252 - DNA, 222 bp, Artificial Sequence
  derived and/or modified sequence
atgctttctcgcaacgacgtgaaaagactggagcggtcttggcacctcctatcttggagccaggcccagggttcatcggagcaggaactgcactacgcttcattgcagcggctcccggtccctagtagcgaaggtccggacctccgcggtcgtgataaacgagggacgaaagaagatcctcgagcggattatgcttgcatcgccgaaaataaacccacgtag

SEQ ID NO: 289253 - DNA, 222 bp, Artificial Sequence
  derived and/or modified sequence
atgttgtcaaggaacgacgtcaagcgactggagcggtcttggcacctgctctcctggtcccaggctcagggctcaagcgaacaggagctgcattatgctagccttcagagactgcccgtgccttcgagtgagggtcctgatcttaggggcagggacaagagaggaaccaaggaagaccctcgcgcagactacgcatgtatcgccgagaataaaccaacttag

SEQ ID NO: 289254 - DNA, 222 bp, Artificial Sequence
  derived and/or modified sequence
atgctgtcccgaaacgacgttaaaaggcttgagcgatcctggcatctgttgagttggtctcaggcacagggatccagtgaacaggaactccactacgcctcattacagcgcctgcccgtgccaagctccgaggggccagacttacggggaagagacaagaggggaactaaggaagaccctagggccgattacgcttgtatagccgagaacaagcccacctag

SEQ ID NO: 289255 - DNA, 222 bp, Artificial Sequence
  derived and/or modified sequence
atgctctccagaaacgacgtgaaaaggctggaacgcagttggcacctcctaagttggtcacaggcccaaggctctagcgagcaggagctgcactatgcatccttgcagcggctcccggttccatcttctgagggcccagatctgagaggtcgcgataagcgaggcactaaagaggacccccgagctgactacgcctgtatcgctgagaacaaacccacctag

SEQ ID NO: 289256 - DNA, 222 bp, Artificial Sequence
  derived and/or modified sequence
atgctgagtaggaatgacgtcaagcggttggagcggtcctggcacctgctcagctggtcgcaggcccagggaagttccgagcaagaactgcattacgctagccttcagcgcttgccagtgccctccagcgaaggtcctgaccttcgcggtagggacaaaaggggaaccaaggaggatccaagagctgactatgcatgcattgcggaaaacaaaccgacctag

SEQ ID NO: 289257 - DNA, 222 bp, Artificial Sequence
  derived and/or modified sequence
atgctaagccgaaatgacgtgaagcgcttagagaggtcttggcatctgctgtcgtggagtcaggctcaagggtcttcggagcaggagttgcattatgccagcctgcagagactgccagtgcctagtagcgaggggccagacctgagaggaagagataagcgcggtactaaagaggacccaagggctgattacgcttgtattgcggagaacaagcccacatag

SEQ ID NO: 289258 - DNA, 222 bp, Artificial Sequence
  derived and/or modified sequence
atgctgagcaggaacgatgtgaaacggttagagaggtcctggcacctcctgtcatggtcacaggctcagggatcttcagaacaggagcttcattatgctagcctgcagaggctgcccgtacctagcagcgagggtccagatctgagagggagggacaagcgaggaacaaaagaagacccacgggctgattacgcctgtattgccgagaacaagcctacttag

SEQ ID NO: 289259 - DNA, 276 bp, Artificial Sequence
  derived and/or modified sequence
atgatttacgtgtctacaggtgcctggggctgggccggaagttgcttttggcagtggagcttctgccctcccgcatgtgtcggatgcatcgaggaacatctcttaagttggtcacaggcccaggggtctagcgagcaggaacttcattacgccagtctgcaaaggttgcctgtacctagctccgaaggacccgatctccggggtcgggacaagcgaggcaccaaagaggacccacgcgctgactatgcgtgtattgccgaaaacaaacccacatag

SEQ ID NO: 289260 - DNA, 276 bp, Artificial Sequence
  derived and/or modified sequence
atgatttacgtcagtacaggcgcatggggatgggcaggatcctgtttctggcagtggagcttctgtccacccgcatgcgttggctgcattgaggaacacctactgtcttggagtcaagcacaggggtcttccgagcaggagcttcactatgcatcactgcagcgtctacctgtgccctcttcggaaggaccagacctcagaggtagagataaacggggtaccaaagaagatcccagggctgattacgcctgtatcgcagagaacaaacccacctag

SEQ ID NO: 289261 - DNA, 276 bp, Artificial Sequence
  derived and/or modified sequence
atgatctacgtgtccactggcgcatggggctgggcgggaagctgtttctggcaatggtcattctgtcctccagcttgcgtcgggtgtatcgaagaacaccttctgtcctggtctcaggctcaggggtcaagcgagcaagaactgcactacgcttctctccagagattgccagttccaagttctgaaggacctgatctccggggaagagacaagaggggcaccaaggaggatccgcgtgctgactacgcctgtatagccgagaacaagcctacctag

SEQ ID NO: 289262 - DNA, 276 bp, Artificial Sequence
  derived and/or modified sequence
atgatctacgtctctactggcgcttggggttgggcagggtcctgtttctggcagtggtccttctgtcctccagcatgtgtagggtgcattgaggaacacctcttgtcctggagccaggcccaaggttccagcgaacaagagctgcattatgccagtctccagagattaccggtgccttctagcgaagggcctgatttaagaggacgcgataagcgtggtacaaaggaggatcccagagccgactacgcttgcatcgcggaaaataaacctacgtag

SEQ ID NO: 289263 - DNA, 276 bp, Artificial Sequence
  derived and/or modified sequence
atgatctacgtgagcaccggagcctggggatgggctggctcctgcttttggcaatggagtttctgtccgccagcctgtgtcggatgtattgaggaacacctactgtcctggtcacaagcgcaaggctcgtctgagcaggagctacactatgcctccctgcagcggttgccagtaccttctagcgaggggcctgacctgcgtggtagagacaagcggggaacaaaagaagacccaagagctgattatgcatgcattgcagagaacaagcccacttag

SEQ ID NO: 289264 - DNA, 276 bp, Artificial Sequence
  derived and/or modified sequence
atgatctacgtatctaccggtgcctggggatgggctggttcatgcttttggcagtggtcgttttgtcccccagcctgtgtaggctgtattgaagagcacctcctgagctggtcacaagctcagggctcctccgaacaagagttgcactacgcttccctgcagcggttacctgtaccaagtagcgaaggcccagatctgcgaggtagagacaaaagagggacgaaggaggacccaagggccgactatgcttgtatcgcggagaacaagcccacatag

SEQ ID NO: 289265 - DNA, 276 bp, Artificial Sequence
  derived and/or modified sequence
atgatctacgtgtcaacgggggcatggggttgggctggctcctgcttctggcagtggagtttctgcccccctgcatgcgtgggttgcattgaggaacacctgttgtcatggtcccaggcccaaggctcttctgagcaggagctacactacgccagcctgcaaaggctcccggttcctagctctgagggcccagaccttagggggagggataagagggggacaaaagaggacccaagagctgactacgcatgtattgccgaaaacaaacccacttag

SEQ ID NO: 289266 - DNA, 222 bp, Artificial Sequence
  derived and/or modified sequence
atgctgagcagaaacgacgtgaagagactggagagaagctggcacctgctgagctggagccaggcccagggcagcagcgagcaggagctgcactacgccagcctgcagagactgcccgtgcccagcagcgagggccccgacctgagaggcagagacaagagaggcaccaaggaggaccccagagccgactacgcctgcatcgccgagaacaagcccacctag

SEQ ID NO: 289267 - DNA, 276 bp, Artificial Sequence
  derived and/or modified sequence
atgatctacgtgagcaccggcgcctggggctgggccggcagctgcttctggcagtggagcttctgcccccccgcctgcgtgggctgcatcgaggagcacctgctgagctggagccaggcccagggcagcagcgagcaggagctgcactacgccagcctgcagagactgcccgtgcccagcagcgagggccccgacctgagaggcagagacaagagaggcaccaaggaggaccccagagccgactacgcctgcatcgccgagaacaagcccacctag

SEQ ID NO: 289268 - protein, 59 aa, Artificial Sequence
  derived and/or modified sequence
MLSRNDDICIYGGLGLGGLLLLAVVLLSACLCWLHRRGPGLLRAGTPLCISAEAASAQQ

SEQ ID NO: 289269 - protein, 44 aa, Artificial Sequence
  derived and/or modified sequence
MLSRNDDICIYGGLGLGGLLLLAVVLLSACLCWLHRREAASAQQ

SEQ ID NO: 289270 - protein, 28 aa, Artificial Sequence
  derived and/or modified sequence
MLSRNDGPGLLRAGTPLCISAEAASAQQ

SEQ ID NO: 289271 - protein, 43 aa, Artificial Sequence
  derived and/or modified sequence
  misc_feature (1)..(1): Xaa can be any naturally occurring amino acid
XSRNDDICIYGGLGLGGLLLLAVVLLSACLCWLHRREAASAQQ

SEQ ID NO: 289272 - DNA, 180 bp, Artificial Sequence
  derived and/or modified sequence
atgctgagcagaaatgacgacatttgtatctacgggggccttggtttaggcgggctcctgctgctggctgtggtactcctgtccgcctgcctttgctggttgcataggagaggccctggcctcttgcgcgcaggaactccgctatgtattagcgccgaggccgcctccgcacagcagtag

SEQ ID NO: 289273 - DNA, 135 bp, Artificial Sequence
  derived and/or modified sequence
atgctgagcagaaatgacgacatctgtatctatggaggactcggcttggggggcctactgttgctggccgttgttcttctgagcgcgtgtctctgttggctccacagacgagaggccgctagcgcccaacagtag

SEQ ID NO: 289274 - DNA, 180 bp, Artificial Sequence
  derived and/or modified sequence
atgttgtcgagaaatgacgatatttgtatttacgggggcttgggactcgggggcctgctgctactggctgtcgtacttctgtccgcctgtctgtgttggctccatagacgcggacccggcctgctgcgagccggcaccccactttgcatcagcgccgaggcagcatcagctcagcagtag

SEQ ID NO: 289275 - DNA, 87 bp, Artificial Sequence
  derived and/or modified sequence
atgctgtctaggaacgatggcccaggtctgctgcgcgccgggaccccgctgtgtatctcggcagaagccgcatcggcgcagcaatag

SEQ ID NO: 289276 - DNA, 87 bp, Artificial Sequence
  derived and/or modified sequence
atgctcagcaggaacgacggcccaggtttactgcgagcaggtacccccctatgcatatccgcagaagctgctagcgcccagcagtag

SEQ ID NO: 289277 - DNA, 87 bp, Artificial Sequence
  derived and/or modified sequence
atgctcagcagaaacgacgggcctggcctcctacgcgccgggacccccctttgcattagcgccgaggccgcgtcggcccagcagtag

SEQ ID NO: 289278 - DNA, 87 bp, Artificial Sequence
  derived and/or modified sequence
atgctctcccgcaacgatgggccggggttgttaagagccggcacaccgctttgtatctcagccgaagctgcctcggcacagcaatag

SEQ ID NO: 289279 - DNA, 132 bp, Artificial Sequence
  derived and/or modified sequence
tatcgcggaatgatgatctacgtttcaacgggtgcctggggctgggctgggtcatgtttctggcagtggagcttttgcccaccagcgtgcgttgggtgtattgaggaacggctgccagtgccaagcagctag

SEQ ID NO: 289280 - DNA, 111 bp, Artificial Sequence
  derived and/or modified sequence
atgctatctagaaatgacgacatctgcatttatggggggctggggttgggtggactattgctgttagccgtcgtcctactgagtgcttgcctgtgttggctgcatagatag

SEQ ID NO: 289281 - DNA, 87 bp, Artificial Sequence
  derived and/or modified sequence
atgctgtcgaggaacgatggcccagggctgttacgagccggaacgccgctgtgtatctcggccgaggccgcatccgctcaacagtag

SEQ ID NO: 289282 - DNA, 87 bp, Artificial Sequence
  derived and/or modified sequence
atgctttcgcgaaacgatggccctggcttactccgggccggaacacccctttgcatttctgcagaagccgctagtgcacaacaatag

SEQ ID NO: 289283 - DNA, 87 bp, Artificial Sequence
  derived and/or modified sequence
atgctaagtcgtaacgatggtccaggcctcctgagggccgggacccctctctgcattagtgctgaggctgccagtgcacagcaatag

SEQ ID NO: 289284 - DNA, 141 bp, Artificial Sequence
  derived and/or modified sequence
atgctctctcgcaatgatgatatatgcatttacggaggcttaggacttggcggtctgctactcctggccgtggtcttgctgtcggcttgcttatgctggctccatagacgcgagcactgccttgcccttgagccactctag

SEQ ID NO: 289285 - DNA, 87 bp, Artificial Sequence
  derived and/or modified sequence
atgctgagccgaaatgacgggcctgggctgctaagagcagggactcccctctgtatctcggcggaggcagcctctgcccagcaatag

SEQ ID NO: 289286 - DNA, 180 bp, Artificial Sequence
  derived and/or modified sequence
atgctgtcgagaaatgacgatatctgcatctacggtgggttgggactgggcggactcttgctgctggcagtggtcctgttatcagcctgtctatgctggctgcaccgaagggggccaggactccttcgtgccggaaccccactgtgcatcagtgccgaagctgctagcgctcaacagtag

SEQ ID NO: 289287 - DNA, 87 bp, Artificial Sequence
  derived and/or modified sequence
atgctcagtaggaatgacggacccgggctgctgagggccggaacccctctatgtatttccgctgaggctgcctctgcccagcagtag

SEQ ID NO: 289288 - DNA, 180 bp, Artificial Sequence
  derived and/or modified sequence
atgctcagtaggaacgatgacatttgtatctatggcggactcggactggggggcttgctgctgctcgccgtcgtcttgttgtccgcctgtctatgttggctgcaccgccggggtcccgggctgctgagagcagggacacctctatgtatttccgctgaggcagctagcgcacaacagtag

SEQ ID NO: 289289 - DNA, 141 bp, Artificial Sequence
  derived and/or modified sequence
atgctttcgcgtaatgacgatatatgcatttacggggggctgggattaggagggctactgttgcttgcggtggtgctgttatctgcttgcctatgctggctgcaccgtcgcgaacattgcttagccctagaacccctttag

SEQ ID NO: 289290 - DNA, 87 bp, Artificial Sequence
  derived and/or modified sequence
atgctgagtagaaatgacggcccgggcttactgcgcgcgggcactccattgtgcatctctgccgaggccgcttccgctcagcagtag

SEQ ID NO: 289291 - DNA, 87 bp, Artificial Sequence
  derived and/or modified sequence
atgcttagcagaaatgatggcccgggcctgctccgagccggtaccccactctgcatttcggcagaggctgcttcggctcaacagtag

SEQ ID NO: 289292 - DNA, 87 bp, Artificial Sequence
  derived and/or modified sequence
atgctgagtcgcaacgatggccccgggctcctgcgggctggaacgcctttgtgcatttctgcagaagccgcgtcggcgcagcaatag

SEQ ID NO: 289293 - DNA, 111 bp, Artificial Sequence
  derived and/or modified sequence
atgctctcgcgaaacgacgacatctgcatttacggcggcctcggtctgggcggactgctgctgcttgcagtggtcctattaagtgcttgcctgtgttggctgcatcgatag

SEQ ID NO: 289294 - DNA, 180 bp, Artificial Sequence
  derived and/or modified sequence
atgctgtccagaaatgacgatatatgtatctacgggggtctcgggctgggaggcctgctgttactagctgtggttctcttgagtgcgtgtttatgttggctccacaggaggggccctggtttgcttcgcgcggggacccccttgtgcatttctgctgaagccgcctccgcgcaacagtag

SEQ ID NO: 289295 - DNA, 87 bp, Artificial Sequence
  derived and/or modified sequence
atgctgagcagaaacgacggacctggactgctgcgggccggcactcctctctgcatcagcgctgaggcggcctccgcccagcaatag

SEQ ID NO: 289296 - DNA, 180 bp, Artificial Sequence
  derived and/or modified sequence
atgcttagtaggaatgatgacatctgtatctatggcggactgggactgggagggttgctgctgctcgcagttgtgttgctgagcgcatgtctgtgctggctgcatagaagaggccctggcctcctgagagccgggaccccactgtgcatcagcgccgaagcggccagcgctcaacagtag

SEQ ID NO: 289297 - DNA, 87 bp, Artificial Sequence
  derived and/or modified sequence
atgcttagccgcaatgatggaccaggcctgctgcgggctggcacccccctgtgcatctctgctgaggccgccagcgctcaacagtag

SEQ ID NO: 289298 - DNA, 132 bp, Artificial Sequence
  derived and/or modified sequence
tagtcaaggaacgacgacatatgcatctacggaggcctaggtctcggagggctgctgctgctggctgtcgttttactgagtgcttgcctctgctggctccaccgccgagaagctgccagcgcccagcagtag

SEQ ID NO: 289299 - DNA, 111 bp, Artificial Sequence
  derived and/or modified sequence
atgttaagccggaatgatgacatatgcatctacggaggcctcgggctgggcggactgttgctccttgctgtggttctcctctctgcgtgtctttgctggctgcaccggtag

SEQ ID NO: 289300 - DNA, 111 bp, Artificial Sequence
  derived and/or modified sequence
atgttatcacgcaatgacgacatctgtatctatggaggactgggcctagggggtctcctgttgctagcagttgttctgctgtctgcatgcctgtgttggctgcaccgttag

SEQ ID NO: 289301 - DNA, 87 bp, Artificial Sequence
  derived and/or modified sequence
atgctgtctcggaatgacggcccaggcttgctacgtgctggtactccactctgtataagcgcagaagctgcttccgcccagcagtag

SEQ ID NO: 289302 - DNA, 111 bp, Artificial Sequence
  derived and/or modified sequence
atgctctctcgtaacgacgatatttgcatttatgggggcttaggactcgggggactgctcctgctggctgtggtgctcctgtcagcttgtctttgctggctgcacaggtag

SEQ ID NO: 289303 - DNA, 111 bp, Artificial Sequence
  derived and/or modified sequence
atgctttcacggaacgacgacatctgcatttacggtgggctcgggctcggcggtcttctcctactcgcggtcgtactgctgtcagcctgcctctgttggcttcacaggtag

SEQ ID NO: 289304 - DNA, 87 bp, Artificial Sequence
  derived and/or modified sequence
atgctgagcaggaatgatgggcccggccttttgcgggcaggcacacctctgtgcatctccgcagaagccgcctcagctcagcaatag

SEQ ID NO: 289305 - DNA, 141 bp, Artificial Sequence
  derived and/or modified sequence
atgctctcccgaaatgatgacatctgcatctatggcggcttgggtctggggggcctgctgctgcttgctgtggtgctgctgagcgcgtgtctatgctggctgcaccgaagggaacactgtcttgcgcttgaacccctttag

SEQ ID NO: 289306 - DNA, 141 bp, Artificial Sequence
  derived and/or modified sequence
atgctgtctcggaacgacgacatatgtatttacggtggccttggcctcggaggcctgctgctgctcgcagttgtgctcctttccgcctgtctttgttggttacatcgtcgtgagcattgtctggcactagagcctttgtag

SEQ ID NO: 289307 - DNA, 141 bp, Artificial Sequence
  derived and/or modified sequence
atgttgagcagaaacgacgacatatgcatatacggcgggctggggctcggaggcctgcttctgttggccgtggtcttgctgtcagcttgcctctgttggctgcacagacgcgagcactgtcttgccctggagccgttgtag

SEQ ID NO: 289308 - DNA, 87 bp, Artificial Sequence
  derived and/or modified sequence
atgctctctcgcaatgatggacccggactgttacgggccgggaccccactctgcatcagtgccgaggctgcatccgcacagcagtag

SEQ ID NO: 289309 - DNA, 180 bp, Artificial Sequence
  derived and/or modified sequence
atgctgtccagaaacgatgacatctgtatctacggtggtctagggttgggcgggctcctgttactcgcagtggtattgctatccgcttgcctctgttggctgcataggcgcggccccggactgttgcgagcaggaacaccactgtgcatatcagccgaggccgctagcgcacagcagtag

SEQ ID NO: 289310 - DNA, 87 bp, Artificial Sequence
  derived and/or modified sequence
atgctgtctagaaatgacgggccaggtctgctgcgggcggggactcccctttgtatcagcgctgaggctgcttcggcgcaacagtag

SEQ ID NO: 289311 - DNA, 111 bp, Artificial Sequence
  derived and/or modified sequence
atgctgagccggaacgatgacatttgcatttacggcggcctaggcctaggtgggctgcttctcctagcagtggtactactctccgcatgtctttgctggctgcataggtag

SEQ ID NO: 289312 - DNA, 87 bp, Artificial Sequence
  derived and/or modified sequence
atgctctcaagaaatgacggccctggtttgttacgggccggtacgcccctgtgcatctcggccgaggcagcttccgcacagcaatag

SEQ ID NO: 289313 - DNA, 87 bp, Artificial Sequence
  derived and/or modified sequence
atgctgtctcgtaatgatggccccggactgctgagggccggaacacctctctgcatcagcgcagaggccgcttcagcacagcagtag

SEQ ID NO: 289314 - DNA, 180 bp, Artificial Sequence
  derived and/or modified sequence
atgctgagcagaaatgacgacatttgtatctatggaggactgggcctgggaggactgctgcttctggctgtggtgctcttgtcagcctgcctctgctggttgcacagacgcgggcccggcctgctgagggcaggaacaccactgtgtatctccgcagaggccgcatccgcccaacagtag

SEQ ID NO: 289315 - DNA, 87 bp, Artificial Sequence
  derived and/or modified sequence
atgctttccagaaacgatgggcccgggctgttacgcgccggtactcctctctgcatctccgctgaagccgcctccgcacagcagtag

SEQ ID NO: 289316 - DNA, 111 bp, Artificial Sequence
  derived and/or modified sequence
atgctctctagaaacgatgacatttgtatctatgggggtctggggctaggcgggctgctgctgttggcggtagtgctgctcagtgcctgcttgtgctggttgcaccgctag

SEQ ID NO: 289317 - DNA, 87 bp, Artificial Sequence
  derived and/or modified sequence
atgctgtctcgaaatgacgggccaggccttctgagggccggcacccccctgtgtatatctgccgaggcagcgtccgctcagcagtag

SEQ ID NO: 289318 - DNA, 87 bp, Artificial Sequence
  derived and/or modified sequence
atgctgtctcggaatgacggacccggtctgttgcgtgctggaacacctctctgtatttccgcagaggcagctagcgcacagcagtag

SEQ ID NO: 289319 - DNA, 87 bp, Artificial Sequence
  derived and/or modified sequence
atgttgtcaagaaatgacgggccaggactcttgcgcgcagggacacctctctgcatctctgccgaagctgcctccgcccagcagtag

SEQ ID NO: 289320 - DNA, 87 bp, Artificial Sequence
  derived and/or modified sequence
atgttatctagaaatgatggtccgggcctgctgcgcgccggcacaccactatgcatctctgctgaggccgcgagtgcccagcaatag

SEQ ID NO: 289321 - DNA, 87 bp, Artificial Sequence
  derived and/or modified sequence
atgttatctcggaatgatggacccggactgctgagagccggcacaccactttgcatctccgctgaggcagcatcagcccagcagtag

SEQ ID NO: 289322 - DNA, 87 bp, Artificial Sequence
  derived and/or modified sequence
atgctgagccggaacgacgggcccggacttctgagggcaggtactcctttatgtatttccgctgaagccgcaagcgcccagcagtag

SEQ ID NO: 289323 - DNA, 87 bp, Artificial Sequence
  derived and/or modified sequence
atgctatcacggaatgacggtcctgggctgttgcgcgcgggaacacctttgtgcatcagcgctgaagccgcatctgcacaacagtag

SEQ ID NO: 289324 - DNA, 132 bp, Artificial Sequence
  derived and/or modified sequence
tatcgcggcatgatgatatatgtatctactggtgcctgggggtgggccggcagttgcttttggcagtggagtttctgtccccccgcctgcgtagggtgcatcgaggaacggttacctgtgccatcttcctag

SEQ ID NO: 289325 - DNA, 180 bp, Artificial Sequence
  derived and/or modified sequence
atgctgagcagaaatgatgacatctgcatctatggaggcctgggcctgggcggcctgctgctgctggccgtggtgctgctgagcgcctgcctgtgctggctgcaccggcggggccctggcctgctgcgggccggcacccccctgtgcatctctgctgaggccgccagcgcccagcagtag

SEQ ID NO: 289326 - DNA, 135 bp, Artificial Sequence
  derived and/or modified sequence
atgctgagcagaaatgatgacatctgcatctatggaggcctgggcctgggcggcctgctgctgctggccgtggtgctgctgagcgcctgcctgtgctggctgcaccggcgggaggccgccagcgcccagcagtag

SEQ ID NO: 289327 - DNA, 87 bp, Artificial Sequence
  derived and/or modified sequence
atgctgagcagaaatgatggccctggcctgctgcgggccggcacccccctgtgcatctctgctgaggccgccagcgcccagcagtag

SEQ ID NO: 289328 - DNA, 111 bp, Artificial Sequence
  derived and/or modified sequence
atgctgagcagaaatgatgacatctgcatctatggaggcctgggcctgggcggcctgctgctgctggccgtggtgctgctgagcgcctgcctgtgctggctgcacaggtag

SEQ ID NO: 289329 - DNA, 141 bp, Artificial Sequence
  derived and/or modified sequence
atgctgagcagaaatgatgacatctgcatctatggaggcctgggcctgggcggcctgctgctgctggccgtggtgctgctgagcgcctgcctgtgctggctgcaccggcgggagcactgcctggccctggagcccctgtag

SEQ ID NO: 289330 - DNA, 132 bp, Artificial Sequence
  derived and/or modified sequence
tgaagcagaaatgatgacatctgcatctacggcggcctgggcctgggcggcctgctgctgctggccgtggtgctgctgagcgcctgcctgtgctggctgcacagaagagaggccgccagcgcccagcagtag

SEQ ID NO: 289331 - DNA, 180 bp, Artificial Sequence
  derived and/or modified sequence
atgctgagccggaacgacgacatctgcatctacggcggcctgggcctggggggactgctgctcctcgcagttgttctgttgtccgcctgtctctgttggttgcaccggcgaggcccagggttactgcgcgccggcacacctctgtgtatctccgcggaagctgcttctgctcagcaatag

SEQ ID NO: 289332 - DNA, 135 bp, Artificial Sequence
  derived and/or modified sequence
atgctgagccggaacgacgacatctgcatctacggcggcctgggcctaggcggcctgctcctcctcgcggtcgtgctgttgtctgcctgcttgtgctggctacacagaagagaggccgcatcagctcagcagtag

SEQ ID NO: 289333 - DNA, 180 bp, Artificial Sequence
  derived and/or modified sequence
atgctgagccggaacgacgacatctgcatctacggcggcctgggcctgggaggcttattgctgttggcagtggtgcttctatcagcatgtttatgctggctgcatcgtcgcggtcccggcctgttgcgtgcaggcacacctctctgcatcagcgccgaggccgcaagtgctcagcagtag

SEQ ID NO: 289334 - DNA, 87 bp, Artificial Sequence
  derived and/or modified sequence
atgctgagccggaacgacggccccggcctgctgcgggccggcaccccactttgcatctctgcggaagcggcctctgcccagcaatag

SEQ ID NO: 289335 - DNA, 87 bp, Artificial Sequence
  derived and/or modified sequence
atgctgagccggaacgacggccccggcctgctgcgggccggcacccccctgtgtatttccgccgaagcagcttcggctcagcaatag

SEQ ID NO: 289336 - DNA, 87 bp, Artificial Sequence
  derived and/or modified sequence
atgctgagccggaacgacggccccggcctgctgcgggccggcacccctctttgtatcagcgctgaggctgccagcgcgcaacagtag

SEQ ID NO: 289337 - DNA, 87 bp, Artificial Sequence
  derived and/or modified sequence
atgctgagccggaacgacggccccggcctgctgcgggccggcaccccgctgtgcatctccgccgaagccgccagcgctcagcagtag

SEQ ID NO: 289338 - DNA, 111 bp, Artificial Sequence
  derived and/or modified sequence
atgctgagccggaacgacgacatctgcatctacggcggcctgggcttgggagggttacttttgctcgctgtggtcctgctgtcagcctgcttgtgctggctacacagatag

SEQ ID NO: 289339 - DNA, 141 bp, Artificial Sequence
  derived and/or modified sequence
atgctgagccggaacgacgacatctgcatctacggcggcctgggcctcgggggcctgctcttgcttgccgttgtcctcctgtcggcgtgtctctgttggctgcacaggcgtgagcactgtcttgcccttgagccactctag

SEQ ID NO: 289340 - DNA, 87 bp, Artificial Sequence
  derived and/or modified sequence
atgctgagccggaacgacggccccggcctgctgcgggccggcaccccgctgtgcatctccgcagaggctgccagcgctcagcagtag

SEQ ID NO: 289341 - DNA, 87 bp, Artificial Sequence
  derived and/or modified sequence
atgctgagccggaacgacggccccggcctgctgcgggccggcacccccctctgcatctccgccgaagctgccagcgcacagcaatag

SEQ ID NO: 289342 - DNA, 87 bp, Artificial Sequence
  derived and/or modified sequence
atgctgagccggaacgacggccccggcctgctgcgggccggcacccctctgtgcatttcagcggaagccgccagtgcacagcagtag

SEQ ID NO: 289343 - DNA, 141 bp, Artificial Sequence
  derived and/or modified sequence
atgctgagccggaacgacgacatctgcatctacggcggcctgggcttgggcggtctcctccttctagctgtggtcctcttatcggcttgcctttgttggctgcacagacgcgaacattgtctggcactcgaacccctttag

SEQ ID NO: 289344 - DNA, 87 bp, Artificial Sequence
  derived and/or modified sequence
atgctgagccggaacgacggccccggcctgctgcgggccggcaccccattgtgcatctctgcagaggcagcgtcggcacagcagtag

SEQ ID NO: 289345 - DNA, 132 bp, Artificial Sequence
  derived and/or modified sequence
tgaagccggaacgacgacatctgcatctacggcggcctgggcctgggagggctcctccttctcgccgtcgtgctcctgagtgcgtgcctgtgctggctccatcgtcgggaggccgcttctgcgcagcaatag

SEQ ID NO: 289346 - DNA, 180 bp, Artificial Sequence
  derived and/or modified sequence
atgctgagccggaacgacgacatctgcatctacggcggcctgggccttggcgggttgctcctgttggccgtggtactgctttcagcttgtctgtgctggctgcatcgtagaggccctggcctcctgagggccggtacccccctttgtatttctgccgaagcagcgagtgcccaacagtag

SEQ ID NO: 289347 - DNA, 87 bp, Artificial Sequence
  derived and/or modified sequence
atgctgagccggaacgacggccccggcctgctgcgggccggcacccccctctgtatttctgctgaggctgcatcagcccagcagtag

SEQ ID NO: 289348 - DNA, 180 bp, Artificial Sequence
  derived and/or modified sequence
atgctgagccggaacgacgacatctgcatctacggcggcctgggcctcggcggattgttactgttggccgtggttctgttgtccgcctgcctgtgttggctacataggcggggacctgggttactgagggcgggcactcctttgtgtattagtgctgaggctgcctccgcgcagcaatag

SEQ ID NO: 289349 - DNA, 141 bp, Artificial Sequence
  derived and/or modified sequence
atgctgagccggaacgacgacatctgcatctacggcggcctgggcctaggcggactgttgctgttagctgtggttctcctgtccgcttgcctttgttggcttcaccgtagagagcattgcttagccctcgaacctttgtag

SEQ ID NO: 289350 - DNA, 87 bp, Artificial Sequence
  derived and/or modified sequence
atgctgagccggaacgacggccccggcctgctgcgggccggcacccccttgtgtatttccgctgaggccgcatcagcccagcagtag

SEQ ID NO: 289351 - DNA, 87 bp, Artificial Sequence
  derived and/or modified sequence
atgctgagccggaacgacggccccggcctgctgcgggccggcaccccgttatgcattagcgccgaagccgcatccgctcaacagtag

SEQ ID NO: 289352 - DNA, 87 bp, Artificial Sequence
  derived and/or modified sequence
atgctgagccggaacgacggccccggcctgctgcgggccggcacccccctctgtatatccgcagaagctgcttccgctcagcaatag

SEQ ID NO: 289353 - DNA, 111 bp, Artificial Sequence
  derived and/or modified sequence
atgctgagccggaacgacgacatctgcatctacggcggcctgggcctcggcggcctgctccttctggcagtcgtgctgctcagcgcctgcctctgttggctccacagatag

SEQ ID NO: 289354 - DNA, 180 bp, Artificial Sequence
  derived and/or modified sequence
atgctgagccggaacgacgacatctgcatctacggcggcctgggcctgggaggactgctcttattggctgttgtcctgttaagcgcatgcctatgttggcttcatagacgcggaccaggtctgcttcgcgcagggaccccactgtgcataagcgccgaggctgcatctgcccagcagtag

SEQ ID NO: 289355 - DNA, 87 bp, Artificial Sequence
  derived and/or modified sequence
atgctgagccggaacgacggccccggcctgctgcgggccggcacccccctctgcattagcgctgaggccgcatctgcacagcagtag

SEQ ID NO: 289356 - DNA, 180 bp, Artificial Sequence
  derived and/or modified sequence
atgctgagccggaacgacgacatctgcatctacggcggcctgggcctgggagggcttctcctgctagcagtcgttctgctctcagcctgcctgtgttggctgcataggcggggtcctggattacttcgagccggaacccccctgtgtatttcagccgaagctgcctccgctcagcagtag

SEQ ID NO: 289357 - DNA, 87 bp, Artificial Sequence
  derived and/or modified sequence
atgctgagccggaacgacggccccggcctgctgcgggccggcacccccctgtgcatctctgccgaggccgcatctgcccagcagtag

SEQ ID NO: 289358 - DNA, 132 bp, Artificial Sequence
  derived and/or modified sequence
tgaagccggaacgacgacatctgcatctacggcggcctgggcctgggcggactactcctgctggcggtagtgctgttatctgcttgcctctgctggctgcaccgcagggaggctgcgagcgcacaacaatag

SEQ ID NO: 289359 - DNA, 111 bp, Artificial Sequence
  derived and/or modified sequence
atgctgagccggaacgacgacatctgcatctacggcggcctgggcctggggggtcttctcctcctggcggttgtcctgctctcagcgtgtttgtgctggctacataggtag

SEQ ID NO: 289360 - DNA, 111 bp, Artificial Sequence
  derived and/or modified sequence
atgctgagccggaacgacgacatctgcatctacggcggcctgggcctcggcggattgctgctcctggccgttgtattgctctctgcctgtctctgctggttgcaccggtag

SEQ ID NO: 289361 - DNA, 87 bp, Artificial Sequence
  derived and/or modified sequence
atgctgagccggaacgacggccccggcctgctgcgggccggcacccctctctgcattagcgctgaagcagccagcgcccagcagtag

SEQ ID NO: 289362 - DNA, 111 bp, Artificial Sequence
  derived and/or modified sequence
atgctgagccggaacgacgacatctgcatctacggcggcctgggcttagggggcctgctcctgctggcagtggtcctgctaagcgcctgcctgtgctggctgcacaggtag

SEQ ID NO: 289363 - DNA, 111 bp, Artificial Sequence
  derived and/or modified sequence
atgctgagccggaacgacgacatctgcatctacggcggcctgggcctgggcgggttgctcctgctcgcggtcgttctcctcagtgcttgcttatgctggttgcatcgctag

SEQ ID NO: 289364 - DNA, 87 bp, Artificial Sequence
  derived and/or modified sequence
atgctgagccggaacgacggccccggcctgctgcgggccggcaccccactgtgtattagcgctgaggccgcatcggcacaacagtag

SEQ ID NO: 289365 - DNA, 141 bp, Artificial Sequence
  derived and/or modified sequence
atgctgagccggaacgacgacatctgcatctacggcggcctgggcttaggcgggctgttactgttagcagtcgtactacttagcgcctgcctgtgctggctgcaccgcagggaacactgcctggctcttgagcccctgtag

SEQ ID NO: 289366 - DNA, 141 bp, Artificial Sequence
  derived and/or modified sequence
atgctgagccggaacgacgacatctgcatctacggcggcctgggccttggaggtctcctcctcctggccgtcgtgctgcttagtgcctgcttatgctggctgcatcgccgggaacactgtctcgccctcgagccgctgtag

SEQ ID NO: 289367 - DNA, 141 bp, Artificial Sequence
  derived and/or modified sequence
atgctgagccggaacgacgacatctgcatctacggcggcctgggcctaggtggtctcctgctgttagccgtggtgctgctctctgcttgtttatgctggctccacaggcgggagcactgcttggctctggagcccttgtag

SEQ ID NO: 289368 - DNA, 87 bp, Artificial Sequence
  derived and/or modified sequence
atgctgagccggaacgacggccccggcctgctgcgggccggcacccctttgtgcatcagcgcagaggccgcaagcgcccagcagtag

SEQ ID NO: 289369 - DNA, 180 bp, Artificial Sequence
  derived and/or modified sequence
atgctgagccggaacgacgacatctgcatctacggcggcctgggcctggggggtttactcctgcttgccgttgtgctactttctgcctgcctttgttggctccaccgacggggcccggggctactgcgggcgggcaccccactgtgcatatcagcggaagctgcctcggcgcaacaatag

SEQ ID NO: 289370 - DNA, 87 bp, Artificial Sequence
  derived and/or modified sequence
atgctgagccggaacgacggccccggcctgctgcgggccggcacccctctgtgtatttctgctgaagcagctagcgcacaacagtag

SEQ ID NO: 289371 - DNA, 111 bp, Artificial Sequence
  derived and/or modified sequence
atgctgagccggaacgacgacatctgcatctacggcggcctgggcctgggaggtctgctgttgcttgccgtggtgttactgagtgcatgtctctgttggctgcaccgatag

SEQ ID NO: 289372 - DNA, 87 bp, Artificial Sequence
  derived and/or modified sequence
atgctgagccggaacgacggccccggcctgctgcgggccggcaccccgctgtgtattagcgccgaagctgcatccgcccagcagtag

SEQ ID NO: 289373 - DNA, 87 bp, Artificial Sequence
  derived and/or modified sequence
atgctgagccggaacgacggccccggcctgctgcgggccggcacccctctctgtatttctgccgaggcagcatcggcacagcagtag

SEQ ID NO: 289374 - DNA, 180 bp, Artificial Sequence
  derived and/or modified sequence
atgctgagccggaacgacgacatctgcatctacggcggcctgggccttggtggactgctcctgttagccgttgtgttgcttagcgcttgtttatgttggctgcatcgccgcggacctgggctgttacgagcagggacacccctgtgtataagtgctgaagcagcctctgcccaacaatag

SEQ ID NO: 289375 - DNA, 87 bp, Artificial Sequence
  derived and/or modified sequence
atgctgagccggaacgacggccccggcctgctgcgggccggcacccctctttgcatttctgctgaagcagcctcagctcagcagtag

SEQ ID NO: 289376 - DNA, 111 bp, Artificial Sequence
  derived and/or modified sequence
atgctgagccggaacgacgacatctgcatctacggcggcctgggccttggggggttactgcttctggctgtcgtcctcctaagcgcatgtctgtgctggttgcaccgatag

SEQ ID NO: 289377 - DNA, 87 bp, Artificial Sequence
  derived and/or modified sequence
atgctgagccggaacgacggccccggcctgctgcgggccggcacccctctttgcattagcgcagaggcagcttccgcccaacagtag

SEQ ID NO: 289378 - DNA, 87 bp, Artificial Sequence
  derived and/or modified sequence
atgctgagccggaacgacggccccggcctgctgcgggccggcacccccctctgcatctctgcggaggctgccagcgctcaacagtag

SEQ ID NO: 289379 - DNA, 87 bp, Artificial Sequence
  derived and/or modified sequence
atgctgagccggaacgacggccccggcctgctgcgggccggcacccccctgtgcatctctgctgaggccgccagtgcccagcagtag

SEQ ID NO: 289380 - DNA, 87 bp, Artificial Sequence
  derived and/or modified sequence
atgctgagccggaacgacggccccggcctgctgcgggccggcaccccactgtgtattagcgctgaggctgcgtctgcccagcaatag

SEQ ID NO: 289381 - DNA, 87 bp, Artificial Sequence
  derived and/or modified sequence
atgctgagccggaacgacggccccggcctgctgcgggccggcacccctctttgtatttccgcagaagccgcctcagcccagcagtag

SEQ ID NO: 289382 - DNA, 87 bp, Artificial Sequence
  derived and/or modified sequence
atgctgagccggaacgacggccccggcctgctgcgggccggcacccctttgtgtatatccgccgaggctgcttccgctcagcaatag

SEQ ID NO: 289383 - DNA, 87 bp, Artificial Sequence
  derived and/or modified sequence
atgctgagccggaacgacggccccggcctgctgcgggccggcacccccctgtgcatctctgccgaagctgcaagtgctcagcagtag

SEQ ID NO: 289384 - DNA, 180 bp, Artificial Sequence
  derived and/or modified sequence
atgctctctaggaatgacgatatttgcatctacggaggtctaggcctgggtggcctgctcctacttgcggttgtgctgctgagcgcctgcctttgctggctgcataggcgaggcccaggactgttgcgggctggtacgccactgtgcatcagcgccgaggcggcttctgcacaacagtag

SEQ ID NO: 289385 - DNA, 135 bp, Artificial Sequence
  derived and/or modified sequence
atgctatcacgcaatgatgatatctgcatctacggtggcttaggtctggggggtctgcttttgctggccgtcgtgctgttatccgcatgcctgtgttggcttcacagaagagaggccgctagtgcgcagcagtag

SEQ ID NO: 289386 - DNA, 180 bp, Artificial Sequence
  derived and/or modified sequence
atgctgagtaggaacgatgacatttgtatctatggcggtctgggattgggagggctcttgctgctggccgtggtgcttttatctgcttgtctgtgttggcttcaccgcagggggcctggactcctgagagccggaactccactatgcatcagcgccgaggccgcaagcgctcagcaatag

SEQ ID NO: 289387 - DNA, 87 bp, Artificial Sequence
  derived and/or modified sequence
atgctgtctcggaacgatgggccagggctccttagggccggaacacctctatgtatttctgcagaggcagcctccgcccagcagtag

SEQ ID NO: 289388 - DNA, 87 bp, Artificial Sequence
  derived and/or modified sequence
atgctttcccgtaacgacggaccaggcctgctccgagccggtaccccactgtgcatctcagcggaagccgcatcagcacagcagtag

SEQ ID NO: 289389 - DNA, 87 bp, Artificial Sequence
  derived and/or modified sequence
atgctgagccgcaacgacggtccaggcttgctgcgcgcagggacacccctgtgcattagcgccgaagcagcttccgcgcagcagtag

SEQ ID NO: 289390 - DNA, 87 bp, Artificial Sequence
  derived and/or modified sequence
atgctcagccggaacgacgggcctgggttactcagggctggcacacccctttgcatcagcgctgaggccgcttccgcacagcaatag

SEQ ID NO: 289391 - DNA, 132 bp, Artificial Sequence
  derived and/or modified sequence
tatcgcggtatgatgatctacgttagcacgggtgcttggggttgggcagggtcttgcttctggcagtggagtttttgtccccctgcttgcgtaggttgtatcgaggaacggctgcctgttccctcctcttag

SEQ ID NO: 289392 - DNA, 111 bp, Artificial Sequence
  derived and/or modified sequence
atgctgtccaggaacgacgacatatgtatctacggaggcctggggctaggcggactcctgctgctcgccgtcgttttactaagtgcctgtctgtgttggctgcatcgctag

SEQ ID NO: 289393 - DNA, 87 bp, Artificial Sequence
  derived and/or modified sequence
atgctatcacgtaacgatggtcctggtctgttgcgtgcagggaccccattgtgtattagtgcagaggccgcttccgcacagcagtag

SEQ ID NO: 289394 - DNA, 87 bp, Artificial Sequence
  derived and/or modified sequence
atgctctctagaaatgatggccctggcctgctccgtgccggaacccctctttgcatctcagccgaggccgcaagtgcacagcagtag

SEQ ID NO: 289395 - DNA, 87 bp, Artificial Sequence
  derived and/or modified sequence
atgctgtctcgcaatgacggtccaggcctgcttcgggctggaacaccattatgcatatccgcagaggcggcttcagcccagcagtag

SEQ ID NO: 289396 - DNA, 141 bp, Artificial Sequence
  derived and/or modified sequence
atgctgagccgcaatgacgacatttgcatttatggcggtctgggcctggggggacttctccttctcgccgtggtgctcctgagtgcatgcctatgctggttacaccgcagggaacactgtctggcactggaacctttgtag

SEQ ID NO: 289397 - DNA, 141 bp, Artificial Sequence
  derived and/or modified sequence
atgctttcccgaaacgatgatatatgtatatacggcggactcggactcgggggtctcttgctactggctgtggtcctgctgtccgcctgcctgtgttggctacaccggagagagcactgtttagctctggagccgctgtag

SEQ ID NO: 289398 - DNA, 87 bp, Artificial Sequence
  derived and/or modified sequence
atgctgagtaggaatgatgggcctggccttctgagagcaggaactccactttgtatatctgcagaggccgcttctgcccagcagtag

SEQ ID NO: 289399 - DNA, 180 bp, Artificial Sequence
  derived and/or modified sequence
atgttgagtcgtaatgatgacatctgtatttacggtggcttgggacttggcggactcctcctgctcgctgtggtactgctttcggcttgtctttgttggttgcacaggcggggtcccggactcctccgcgcaggcactccattgtgtatctccgctgaagctgcctccgcacagcagtag

SEQ ID NO: 289400 - DNA, 87 bp, Artificial Sequence
  derived and/or modified sequence
atgttatcccgtaacgacggtccagggctcctccgagcaggcaccccattgtgtataagcgctgaggccgcaagcgcccaacagtag

SEQ ID NO: 289401 - DNA, 180 bp, Artificial Sequence
  derived and/or modified sequence
atgctgagtagaaacgatgatatctgtatttatggcggtcttggtttaggtggtctgctgcttttggcagttgttctcctctccgcttgcttgtgctggctccacaggaggggtcccggactcctccgggctggcacccccttgtgcatttcagcggaagccgcttccgcccagcagtag

SEQ ID NO: 289402 - DNA, 141 bp, Artificial Sequence
  derived and/or modified sequence
atgctgtctcgcaacgacgacatctgcatctacggaggactagggttgggcggattgcttctgctggccgtcgttcttctgtccgcctgtttgtgctggctgcaccgacgtgagcactgtctggcattagagcccctgtag

SEQ ID NO: 289403 - DNA, 87 bp, Artificial Sequence
  derived and/or modified sequence
atgttaagtaggaacgatggccctggcctcctgcgcgcaggcaccccactatgtattagtgctgaggccgcttcagcacagcagtag

SEQ ID NO: 289404 - DNA, 87 bp, Artificial Sequence
  derived and/or modified sequence
atgctttcccgaaatgacgggcctggcctgctgcgcgctggcacaccgttatgtattagtgccgaggctgcctccgcacaacagtag

SEQ ID NO: 289405 - DNA, 87 bp, Artificial Sequence
  derived and/or modified sequence
atgctgagtaggaatgatggcccaggactcctgagagccggtactcctctttgtattagtgcagaagctgcgtccgcccagcagtag

SEQ ID NO: 289406 - DNA, 111 bp, Artificial Sequence
  derived and/or modified sequence
atgttgagccgcaacgacgacatctgcatctatggtggtctgggtttagggggacttctgctgctggccgtagtccttttgtccgcctgcttatgttggttacacagatag

SEQ ID NO: 289407 - DNA, 180 bp, Artificial Sequence
  derived and/or modified sequence
atgctgagtcgcaatgacgatatttgtatctatggtgggctcgggctcggcggtctgttactgctggccgtcgtgctgttgtcagcttgcctgtgttggctgcaccgtaggggtcccggacttttgcgggcagggacacctttatgtatatctgccgaagccgcttccgcccagcaatag

SEQ ID NO: 289408 - DNA, 87 bp, Artificial Sequence
  derived and/or modified sequence
atgctaagccgtaatgacggcccaggtcttttacgagccggaaccccattatgcatttctgcagaggcggcatctgcccagcagtag

SEQ ID NO: 289409 - DNA, 180 bp, Artificial Sequence
  derived and/or modified sequence
atgctgtccagaaacgacgatatttgcatttacggcggactggggctcggcggtttgctacttctcgctgtcgtccttttgagcgcatgtttatgctggttacaccggagaggtcctggcctcttaagagcaggcacccctctgtgtataagtgcggaagctgcatctgcccagcaatag

SEQ ID NO: 289410 - DNA, 87 bp, Artificial Sequence
  derived and/or modified sequence
atgttatctcggaatgacggtcccggattgttacgagccggaactcccttgtgcatctcggccgaggctgcaagcgcccagcagtag

SEQ ID NO: 289411 - DNA, 111 bp, Artificial Sequence
  derived and/or modified sequence
atgctgtcaagaaatgacgatatttgtatttatggaggcctcgggcttggcggtttgttgcttctggccgtggtccttttgtcagcttgcctttgttggctccatcgttag

SEQ ID NO: 289412 - DNA, 111 bp, Artificial Sequence
  derived and/or modified sequence
atgctcagcaggaacgatgacatctgcatatacggcggattgggccttggcggattgctgctccttgccgtggtgctcctctcggcctgcttatgctggctgcatagatag

SEQ ID NO: 289413 - DNA, 87 bp, Artificial Sequence
  derived and/or modified sequence
atgttgtcccgcaacgatggccctggtcttctccgcgctggaacacccttatgtatttccgccgaagctgccagcgcccagcagtag

SEQ ID NO: 289414 - DNA, 111 bp, Artificial Sequence
  derived and/or modified sequence
atgctgtcacgtaacgacgacatatgtatctacggcggacttggcctggggggactgttacttctagctgtagtcctcctcagtgcctgcctctgctggttacacagatag

SEQ ID NO: 289415 - DNA, 87 bp, Artificial Sequence
  derived and/or modified sequence
atgctgtcaaggaatgatggaccaggcctactgcgtgctgggactcctttgtgtattagtgctgaagccgctagtgcccagcaatag

SEQ ID NO: 289416 - DNA, 141 bp, Artificial Sequence
  derived and/or modified sequence
atgctgtcacgcaatgacgatatatgtatctatggtggattggggctgggtggtcttctactgctggcagtagtgctactgtcggcctgcctgtgctggctgcatcgcagagaacattgtctagcccttgagccactgtag

SEQ ID NO: 289417 - DNA, 141 bp, Artificial Sequence
  derived and/or modified sequence
atgctgagtaggaacgacgacatctgtatttatggcggtctggggctgggtggattattgttacttgccgtggttctcctgagcgcctgcctctgttggctccatagacgggagcattgcctagcacttgagcccctctag

SEQ ID NO: 289418 - DNA, 87 bp, Artificial Sequence
  derived and/or modified sequence
atgctgtcaaggaacgacggaccagggctactccgagctggcactcccctgtgtataagcgccgaggccgcatctgcacagcagtag

SEQ ID NO: 289419 - DNA, 180 bp, Artificial Sequence
  derived and/or modified sequence
atgctgagcaggaatgatgatatctgtatctacgggggtctgggattaggtggtttgttgttactggcagttgtgctcctgagcgcctgcctgtgttggttacacaggagaggccctgggctgctgagagccggtactcccttgtgtatatctgcagaggctgcttcagcgcagcaatag

SEQ ID NO: 289420 - DNA, 87 bp, Artificial Sequence
  derived and/or modified sequence
atgctgagccggaatgacgggcctggactgctgcgtgctgggactcccctatgtatctcagccgaagcggcatcagctcagcagtag

SEQ ID NO: 289421 - DNA, 111 bp, Artificial Sequence
  derived and/or modified sequence
atgctgagtcggaatgacgatatctgcatatacgggggactcggcctgggcggacttctgttacttgccgtggtactcctatccgcttgtctctgctggctccaccggtag

SEQ ID NO: 289422 - DNA, 87 bp, Artificial Sequence
  derived and/or modified sequence
atgctgagccgcaacgacggacccggattgctccgagctgggactccactatgtatttcggcagaggcagcaagtgcccagcaatag

SEQ ID NO: 289423 - DNA, 87 bp, Artificial Sequence
  derived and/or modified sequence
atgctgtcacggaatgatgggcctggactcttacgggcagggacccccctgtgtatctctgctgaagccgcatccgcacagcaatag

SEQ ID NO: 289424 - DNA, 132 bp, Artificial Sequence
  derived and/or modified sequence
tgaagccgtaatgatgatatctgcatatacggcggtctcggactggggggactgcttttactggcggtggtactgctatcagcctgcctgtgctggctgcatcgccgtgaggctgcctcagcacagcagtag

SEQ ID NO: 289425 - DNA, 180 bp, Artificial Sequence
  derived and/or modified sequence
atgctgtctagaaatgatgacatttgcatttacggaggactgggccttggcggtctgctcctgctggcagtggtcttactatctgcttgcctgtgttggttgcaccgacgcggtcctgggctactgagggccggtacacccctctgcatctcagctgaagcggctagtgcgcagcagtag

SEQ ID NO: 289426 - DNA, 87 bp, Artificial Sequence
  derived and/or modified sequence
atgctctcccgcaacgatgggccagggctgcttcgggcaggcacacccctctgtattagcgcagaggctgcatcagctcagcagtag

SEQ ID NO: 289427 - DNA, 111 bp, Artificial Sequence
  derived and/or modified sequence
atgttatcacgaaatgatgacatctgcatctatgggggactgggcctgggtggattactgctgctcgcggtagtcctcctgtccgcttgtctgtgttggctgcataggtag

SEQ ID NO: 289428 - DNA, 87 bp, Artificial Sequence
  derived and/or modified sequence
atgctctctagaaacgacgggccaggactcctgagggctggtacgccactatgcatatccgctgaagccgcttcagctcagcagtag

SEQ ID NO: 289429 - DNA, 87 bp, Artificial Sequence
  derived and/or modified sequence
atgttatccaggaatgacgggcctggcctgttgcgggctggcactcccctatgcatctccgcggaggctgcctctgcacagcagtag

SEQ ID NO: 289430 - DNA, 87 bp, Artificial Sequence
  derived and/or modified sequence
atgctctcaagaaacgatggacccggtttgcttcgagctggcactcccctttgcatcagcgctgaagccgcatccgcccaacagtag

SEQ ID NO: 289431 - DNA, 87 bp, Artificial Sequence
  derived and/or modified sequence
atgctctctcgcaatgatggaccaggtctcttgagggcagggacacccctgtgcatctcagctgaagctgcatctgcacagcagtag

SEQ ID NO: 289432 - DNA, 87 bp, Artificial Sequence
  derived and/or modified sequence
atgcttagtagaaatgatggccctggcctcctgcgcgcaggcacccccctgtgtatcagcgccgaggctgccagcgcccagcagtag

SEQ ID NO: 289433 - DNA, 87 bp, Artificial Sequence
  derived and/or modified sequence
atgctttcccgtaatgatggccctggtctccttcgcgctgggactcccctttgcatcagtgccgaagccgcatcagcccagcagtag

SEQ ID NO: 289434 - DNA, 87 bp, Artificial Sequence
  derived and/or modified sequence
atgctgtccaggaatgacggacccggattactacgtgccggaacgcctctgtgcatttcagctgaggccgcatctgctcaacagtag

SEQ ID NO: 289435 - DNA, 132 bp, Artificial Sequence
  derived and/or modified sequence
taccggggaatgatgatttacgtgagtacaggtgcctggggatgggccggttcttgcttctggcaatggtccttttgccctcccgcatgtgtcggctgcatcgaggaaagattgcctgtcccaagcagctag

SEQ ID NO: 289436 - DNA, 180 bp, Artificial Sequence
  derived and/or modified sequence
atgctgagcagaaacgacgacatctgcatctacggcggcctgggcctgggcggcctgctgctgctggccgtggtgctgctgagcgcctgcctgtgctggctgcacagaagaggccccggcctgctgagagccggcacccccctgtgcatcagcgccgaggccgccagcgcccagcagtag

SEQ ID NO: 289437 - DNA, 135 bp, Artificial Sequence
  derived and/or modified sequence
atgctgagcagaaacgacgacatctgcatctacggcggcctgggcctgggcggcctgctgctgctggccgtggtgctgctgagcgcctgcctgtgctggctgcacagaagagaggccgccagcgcccagcagtag

SEQ ID NO: 289438 - DNA, 87 bp, Artificial Sequence
  derived and/or modified sequence
atgctgagcagaaacgacggccccggcctgctgagagccggcacccccctgtgcatcagcgccgaggccgccagcgcccagcagtag

SEQ ID NO: 289439 - DNA, 111 bp, Artificial Sequence
  derived and/or modified sequence
atgctgagcagaaacgacgacatctgcatctacggcggcctgggcctgggcggcctgctgctgctggccgtggtgctgctgagcgcctgcctgtgctggctgcacagatag

SEQ ID NO: 289440 - DNA, 141 bp, Artificial Sequence
  derived and/or modified sequence
atgctgagcagaaacgacgacatctgcatctacggcggcctgggcctgggcggcctgctgctgctggccgtggtgctgctgagcgcctgcctgtgctggctgcacagaagagagcactgcctggccctggagcccctgtag

SEQ ID NO: 289441 - DNA, 132 bp, Artificial Sequence
  derived and/or modified sequence
tgaagcagaaacgacgacatctgcatctacggcggcctgggcctgggcggcctgctgctgctggccgtggtgctgctgagcgcctgcctgtgctggctgcacagaagagaggccgccagcgcccagcagtag

SEQ ID NO: 289442 - protein, 244 aa, Artificial Sequence
  derived and/or modified sequence
MASRIGLRMQLMREQAQQEEQRERMQQQAVMHYMQQQQQQQQQQLGGPPTPAINTPVHFQSPPPVPGEVLKVQSYLENPTSYHLQQSQHQKVREYLSETYGNKFAAHISPAQGSPKPPPAASPGVRAGHVLSSSAGNSAPNSPMAMLHIGSNPERELDDVIDNIMRLDDVLGYINPEMQMPNTLPLSSSHLNVYSSDPQVTASLVGVTSSSCPADLTQKRELTDAESRALAKERQKKDNHNLIE

SEQ ID NO: 289443 - DNA, 1431 bp, Artificial Sequence
  derived and/or modified sequence
atggcctcaaggattggactccggatgcagctcatgcgcgaacaggcccagcaagaggaacaacgggaacgtatgcaacagcaagctgtgatgcactatatgcagcaacagcagcaacagcaacagcagcagctcggagggccacccactcccgccatcaacactccggtccactttcaaagtccacccccagtacccggcgaggtgctcaaagttcaatcctacctcgagaaccctacttcctatcatcttcagcagagccagcaccagaaggtaagagagtatctcagtgaaacctatgggaacaaattcgctgcgcacatctcaccagctcagggatcccccaaaccacctcctgctgcaagccccggcgtcagagccggacacgtgctgagttctagcgctggcaactcggcgcccaactcacctatggccatgctgcacattggatctaatccagaacgggagctggacgatgtgatcgacaacatcatgcgtctggatgacgtgctcggctacattaatccggagatgcaaatgcctaacaccctgccactgtcttcctcacaccttaacgtctatagctctgatcctcaggtaacagccagtctggtgggggtcacaagtagctcgtgtcccgccgacctgactcagaaacgggagctgacagacgccgagagccgggcccttgccaaggaaaggcagaagaaggataatcacaaccttatagagcgccgccgccgatttaatataaatgaccgtatcaaggaactgggcatgctgattccaaaggctaatgacttggatgtgagatggaacaaggggacaatcctgaaagcctctgtggactatataagaaggatgcaaaaagatctacagaagtccagggagctcgagaatcactcaagacggctggagatgactaacaagcagctctggctgagaatacaagaactggaaatgcaggctcgggtccatggactgcctaccacctccccgagtggcatgaacatggctgaactcgctcaacaggtagtcaagcaggaactgccctccgaagaaggccctggagaggcgctgatgctgggggccgaggtgccggacccagaaccactgcctgctctaccaccacaggcccccctcccactaccaacacaacctccttctcccttccaccatctggacttctctcatagcctctctttcggcggtagagaagatgagggcccgccgggctacccagagccccttgcacctggccatgggtccccattcccttcgctgtccaagaaggatctcgatctgatgctccttgatgatagcttgctgcccctggcgtctgatccgctgctctctactatgagccccgaggctagcaaagcctcatctcggagaagtagttttagcatggaagaaggcgatgtcctctag

SEQ ID NO: 289444 - DNA, 807 bp, Artificial Sequence
  derived and/or modified sequence
atggctagcaggatagggttgaggatgcagcttatgagggaacaagcacagcaggaagaacagcgtgagcggatgcaacaacaggccgtgatgcattatatgcagcagcagcaacagcaacagcagcagcagcttggtggccctcctacacctgccattaacacacctgttcacttccaatcccctccacccgtgcctggtgaagttctgaaggtgcagtcatacctggagaatccgaccagctaccacctgcaacagtctcagcatcagaaagtgagggaatacctgtcagagacttacggtaacaagtttgcggcacatatctcccctgcacagggctcacccaagccccctcccgcagctagcccaggggtgcgggccggtcacgtgctgagttcatccgcgggcaatagcgctcctaattcccctatggccatgctgcacatcggatcaaaccctgagcgtgagctggacgacgtgattgataatatcatgcgcctcgacgatgtcctcggatatatcaatcccgagatgcagatgcccaacaccctgcccctgtcatcttcgcacctcaacgtgtattcctctgaccctcaggtcactgcttctctggtgggagtcacctcctcctcatgcccagccgacctgactcagaaaagggagctgactgatgctgaatcaagagccttggcaaaggagcgacagaaaaaggataaccacaatctgatcgagcggcgccgccgcttcaatatcaatgacagaatcaaagaactgggcatgctgatccctaaagctaatgatctctag

SEQ ID NO: 289445 - DNA, 1431 bp, Artificial Sequence
  derived and/or modified sequence
atggccagtaggatagggttacggatgcaactgatgcgggagcaagctcagcaagaggagcagcgagaaaggatgcaacaacaggccgtgatgcactacatgcagcaacagcagcagcaacagcaacaacagcttggaggaccccctacgccggcgattaacacaccagttcactttcagtcgccacctcctgttccaggagaggttctgaaggtgcagtcttacctggagaaccctacctcttatcacctgcagcagtctcagcaccaaaaggtgcgagagtacctaagtgagacttacggcaataagttcgccgcccacattagtcccgcccagggcagtccgaagcctcccccagcagccagccctggagttagagccggtcacgtcctctcgtcatctgccggcaatagtgctcccaattctcctatggcaatgttacatatcgggtccaaccctgaaagagagctggatgatgtgattgacaacattatgaggctcgacgacgtgcttgggtacattaatcctgaaatgcagatgccaaacactctgcccttgtcgtcatcacatttaaacgtttacagttccgatcctcaagtgactgccagcctggtgggcgtcacgtcttcttcttgtcctgcagatcttacccagaagagagagctcacagacgctgagtcacgggcactggcgaaggagcgacagaagaaagacaaccataatttaattgagcgaagacgaaggttcaacataaatgaccgcattaaagaattaggcatgctaatccccaaggcgaacgacctggatgtcaggtggaacaagggcacgatcctgaaagcaagcgttgattatataagacggatgcaaaaagatctgcaaaagtcacgtgagctcgaaaaccactctcgcagactagaaatgactaataaacagctctggctacgcattcaagaactggaaatgcaggcccgggttcatggtctgccaacaacgagccccagcggaatgaatatggcggaacttgctcagcaagtggtgaaacaggaactgccttccgaagaggggcccggggaggctctcatgctcggggctgaagtgccagatccagagccactgcccgcgttgcccccacaggctccgctgcccttacccacacagcccccctcacctttccaccatctcgacttcagccacagtctgagcttcggagggagggaggatgaggggccaccaggctaccccgaaccactggcaccaggacacggatctccatttccgtccctcagcaaaaaggatttggatcttatgcttctcgacgacagtctgctgccactggcctcagaccctctactgtccacaatgagccctgaggccagcaaagcgagtagtcgccgctccagttttagcatggaggagggcgacgttttatag

SEQ ID NO: 289446 - DNA, 735 bp, Artificial Sequence
  derived and/or modified sequence
atggccagtcggatcggcctgcgcatgcagcttatgagggaacaggcccaacaggaagagcagcgtgaaagaatgcagcaacaagcggttatgcattacatgcagcagcagcagcagcagcaacagcagcaactcggagggcctcctacgcccgccattaatacaccagtgcacttccaatctccacccccagttcctggcgaggtcctcaaagtacagtcttacctagaaaatcctacatcataccatcttcagcagagccagcatcagaaggttcgcgaatatctttccgagacatatggaaataaatttgctgcccacatttcccccgcgcagggtagcccaaaacctcctccagccgcttcacccggcgtgagagctgggcatgtgctgagcagttccgctggtaacagcgcaccgaacagtcccatggccatgttacatatcggctccaaccctgagcgggagctggatgatgtgatcgacaatatcatgagactggacgacgtgcttggatacataaatcctgaaatgcagatgcctaacacattgccgctgtcatccagtcaccttaatgtgtattctagtgacccccaggtaaccgcttcactggtgggagtcacctccagctcttgtcctgctgacttgacgcaaaagagagagctgaccgatgctgaaagcagggcccttgctaaagagcgtcagaaaaaagataaccataatttgattgagtag

SEQ ID NO: 289447 - DNA, 807 bp, Artificial Sequence
  derived and/or modified sequence
atggcaagccgaattggcctgaggatgcaattaatgcgagaacaggctcagcaggaagagcagcgtgagagaatgcagcagcaggcagttatgcactatatgcaacagcagcagcagcagcagcagcagcagctcggtgggcccccaacgcctgccataaacacacccgtgcacttccagtccccacctccggtgccaggagaggtccttaaagtacagagttacctggaaaaccctacttcctatcatctgcagcagtcccagcaccaaaaggtccgagaatacctgtcagagacctatgggaataagtttgccgcccacataagccccgctcagggcagtcctaagcctcctcccgcagctagcccaggcgtccgagccgggcacgtgctctcctcaagcgcaggcaactcggcccctaactctcccatggccatgctgcatattgggtcaaacccagagcgagaattagatgatgttatcgataacatcatgcgcctggatgacgtgcttggatatatcaatcctgaaatgcagatgcctaatacgctgcctttgagctcttcacatctgaacgtgtattcgtcagacccgcaagtcaccgcaagcttggtcggagtcacttcgagctcttgccccgccgacctgacccagaaaagagagttaacagatgctgagtcaagggcactggcaaaagaaaggcaaaagaaggacaaccacaatctcattgagcgtagaagaagatttaacattaatgaccggatcaaagaactcggtatgctcattcccaaagcgaacgacctatag

SEQ ID NO: 289448 - DNA, 672 bp, Artificial Sequence
  derived and/or modified sequence
atggcttcaaggattggcctcagaatgcagttaatgcgggaacaggcccaacaggaggagcagcgggaacgaatgcagcaacaggccgtgatgcactatatgcagcagcagcagcagcagcagcagcaacagctgggggggccacccacacccgctattaatacccccgtgcatttccagtcaccaccgcccgtccctggagaagtactcaaggtgcagagctatttggagaatcctacgagttaccacttgcagcaatcccagcaccagaaggtaagagagtacttgtcagaaacgtatggcaacaagttcgctgcgcacataagtccagctcaaggctcgcccaagcctccccccgccgccagccccggcgtgcgcgctggccatgtgctgagttcaagtgctggaaattccgctcctaactcacccatggctatgctgcatatcggttcaaatcccgagagagagctagatgacgtcatcgacaacatcatgagactggacgacgttctggggtacattaaccccgaaatgcagatgcctaacactctgccattatcgagtagtcacctgaacgtgtattcgtcagacccccaggtgactgcctctctagttggggtgacgagcagctcttgccccgcagacctaacccagaagcgggaactaacttag

SEQ ID NO: 289449 - DNA, 240 bp, Artificial Sequence
  derived and/or modified sequence
atggcctccagaatcggcctcagaatgcagcttatgcgagagcaagcacaacaagaggagcagcgggagcgtatgcagcagcaggctgttatgcattacatgcagcagcagcagcagcagcagcagcaacagttaggaggccctcccacaccagctattaataccccagtgcacttccagtcacctccgccagtgccaggggaagtcctgaaggtgcaatcctacttggagaacccttag

SEQ ID NO: 289450 - DNA, 1431 bp, Artificial Sequence
  derived and/or modified sequence
atggccagcagaattggcctgaggatgcagctgatgagggagcaggcccagcaggaggagcagcgggagaggatgcagcagcaggccgtgatgcactacatgcagcagcagcagcagcagcagcagcagcagctgggcggcccccccaccccagccatcaacacccctgtgcacttccagagccccccacctgtgcctggagaggtgctgaaggtgcagagctacctggagaaccccaccagctaccacctgcagcagagccagcaccagaaggtgcgggagtacctgtctgagacctacggcaacaagtttgctgcccacatcagccctgcccagggcagccccaagcccccacctgctgccagccctggggtgcgggccggccacgtgctgagcagcagcgctggcaacagcgcccccaacagccccatggccatgctgcacatcggcagcaaccctgagcgggagctggatgatgtgattgacaacatcatgaggctggatgatgtgctgggctacatcaaccctgagatgcagatgcccaacaccctgcccctgagcagcagccacctgaatgtgtacagcagtgacccccaggtgacagccagcctggtgggcgtgaccagcagcagctgcccagctgacctgacccagaagcgggagctgacagatgctgagagccgggccctggccaaggagcggcagaagaaggacaaccacaacctgattgaaagaagaagacgcttcaacatcaatgaccgcatcaaggagctgggcatgctgatccccaaggccaatgacctggatgtgcgctggaacaagggcaccatcctgaaggcctctgtggactacatccggaggatgcagaaggacctgcagaagagccgggagctggagaaccacagccggcggctggagatgaccaacaagcagctgtggctgcgcatccaggagctggagatgcaggcccgggtgcacggcctgcccaccaccagccccagcggcatgaacatggccgagctggcccagcaggtggtgaagcaggagctgcccagcgaggagggccctggagaggccctgatgctgggcgctgaggtgcctgaccctgagcccctgcctgccctgcccccccaggcccccctgcccctgcccacccagccccccagccccttccaccacctggacttcagccacagcctgagctttggaggccgggaggatgagggccccccaggctacccagagcccctggcccctggccacggcagccccttccccagcctgagcaagaaggacctggacctgatgctgctggatgacagcctgctgcccctggccagtgaccccctgctgagcaccatgagccctgaggccagcaaggccagcagccgccgcagcagcttctccatggaggagggagatgtgctgtag

SEQ ID NO: 289451 - DNA, 807 bp, Artificial Sequence
  derived and/or modified sequence
atggccagcagaattggcctgaggatgcagctgatgagggagcaggcccagcaggaggagcagcgggagaggatgcagcagcaggccgtgatgcactacatgcagcagcagcagcagcagcagcagcagcagctgggcggcccccccaccccagccatcaacacccctgtgcacttccagagccccccacctgtgcctggagaggtgctgaaggtgcagagctacctggagaaccccaccagctaccacctgcagcagagccagcaccagaaggtgcgggagtacctgtctgagacctacggcaacaagtttgctgcccacatcagccctgcccagggcagccccaagcccccacctgctgccagccctggggtgcgggccggccacgtgctgagcagcagcgctggcaacagcgcccccaacagccccatggccatgctgcacatcggcagcaaccctgagcgggagctggatgatgtgattgacaacatcatgaggctggatgatgtgctgggctacatcaaccctgagatgcagatgcccaacaccctgcccctgagcagcagccacctgaatgtgtacagcagtgacccccaggtgacagccagcctggtgggcgtgaccagcagcagctgcccagctgacctgacccagaagcgggagctgacagatgctgagagccgggccctggccaaggagcggcagaagaaggacaaccacaacctgattgaaagaagaagacgcttcaacatcaatgaccgcatcaaggagctgggcatgctgatccccaaggccaatgacctgtag

SEQ ID NO: 289452 - DNA, 735 bp, Artificial Sequence
  derived and/or modified sequence
atggccagcagaattggcctgaggatgcagctgatgagggagcaggcccagcaggaggagcagcgggagaggatgcagcagcaggccgtgatgcactacatgcagcagcagcagcagcagcagcagcagcagctgggcggcccccccaccccagccatcaacacccctgtgcacttccagagccccccacctgtgcctggagaggtgctgaaggtgcagagctacctggagaaccccaccagctaccacctgcagcagagccagcaccagaaggtgcgggagtacctgtctgagacctacggcaacaagtttgctgcccacatcagccctgcccagggcagccccaagcccccacctgctgccagccctggggtgcgggccggccacgtgctgagcagcagcgctggcaacagcgcccccaacagccccatggccatgctgcacatcggcagcaaccctgagcgggagctggatgatgtgattgacaacatcatgaggctggatgatgtgctgggctacatcaaccctgagatgcagatgcccaacaccctgcccctgagcagcagccacctgaatgtgtacagcagtgacccccaggtgacagccagcctggtgggcgtgaccagcagcagctgcccagctgacctgacccagaagcgggagctgacagatgctgagagccgggccctggccaaggagcggcagaagaaggacaaccacaacctgattgaatag

SEQ ID NO: 289453 - DNA, 672 bp, Artificial Sequence
  derived and/or modified sequence
atggccagcagaattggcctgaggatgcagctgatgagggagcaggcccagcaggaggagcagcgggagaggatgcagcagcaggccgtgatgcactacatgcagcagcagcagcagcagcagcagcagcagctgggcggcccccccaccccagccatcaacacccctgtgcacttccagagccccccacctgtgcctggagaggtgctgaaggtgcagagctacctggagaaccccaccagctaccacctgcagcagagccagcaccagaaggtgcgggagtacctgtctgagacctacggcaacaagtttgctgcccacatcagccctgcccagggcagccccaagcccccacctgctgccagccctggggtgcgggccggccacgtgctgagcagcagcgctggcaacagcgcccccaacagccccatggccatgctgcacatcggcagcaaccctgagcgggagctggatgatgtgattgacaacatcatgaggctggatgatgtgctgggctacatcaaccctgagatgcagatgcccaacaccctgcccctgagcagcagccacctgaatgtgtacagcagtgacccccaggtgacagccagcctggtgggcgtgaccagcagcagctgcccagctgacctgacccagaagcgggagctgacctag

SEQ ID NO: 289454 - DNA, 240 bp, Artificial Sequence
  derived and/or modified sequence
atggccagcagaattggcctgaggatgcagctgatgagggagcaggcccagcaggaggagcagcgggagaggatgcagcagcaggccgtgatgcactacatgcagcagcagcagcagcagcagcagcagcagctgggcggcccccccaccccagccatcaacacccctgtgcacttccagagccccccacctgtgcctggagaggtgctgaaggtgcagagctacctggagaacccctag

SEQ ID NO: 289455 - DNA, 1431 bp, Artificial Sequence
  derived and/or modified sequence
atggccagccggatcggcctgcggatgcagctgatgcgggagcaggcgcaacaggaggagcagagagagcggatgcagcaacaggcggtcatgcactacatgcagcaacagcagcagcagcagcaacagcagctgggagggcccccaactcccgctatcaacacaccggtgcacttccagagcccgccaccggtgccaggtgaggttttgaaagtgcagagctacttggagaaccccacaagctatcatttgcagcagtcacagcaccagaaggtgagggagtatttgtcagagacctatgggaacaaatttgctgcccacatcagccccgcccagggatcccccaaacccccccctgccgcgtccccaggcgtccgtgccgggcacgtgctttcctccagcgcaggtaactcagcaccaaacagccctatggccatgctgcacatcggctccaatccggagagggaattggatgatgttattgacaatattatgagactggatgacgtgctggggtatatcaatccagaaatgcaaatgccaaacactctccccctcagctcctcacatctcaacgtttacagctccgatcctcaagttactgcttcgctcgtgggagttacgagctcttcatgccctgctgatctgactcaaaaaagggagttgaccgacgccgaatcccgagctctggccaaagagcggcagaagaaggacaatcacaatctgattgaaagacgacgacgattcaacatcaatgatcggattaaagaactgggaatgttgatcccaaaggccaatgacctcgacgtgcggtggaacaaggggactattttgaaagcctccgttgactacattcgccggatgcaaaaggacctgcaaaaaagcagggaactggagaaccacagcagacggttggaaatgacgaataaacaactatggctcagaatccaggagttggagatgcaagccagggttcacggactgcccacaactagtcctagtggcatgaatatggccgagctcgcccaacaggtcgtaaagcaggagctgccatccgaggaggggccaggcgaggccctgatgttaggagctgaggtccctgatcccgagccactgccggcgctgcctccccaagcacccctgcccctcccaacacagccaccaagccctttccaccaccttgacttctctcacagcctcagtttcggaggccgggaggatgaagggccccctggctatccagagccgctggccccaggacacggatcccctttccccagtttgtcaaagaaggacctggatcttatgcttctcgacgactcactcctcccactggcaagcgacccactgctctcaacaatgtcgcctgaagcttcaaaagcatcgtccagaagatctagcttttccatggaggagggcgatgtgctgtag

SEQ ID NO: 289456 - DNA, 807 bp, Artificial Sequence
  derived and/or modified sequence
atggccagccggatcggcctgcggatgcagctgatgcgggagcaggcccaacaggaagagcagcgggaacgcatgcagcagcaagcagtcatgcactatatgcaacagcagcagcagcagcagcagcaacagctgggtgggccccctacacctgctattaacacacctgttcactttcagtcacctccccctgtgcccggagaggtcttgaaagtgcagtcatacttggagaatcctaccagctatcacctgcagcaaagtcagcaccagaaggtgagagaatacctgtctgagacttatgggaacaagttcgctgcccacatttcacctgctcaaggcagccctaagcccccccccgctgctagcccaggggttagagctgggcatgtactgtcgagtagtgctggcaacagcgcgcccaactctcctatggcaatgcttcatattgggagcaaccctgaaagggagctcgacgacgtgatcgacaacattatgagacttgacgatgttcttgggtatattaatccagaaatgcagatgcctaacaccctgcctctctcttcttcccaccttaatgtgtactcctcggacccgcaggtgaccgcctctcttgtgggcgttacctcttcttcttgcccagccgatcttacgcagaaaagagagttgaccgacgccgagagccgggcattagcaaaagaaaggcagaagaaggataaccataatctcatcgagcggcgccggaggttcaatatcaatgatcgtatcaaagagctgggcatgcttatccctaaggctaatgacctttag

SEQ ID NO: 289457 - DNA, 1431 bp, Artificial Sequence
  derived and/or modified sequence
atggccagccggatcggcctgcggatgcagctgatgcgggagcaggctcagcaggaagaacaacgggagagaatgcaacagcaggccgttatgcactacatgcagcagcaacagcagcagcagcagcagcagttaggaggcccccctactcctgccatcaatactcccgtgcattttcagtctccacctcctgtgccgggggaagttttaaaggtccagtcctatctcgagaaccctacaagctatcacttgcaacagtctcagcatcagaaagtccgcgagtatctgagtgagacatacggtaataagttcgccgctcacatttcccctgcccaggggagtccaaaaccacctccggctgcatcccccggtgttcgcgccggccatgtgctgagctcttcagccggcaattccgctcctaactcaccaatggccatgttgcacataggaagcaatccagagcgagagctagacgacgtgatagataacattatgcgcctggacgacgtgttggggtatattaacccagagatgcagatgcctaataccctgccattatctagtagtcacctgaacgtgtactcctctgaccctcaggtcaccgcttcgctggtgggcgtgacgagctcttcctgtcccgctgatctgacacagaagcgtgaactgaccgacgccgagagtagggctcttgccaaagagaggcagaaaaaagataaccataacctgatcgaaaggagacgacgctttaatataaatgatcgcattaaggagctgggcatgctcattcctaaggctaatgatttggatgtcaggtggaacaaaggcaccatcctgaaggcatctgtggactatattagacgcatgcagaaagatctgcagaagagccgggagcttgaaaaccacagtcgccgactggaaatgaccaataagcaactctggttgagaattcaggagctggaaatgcaggctcgggtccacggactgccaacgacctcacccagcgggatgaacatggccgaactggcccagcaggtcgtgaaacaggaactgccatctgaggaggggccaggggaggctctgatgttaggggcggaagtgcctgaccccgagcctctgccagcactcccaccacaagctcccctccccttgcctacccaacccccgtccccttttcatcacctggattttagccacagtctctctttcggcggcagagaagatgagggaccccctggctatcctgagcctctggcacccgggcatgggtcgccatttccatcactcagcaagaaggatcttgatctgatgcttctagatgactccttactgcctctagcctcggacccacttctaagtacaatgagccccgaagcgtctaaggcctcctcccgaagaagcagttttagcatggaggagggagacgtgctttag

SEQ ID NO: 289458 - DNA, 735 bp, Artificial Sequence
  derived and/or modified sequence
atggccagccggatcggcctgcggatgcagctgatgcgggagcaggcccaacaggaggagcagcgagagcgcatgcagcaacaggctgtgatgcactacatgcagcagcagcagcaacagcagcagcagcaattgggaggtccgcctacccccgccattaacactcccgtccacttccagtctccaccacccgtcccgggcgaagtgctgaaagtgcagtcatatctcgaaaaccccacttcctatcacttgcagcagtcccagcaccaaaaagttagggagtacttgtccgagacgtacggtaataagtttgctgcccacatctcaccggcccagggcagccccaaacctccaccggcggcatcccctggcgtccgcgcagggcacgttttatcttcctccgctggcaatagtgctccaaactcacccatggctatgctccacattgggtctaatccagagcgagagctggatgatgtaatagataatatcatgcgactggacgatgtgctgggctacattaaccctgaaatgcaaatgccgaacactcttcccctgagttcttctcatctgaatgtgtacagtagcgatccacaggtaacagccagcctcgttggtgttactagctcatcctgcccagctgacctaacacagaagcgggaattgacagatgccgaaagccgggcactggcaaaagagagacagaaaaaagataaccataacctcatcgagtag

SEQ ID NO: 289459 - DNA, 807 bp, Artificial Sequence
  derived and/or modified sequence
atggccagccggatcggcctgcggatgcagctgatgcgggagcaggctcaacaggaggagcagcgcgaacgaatgcagcaacaggcagttatgcactacatgcaacagcagcagcagcaacagcagcagcagctcggcgggccaccaactcccgctatcaatacgccggtccattttcagagcccaccccccgtgcccggagaagttctcaaggtgcagtcttatctggaaaacccaactagctaccatttgcagcagagtcagcatcagaaagttcgcgagtacctgagcgagacctatgggaacaaattcgcagcccacatatcacctgctcagggtagcccgaagcctccaccagccgcctcacccggtgtcagagccggtcacgtcctctcttcatctgccggtaattccgcacctaatagccctatggcaatgttgcacatagggtcaaatcccgagagagaattggatgacgtcatagataatataatgaggctggacgacgtgctgggctacatcaaccctgaaatgcagatgcccaataccctgccactttcttcatcccatttgaacgtgtatagttccgacccccaagtgactgccagtcttgtgggcgtgacctcgtcctcctgccccgctgaccttacccagaaaagagaactgactgacgcggagagccgtgctctggccaaagagcgccaaaagaaggacaaccataatcttatcgagagacggaggagattcaatatcaacgaccgcatcaaagaactgggcatgctgattcccaaggcaaatgacctctag

SEQ ID NO: 289460 - DNA, 672 bp, Artificial Sequence
  derived and/or modified sequence
atggccagccggatcggcctgcggatgcagctgatgcgggagcaggcgcaacaggaggagcagagagagaggatgcaacaacaagcagtgatgcactacatgcagcagcagcagcagcaacagcaacagcaactcggtggaccgcctacccctgctattaacacccctgttcacttccaatctccacctccagttcctggtgaagtgttaaaagtccagagctacctggagaatccaacaagttatcaccttcagcagtcgcagcatcaaaaggtacgcgaatatctctccgaaacttatggaaacaagtttgcagcacatatctcccccgcccaaggcagcccaaagccgccaccagcagcgagccctggagtaagagccgggcacgtgctgagctccagtgctggcaactctgcacctaactcccctatggcaatgctgcacataggctctaatcctgagcgcgaactcgatgacgtgattgacaacattatgcgcctggacgatgtcttgggttacatcaaccccgaaatgcaaatgccgaacaccctgcctctatcgagtagccacctcaacgtgtattcttcagatcctcaagtcacagcatcattggttggagtgacttccagctcatgccctgccgatctgacgcaaaagcgggaactgacttag

SEQ ID NO: 289461 - DNA, 240 bp, Artificial Sequence
  derived and/or modified sequence
atggccagccggatcggcctgcggatgcagctgatgcgggagcaggcgcagcaggaggaacagcgggagagaatgcaacagcaggccgttatgcactacatgcagcaacagcagcagcaacagcagcagcagttgggcggccctccgacaccagctattaacacaccagttcatttccagtctcctccccctgtgccgggtgaggtgttaaaagtgcagtcttatttagaaaacccatag

SEQ ID NO: 289462 - DNA, 1431 bp, Artificial Sequence
  derived and/or modified sequence
atggccagcagaattggcctcaggatgcagctgatgcgggagcaagcccagcaggaagagcagcgggagcgtatgcagcaacaggcggtgatgcattacatgcaacagcagcagcaacaacagcagcagcagttgggaggccctcctacacctgctattaatacaccggtgcacttccagtctcctccccctgtgccgggtgaggtgctcaaggtgcaatcatatctcgaaaaccctacaagctatcaccttcaacagtcacaacaccagaaagtgagagaatacctttccgagacctacggaaacaagtttgcagcacacatttctccagcccaggggtcccctaaacccccaccagccgcaagtccgggagtccgagcagggcatgtcttgagttcctctgccggaaactccgcaccaaattcccccatggcaatgctgcacatcggctctaaccctgaacgggagctggacgacgtgatcgacaacataatgagactggatgacgtgctaggttacatcaatcccgaaatgcagatgccgaacacccttcctttatctagtagccacttaaatgtatactcttccgacccccaggtaacggctagtttggtaggggtgacatcttcctcgtgccccgcagatttgacccagaagcgcgagttaaccgatgctgagtcacgggctctcgccaaggaacggcaaaaaaaagacaatcacaacttgatcgaacgaagacgcagatttaatatcaacgacagaatcaaagagttaggtatgctgattccgaaagcgaatgacctcgacgtgagatggaataaaggcaccatactgaaagcctctgtcgattacatccggagaatgcaaaaggatctgcagaagtccagggaactggagaaccactctcggagactcgagatgactaataaacagctgtggctgcggatccaggagctggaaatgcaggctcgtgtacacggcctccctaccaccagcccatcaggaatgaatatggcagagttggcacagcaggtggtgaagcaggaattgccatctgaggaaggcccaggagaagccctcatgctcggcgcagaagtcccagatcctgagcctttgcccgcactgccgccacaggcccctcttccactacctacccagcctccaagccctttccatcacctggatttcagccactccctcagcttcgggggaagagaagatgagggtccacctggctaccccgagcctctggctccaggccacgggtctccatttccaagcttgagcaaaaaagatctagaccttatgctgctggatgactccctgctgccgctggcttctgatccactgttgagcacaatgtcccctgaggcttctaaggcatctagccggaggtcatctttcagcatggaggagggtgacgtattgtag

SEQ ID NO: 289463 - DNA, 807 bp, Artificial Sequence
  derived and/or modified sequence
atggcaagccggattggactcaggatgcaactgatgcgcgaacaggcacaacaggaagagcagcgggagcgtatgcagcagcaggccgtgatgcattacatgcagcaacagcaacagcagcagcagcagcagcttggcggtcctcctacgcccgcaatcaacacacctgtgcacttccagtccccgcctccggtgcccggagaggttttgaaagtgcaatcatacctcgagaaccctacatcctaccatctccagcagagccaacatcagaaggtgcgcgaatatttatccgagacttatggcaataaatttgcagcacatatttcgccagcgcagggttcccccaagccgccacccgctgccagtccgggagtgcgagcgggtcatgtcctgagttccagcgcaggcaacagtgcccctaatagtcccatggccatgttgcacatcgggtcgaacccagaacgggagttagatgacgtaattgacaacattatgcggctcgatgatgtgctaggctatatcaaccctgaaatgcaaatgcctaatacattgcctctgtcctcatctcaccttaatgtgtacagcagcgatccccaggtcaccgccagcctggttggcgtgacctcctcctcatgtcctgctgacctcacgcaaaagcgggagctcaccgacgcagagtcgagagcactggccaaggaacgacaaaagaaagataaccataacctgatcgagcgcaggaggagatttaacataaacgataggattaaggaacttggcatgctaatcccaaaggcaaatgacctgtag

SEQ ID NO: 289464 - DNA, 1431 bp, Artificial Sequence
  derived and/or modified sequence
atggccagtcgtattggattgagaatgcaattaatgcgcgaacaagcccagcaggaagaacaacgcgaacgtatgcagcaacaggctgtgatgcattatatgcagcaacaacagcagcaacagcagcagcagctcggaggcccaccgacgcctgctatcaatactccagtgcactttcagtcacctcctccagtaccgggtgaggtgctgaaagttcagtcctacctggagaacccgaccagctatcatttgcagcagtctcagcatcaaaaggtgcgcgagtatctatccgagacttatgggaataaattcgctgctcacataagccccgctcaaggtagccctaagccaccaccggcagctagtcccggtgttagagccggtcacgtcctctcaagcagcgccggtaactcagctccaaattcacctatggctatgctgcacatcggaagcaatccagaacgcgaactcgatgatgtgatagacaatataatgagactcgacgacgttctgggatatatcaatccggaaatgcagatgccaaacactctgcccttgagcagcagccacctaaacgtgtacagtagcgacccacaggtgacggccagtctggttggcgtcacaagcagcagctgtccagccgacctgacacagaagcgcgaattaactgatgcagagtcacgcgctctggcaaaagaaaggcagaaaaaagacaatcacaaccttatcgagaggagacgtaggttcaatataaacgacaggattaaggaacttgggatgctcatccctaaggctaacgatcttgacgtgcgctggaataaggggaccatacttaaggcatctgtggactacatcagacggatgcagaaggatctccagaagagccgggagctggaaaaccactctcgcaggctcgaaatgacaaacaaacagctctggctccggatacaagagctagaaatgcaggcacgggtgcatggcctacccacaacaagtccctctggtatgaacatggccgagctggcccaacaggtggtgaaacaggagcttccgagcgaggaggggccaggcgaagctttgatgctcggcgcagaagttcctgaccctgagccacttccagctctcccaccccaggcacccctgcctctccctacacagccaccctcaccattccatcacctggatttcagccactccctgtcatttggcggacgggaggacgaaggccctcctggatatcccgaacctcttgccccaggtcacggaagcccatttccgtcactctctaaaaaggacctggatctcatgctgctggacgatagtttacttcctctggctagcgatcccttacttagcactatgtcccctgaggcttctaaagctagctctcggcgttcctcgttctcaatggaggaaggggatgtcttatag

SEQ ID NO: 289465 - DNA, 735 bp, Artificial Sequence
  derived and/or modified sequence
atggccagccgcatcggccttaggatgcagttgatgagagagcaagctcagcaagaagagcagcgggaaagaatgcagcagcaggctgtcatgcactacatgcagcagcagcagcagcagcagcagcagcagttaggcggtcccccaacaccggctatcaacacacccgtccatttccagtctcctcccccagtgccaggggaagtcctgaaagtgcagagttatctggaaaatcccactagctaccatttacagcagagtcagcatcagaaggtccgcgagtacctgagtgaaacatacggcaacaaattcgcagcgcatatttcacctgcacaaggctcacctaagcctccaccggcagcaagcccaggcgtaagggcagggcacgtgctctcctctagcgccggaaattctgcacctaacagcccaatggccatgttgcacattggatctaacccagaacgtgaactggatgacgtgatcgacaacatcatgcgactagacgacgtcctcggttatataaaccctgagatgcagatgcccaacacgctacccctgtccagttcacacctcaacgtttactccagtgacccacaggttacggcatctctggtcggcgtgacctccagttcatgccctgctgatcttacgcagaaaagagaattaacagacgctgagtcccgcgctctagccaaggagaggcagaaaaaagacaatcacaatctcatcgagtag

SEQ ID NO: 289466 - DNA, 807 bp, Artificial Sequence
  derived and/or modified sequence
atggcatcacgtattggcctgcgaatgcagctaatgcgtgaacaagcacaacaggaagagcagagggagcgcatgcagcagcaagctgtgatgcattatatgcagcagcagcagcagcaacagcaacagcagctggggggaccccctaccccagctatcaacacaccagtccatttccaaagccctcctccggtccccggagaggttctaaaggtacagtcttacttggagaaccccactagttatcacctgcagcaaagccaacatcaaaaggtcagggaatatctctcagagacgtatgggaataagtttgccgcacacatatcacccgcacagggctcgccgaagcccccacctgccgcatcacccggagtgagggccggtcatgtgttgagttctagtgcaggaaatagtgccccaaactctcccatggcgatgctccatataggctctaatcccgagagagagctggacgatgttattgacaacattatgcgactcgacgatgtgttggggtacatcaatcccgagatgcagatgccgaatacactccctttgtcatcgagtcaccttaatgtatactcctcagatccgcaggtcacggcctcactcgtcggagtgactagctcatcctgcccagctgacctcacacagaaaagagagctgaccgacgcagagtcccgggcactggctaaagagcggcagaagaaagacaatcataatcttattgaaaggcggagacgtttcaacattaacgaccggattaaggagctgggcatgttaataccgaaagctaacgacctctag

SEQ ID NO: 289467 - DNA, 672 bp, Artificial Sequence
  derived and/or modified sequence
atggcctccagaatcggcctgcgaatgcagctcatgagagagcaggctcaacaagaggaacagagagagaggatgcaacaacaggccgtgatgcactatatgcagcagcagcagcaacagcagcagcaacaattggggggaccccctacccctgccattaatacccctgtgcacttccagtcccctcctcctgttcctggggaggtcctaaaggtccagtcctacttagaaaaccctacctcttaccacttgcaacagagtcagcaccagaaggttcgggagtatctgtccgagacttatggcaataagttcgcagcccacatcagtcctgcgcagggcagccccaagccgccacccgcagcttcccctggggtcagagccggacatgttttgtccagtagcgctgggaactctgctccgaattctcctatggccatgctgcacatcggaagtaatccggaaagagagctggacgacgtgattgacaatatcatgagattggatgatgtcctaggatatattaaccctgaaatgcagatgcctaatacgcttcctcttagtagctcccacctgaacgtgtacagttccgatccgcaggtcaccgcttccctggtgggcgtcacatcctccagttgccccgcagatctcacccagaaaagggagctgacgtag

SEQ ID NO: 289468 - DNA, 240 bp, Artificial Sequence
  derived and/or modified sequence
atggcatcaagaatcggactgcggatgcagctgatgcgggagcaagcacagcaggaagagcagcgagagcgcatgcaacaacaggctgtaatgcactacatgcagcagcagcagcaacaacagcagcaacagttgggcggtcccccaaccccagccataaatacacccgttcacttccagtcacctcctcctgtcccaggggaagtgctgaaggtccagtcctacctcgagaacccctag

SEQ ID NO: 289469 - DNA, 914 bp, Artificial Sequence
  derived and/or modified sequence
gcttcacgcacggctgccccgagctgctccgggctgcgcgagcaggttcgcgccgcagccgcctggcgcgccccagccccgcgccccggggagccagcgccggcagccaccatggcgtcacgcatagggttgcgcatgcagctcatgcgggagcaggcgcagcaggaggagcagcgggagcgcatgcagcaacaggctgtcatgcattacatgcagcagcagcagcagcagcaacagcagcagctcggagggccgcccaccccggccatcaatacccccgtccacttccagtcgccaccacctgtgcctggggaggtgttgaaggtgcagtcctacctggagaatcccacatcctaccatctgcagcagtcgcagcatcagaaggtgcgggagtacctgtccgagacctatgggaacaagtttgctgcccacatcagcccagcccagggctctccgaaacccccaccagccgcctccccaggggtgcgagctggacacgtgctgtcctcctccgctggcaacagtgctcccaatagccccatggccatgctgcacattggctccaaccctgagagggagttggatgatgtcattgacaacattatgcgtctggacgatgtccttggctacatcaatcctgaaatgcagatgcccaacacgctacccctgtccagcagccacctgaatgtgtacagcagcgacccccaggtcacagcctccctggtgggcgtcaccagcagctcctgccctgcggacctgacccagaagcgagagctcacagatgctgagagcagggccctggccaaggagcggcagaagaaagacaatcacaacttaattgaaaggagacgaaggttcaacatcaatgaccgcatcaaggagttgggaatgctgatccccaaggccaatgacct

SEQ ID NO: 289470 - DNA, 1431 bp, Artificial Sequence
  derived and/or modified sequence
atggccagcagaatcggcctgagaatgcagctgatgagagagcaggcccagcaggaggagcagagagagagaatgcagcagcaggccgtgatgcactacatgcagcagcagcagcagcagcagcagcagcagctgggcggcccccccacccccgccatcaacacccccgtgcacttccagagccccccccccgtgcccggcgaggtgctgaaggtgcagagctacctggagaaccccaccagctaccacctgcagcagagccagcaccagaaggtgagagagtacctgagcgagacctacggcaacaagttcgccgcccacatcagccccgcccagggcagccccaagcccccccccgccgccagccccggcgtgagagccggccacgtgctgagcagcagcgccggcaacagcgcccccaacagccccatggccatgctgcacatcggcagcaaccccgagagagagctggacgacgtgatcgacaacatcatgagactggacgacgtgctgggctacatcaaccccgagatgcagatgcccaacaccctgcccctgagcagcagccacctgaacgtgtacagcagcgacccccaggtgaccgccagcctggtgggcgtgaccagcagcagctgccccgccgacctgacccagaagagagagctgaccgacgccgagagcagagccctggccaaggagagacagaagaaggacaaccacaacctgatcgagagaagaagaagattcaacatcaacgacagaatcaaggagctgggcatgctgatccccaaggccaacgacctggacgtgagatggaacaagggcaccatcctgaaggccagcgtggactacatcagaagaatgcagaaggacctgcagaagagcagagagctggagaaccacagcagaagactggagatgaccaacaagcagctgtggctgagaatccaggagctggagatgcaggccagagtgcacggcctgcccaccaccagccccagcggcatgaacatggccgagctggcccagcaggtggtgaagcaggagctgcccagcgaggagggccccggcgaggccctgatgctgggcgccgaggtgcccgaccccgagcccctgcccgccctgcccccccaggcccccctgcccctgcccacccagccccccagccccttccaccacctggacttcagccacagcctgagcttcggcggcagagaggacgagggcccccccggctaccccgagcccctggcccccggccacggcagccccttccccagcctgagcaagaaggacctggacctgatgctgctggacgacagcctgctgcccctggccagcgaccccctgctgagcaccatgagccccgaggccagcaaggccagcagcagaagaagcagcttcagcatggaggagggcgacgtgctgtag

SEQ ID NO: 289471 - DNA, 807 bp, Artificial Sequence
  derived and/or modified sequence
atggccagcagaatcggcctgagaatgcagctgatgagagagcaggcccagcaggaggagcagagagagagaatgcagcagcaggccgtgatgcactacatgcagcagcagcagcagcagcagcagcagcagctgggcggcccccccacccccgccatcaacacccccgtgcacttccagagccccccccccgtgcccggcgaggtgctgaaggtgcagagctacctggagaaccccaccagctaccacctgcagcagagccagcaccagaaggtgagagagtacctgagcgagacctacggcaacaagttcgccgcccacatcagccccgcccagggcagccccaagcccccccccgccgccagccccggcgtgagagccggccacgtgctgagcagcagcgccggcaacagcgcccccaacagccccatggccatgctgcacatcggcagcaaccccgagagagagctggacgacgtgatcgacaacatcatgagactggacgacgtgctgggctacatcaaccccgagatgcagatgcccaacaccctgcccctgagcagcagccacctgaacgtgtacagcagcgacccccaggtgaccgccagcctggtgggcgtgaccagcagcagctgccccgccgacctgacccagaagagagagctgaccgacgccgagagcagagccctggccaaggagagacagaagaaggacaaccacaacctgatcgagagaagaagaagattcaacatcaacgacagaatcaaggagctgggcatgctgatccccaaggccaacgacctgtag

SEQ ID NO: 289472 - DNA, 735 bp, Artificial Sequence
  derived and/or modified sequence
atggccagcagaatcggcctgagaatgcagctgatgagagagcaggcccagcaggaggagcagagagagagaatgcagcagcaggccgtgatgcactacatgcagcagcagcagcagcagcagcagcagcagctgggcggcccccccacccccgccatcaacacccccgtgcacttccagagccccccccccgtgcccggcgaggtgctgaaggtgcagagctacctggagaaccccaccagctaccacctgcagcagagccagcaccagaaggtgagagagtacctgagcgagacctacggcaacaagttcgccgcccacatcagccccgcccagggcagccccaagcccccccccgccgccagccccggcgtgagagccggccacgtgctgagcagcagcgccggcaacagcgcccccaacagccccatggccatgctgcacatcggcagcaaccccgagagagagctggacgacgtgatcgacaacatcatgagactggacgacgtgctgggctacatcaaccccgagatgcagatgcccaacaccctgcccctgagcagcagccacctgaacgtgtacagcagcgacccccaggtgaccgccagcctggtgggcgtgaccagcagcagctgccccgccgacctgacccagaagagagagctgaccgacgccgagagcagagccctggccaaggagagacagaagaaggacaaccacaacctgatcgagtag

SEQ ID NO: 289473 - DNA, 672 bp, Artificial Sequence
  derived and/or modified sequence
atggccagcagaatcggcctgagaatgcagctgatgagagagcaggcccagcaggaggagcagagagagagaatgcagcagcaggccgtgatgcactacatgcagcagcagcagcagcagcagcagcagcagctgggcggcccccccacccccgccatcaacacccccgtgcacttccagagccccccccccgtgcccggcgaggtgctgaaggtgcagagctacctggagaaccccaccagctaccacctgcagcagagccagcaccagaaggtgagagagtacctgagcgagacctacggcaacaagttcgccgcccacatcagccccgcccagggcagccccaagcccccccccgccgccagccccggcgtgagagccggccacgtgctgagcagcagcgccggcaacagcgcccccaacagccccatggccatgctgcacatcggcagcaaccccgagagagagctggacgacgtgatcgacaacatcatgagactggacgacgtgctgggctacatcaaccccgagatgcagatgcccaacaccctgcccctgagcagcagccacctgaacgtgtacagcagcgacccccaggtgaccgccagcctggtgggcgtgaccagcagcagctgccccgccgacctgacccagaagagagagctgacctag

SEQ ID NO: 289474 - DNA, 240 bp, Artificial Sequence
  derived and/or modified sequence
atggccagcagaatcggcctgagaatgcagctgatgagagagcaggcccagcaggaggagcagagagagagaatgcagcagcaggccgtgatgcactacatgcagcagcagcagcagcagcagcagcagcagctgggcggcccccccacccccgccatcaacacccccgtgcacttccagagccccccccccgtgcccggcgaggtgctgaaggtgcagagctacctggagaacccctag

SEQ ID NO: 289475 - DNA, 1431 bp, Artificial Sequence
  derived and/or modified sequence
atggctagtcggatagggctgcggatgcagctcatgcgggaacaggcccagcaggaggaacagcgcgaacgcatgcagcagcaggctgtcatgcactacatgcagcagcagcagcaacagcaacagcagcaactgggtgggccccctacacccgcgataaacacaccagtgcacttccaatcgcctccccctgtcccaggcgaggtcctcaaggtccagagctatctcgagaaccccaccagctatcatttgcagcagagtcagcaccagaaagtcagagagtacctgtcagaaacctatggaaacaagtttgccgcacatatctcgcccgcccaaggctctccaaagcctccccccgccgcctctcccggcgtgagggctgggcacgtactcagttcaagtgcaggcaactcggctcctaactcccccatggccatgcttcatatcggtagtaatcccgaacgcgagctggatgacgtgatagacaatatcatgaggctggatgatgtgctggggtacataaatcccgaaatgcagatgcccaacacgctccctctctcttcctcccacttgaacgtgtactctagcgatccacaggtgacagcttccctggtcggcgtgaccagtagcagctgcccggcagatttgacacagaaacgggaactgaccgacgccgaatcccgggccttggctaaagaaagacagaagaaagacaatcacaacctaattgaaaggcggcgaaggtttaacattaacgaccggataaaggagttggggatgcttatccccaaggcaaacgatctggacgtccggtggaataagggtaccattctcaaagcatccgtggattatatcagaagaatgcagaaggacttacagaagagccgcgagctggaaaaccattcacgccgcctcgaaatgacgaataagcaactgtggcttagaatccaggaactggaaatgcaagcgagggtccacgggcttcccacaacatccccgagtgggatgaatatggctgagcttgctcagcaggtagttaagcaggagctcccctccgaggagggcccgggagaggcactgatgctgggcgctgaggtgcctgaccccgagcctctgccagccctgcctcctcaggctcccctgcctctccctacacagccaccgagcccttttcatcacttagattttagccactctctctcatttggcggacgcgaggacgaaggaccacccggttacccagagcccctcgcgccaggccatggcagcccattcccatctttgtctaaaaaggatcttgatctgatgctcctggatgatagccttctccctcttgcaagtgatcccctcctgtcaaccatgtctcccgaagcttccaaagcaagcagccgtaggagcagtttttctatggaggaaggcgacgttctctag

SEQ ID NO: 289476 - DNA, 1431 bp, Artificial Sequence
  derived and/or modified sequence
atggccagccggatcggcctgcggatgcagctgatgcgggagcaggcccagcaggaggaacaacgcgagaggatgcaacagcaggctgttatgcactatatgcaacagcagcagcagcagcagcagcagcaactgggagggcctccgactccagccataaacacacccgtgcacttccagagtcctcctccagttccgggggaggtgctcaaggtacagtcctacctcgagaatccaacctcctaccatttgcaacagtcgcaacaccagaaagtccgagaatacctgtcggaaacctacggaaataagttcgcagcccatatcagcccggcccagggcagccccaagccacctcccgctgcttcccctggagtgcgagctggtcatgtgctatcatcgagcgctgggaattccgctcctaactcccccatggctatgctgcacatcggcagcaacccggaaagggaactcgatgatgtcatcgataacatcatgaggctggatgacgtactaggatatataaaccctgagatgcagatgcccaatacactgccactgtctagcagtcacctgaacgtgtactcgtccgacccccaggtgaccgcttctttggtcggcgtcactagctcttcatgtccagctgacctgactcagaagcgcgagcttacagatgctgaaagtcgggccctcgccaaagaaagacagaagaaggacaatcacaatctgatcgaaagacgtagacgcttcaatattaacgatcgaattaaggagctggggatgctcatcccaaaagctaacgatctcgatgtgaggtggaataagggaactattttaaaagcttccgtggactatatccggcgcatgcagaaggatcttcagaaaagccgtgagctggagaaccattcccggcggcttgagatgacaaataaacagttatggctgcgcatacaggagctggaaatgcaggctcgggtccatggcttgcctaccaccagcccttcgggcatgaatatggctgaactggcccagcaggtcgtgaaacaggaacttccgagtgaggaagggccaggggaagcgctgatgctgggcgctgaggttcctgatccagagcctctgccggctctgcccccccaggctcctctgccgttgcccacccaaccgccaagcccgtttcaccatttagattttagccacagcctgagtttcgggggcagagaagatgaagggccacctggataccctgagcccttagcaccagggcacggcagcccctttccgtccttgagcaaaaaagacctggacctgatgcttctagacgattccctgttgccactcgcaagcgatccactgctgagcacgatgagtccggaagcaagtaaagcgagctccagaaggtctagcttttccatggaggagggcgacgtcctgtag

SEQ ID NO: 289477 - DNA, 1431 bp, Artificial Sequence
  derived and/or modified sequence
atggcaagcagaataggactacgcatgcagttaatgcgggaacaggcccaacaggaggagcagagggaacgtatgcagcagcaggcggtaatgcactacatgcagcagcagcagcagcagcagcagcaacagttgggagggccacctactcctgctattaacaccccagtccatttccagagtccacctccagtgcccggagaggtgctaaaggtgcaatcctacctggagaacccaaccagttatcatttgcagcagtctcaacatcagaaagtgcgggagtatttaagcgagacttatgggaataagttcgctgcccacattagtccggcacaagggtcacctaagcctccgccagctgcctccccaggtgtgcgcgctgggcacgttttaagcagctccgcgggtaattctgccccaaatagcccaatggccatgctgcatatcgggagtaaccccgagcgcgaactggacgacgtcattgacaacatcatgagactggacgacgtcttgggctacattaaccccgaaatgcagatgccaaacacacttcctttatcaagcagccacttgaatgtttattcgtctgatccccaagtcactgccagcttggtgggggttacgtcgagctcgtgtccagctgatctcacccagaaacgggagctgacagatgccgagtcccgcgctctggctaaagaaaggcaaaaaaaggataatcacaacctaatcgagcgtcggaggaggtttaacattaacgatcggattaaagaactgggcatgttgatccccaaagctaacgatctcgatgtgaggtggaataagggcaccattctcaaagcttctgtggactatattaggagaatgcagaaggacctccagaaaagccgtgaactcgagaaccatagcaggcggttggagatgaccaataagcagctgtggctgcgtattcaagagctcgagatgcaagctagggtgcacggcttacctacgacgtccccttcagggatgaacatggctgaactggctcagcaggtggtgaaacaggagctccctagcgaggaggggcctggggaagccttaatgcttggagcagaggttcccgacccagaacctctcccagctctccccccacaggctcctctccccctgccaacccagccacctagcccattccaccatctagacttttcccattctctgagctttggcggtagagaggatgagggtccacctgggtacccagagccactggctcctggacacggatcaccattcccctccctgtcaaagaaagatctcgatctcatgctgctggacgactcactcctgccattggcatccgatccgctgctgtcaacaatgagtccggaggctagcaaagcttccagtaggaggagttctttcagcatggaggagggagatgtattgtag

SEQ ID NO: 289478 - protein, 390 aa, Artificial Sequence
  derived and/or modified sequence
MALLTPAPGSQSSQFQLMKALLKHESVGSQPLQDRVLQVPVLAHGGCCREDKVVASRLTPESQGLLKVEDVALTLTPEWTQQDSSQGNLCRDEKQENHGSLVSLGDEKQTKSRDLPPAEELPEKEHGKISCHLREDIAQIPTCAEAGEQEGRLQRKQKNATGGRRHICHECGKSFAQSSGLSKHRRIHTGEKPYECEECGKAFIGSSALVIHQRVHTGEKPYECEECGKAFSHSSDLIKHQRTHTGEKPYECDDCGKTFSQSCSLLEHHRIHTGEKPYQCSMCGKAFRRSSHLLRHQRIHTGDKNVQEPEQGEAWKSRMESQLENVETPMSYKCNECERSFTQNTGLIEHQKIHTGEKPYQCNACGKGFTRISYLVQHQRSHVGKNILSQ

SEQ ID NO: 289479 - protein, 330 aa, Artificial Sequence
  derived and/or modified sequence
RQRFRGFRYPEAAGPREALSRLRELCGQWLQPEMHSKEQILELLVLEQFLTILPGNLQSWVREQHPESGEEVVVLLEYLERQLDEPAPQVERTGLVSERCARGIPLRSRSSSSLFVLAFLPWQGITHSCRPFVVSGGEIQTKSRDLPPVKKLPEKEHGKICHLREDIAQIPTHAEAGEQEGRLQRKQKNAIGSRRHYCHECGKSFAQSSGLTKHRRIHTGEKPYECEDCGKTFIGSSALVIHQRVHTGEKPYECEECGKVFSHSSNLIKHQRTHTGEKPYECDDCGKTFSQSCSLLEHHKIHTGEKPYQCNMCGKAFRRNSHLLRHQRIH

SEQ ID NO: 289480 - DNA, 411 bp, Artificial Sequence
  derived and/or modified sequence
atggcccactacatcaccttcctgtgcatggtgctggtgctgctgctgcagaacagcgtgctggccgaggacggcgaggtgagaagcagctgcagaaccgcccccaccgacctggtgttcatcctggacggcagctacagcgtgggccccgagaacttcgagatcgtgaagaagtggctggtgaacatcaccaagaacttcgacatcggccccaagttcatccaggtgggcgtggtgcagtacagcgactaccccgtgctggagatccccctgggcagctacgacagcggcgagcacctgaccgccgccgtggagagcatcctgtacctgggcggcaacaccaagaccggcaaggccatccagttcgccctggactacctgttcgccaagagcagcagattcctgacctag

SEQ ID NO: 289481 - DNA, 411 bp, Artificial Sequence
  derived and/or modified sequence
atggctcactacattacttttctttgtatggtcttggtcttactgctgcaaaacagtgtgcttgctgaggacggagaggttcgcagctcttgcaggactgcaccaaccgacttagtctttatcctagatggatcctattcagtggggcccgagaacttcgaaatagtgaaaaagtggctggtgaacattacgaaaaatttcgacataggtcccaaattcattcaggtgggagttgtccaatactctgattacccagtactggaaatcccactcggctcgtacgactccggcgaacacttgactgcagcagttgagtctatcctgtacctcggcggaaacactaaaacaggtaaagcaattcagtttgcactcgactacctgttcgccaagtcatcacgcttcctgacgtag

SEQ ID NO: 289482 - DNA, 411 bp, Artificial Sequence
  derived and/or modified sequence
atggcccactacatcaccttcctgtgcatggtgctggtgctgctgctgcagaacagcgtgctggctgaagatggagaggtgcgcagcagctgcaggacagcccccacagacctggtgttcatcctggatggcagctacagcgtgggcccagaaaattttgaaattgtgaagaagtggctggtgaacatcaccaagaactttgatattggccccaagttcatccaggtgggcgtggtgcagtacagcgactaccctgtgctggagatccccctgggcagctatgacagcggggagcacctgacagctgctgtggagagcatcctgtacctgggcggcaacaccaagacaggcaaggccatccagtttgccctggactacctgtttgccaagagcagccgcttcctgacctag

SEQ ID NO: 289483 - DNA, 411 bp, Artificial Sequence
  derived and/or modified sequence
atggcccactacatcaccttcctgtgcatggtgctggtgctgctgctgcagaattcggtgctcgcagaggacggggaggttaggtcctcatgccgaacagccccaaccgatctggtgtttatactggatggatcttattctgtggggcctgagaactttgaaattgtgaagaaatggctggtaaatattaccaaaaacttcgatatcggcccaaaatttatccaggtgggggtcgtgcagtatagtgactatcccgtgctcgagatccccctggggtcttatgattcaggagaacaccttactgctgcagtagagagcattctgtatcttggcgggaacaccaagaccggaaaggcaatccagttcgctctggattatctgttcgccaaaagctcccggttcctgacctag

SEQ ID NO: 289484 - DNA, 624 bp, Artificial Sequence
  derived and/or modified sequence
gcaacactcagctggctgcgacggcaaccccgagcctggacactgcgccaggaaacctcttctggcatccttagtaaatggcagtagagtcatctgggaggtaaaagaagattgtaccatgtgagggatctcctacccaggaaacaaagcccacaggaagaccatcacataggaatggaatcctaaaaccaaaatattagaacgaaaacagaaacatggctcactatattacatttctctgcatggttttggtgctgcttcttcagaattctgtgttagctgaagatggggaagtaagatcaagttgtcgtactgctccgacagatttagttttcatcttagatggctcttatagtgttggcccagaaaactttgaaatagtgaaaaagtggcttgtcaatatcacaaaaaactttgacatagggccgaagtttattcaagttggagtggttcaatatagtgactaccctgtgctggagattcctctcggaagctatgattcaggagaacatttgacggcagcagtggaatccatactctacttaggaggaaacacaaagacagggaaggccatccagtttgcgctcgattacctttttgccaagtcctcacgatttctgacta

SEQ ID NO: 289485 - DNA, 411 bp, Artificial Sequence
  derived and/or modified sequence
atggcccattatataactttcctctgcatggttctggtgctgttgctgcagaatagtgtcttagccgaggatggagaagtgaggagcagctgtcgcactgctcctacagatcttgtgtttatacttgacggttcttacagtgttggacctgagaacttcgaaattgtgaagaaatggctggttaatatcaccaagaatttcgatatcgggcctaaattcatccaggtgggcgtagttcagtactccgactaccccgttcttgaaatccctctcgggagctatgattcgggagagcacctgacagcagctgtagagtctatcctgtatctcggcggaaacaccaagacagggaaggcaatacagtttgccctggattacctctttgcgaagagcagtaggttcttgacgtag

SEQ ID NO: 289486 - DNA, 972 bp, Artificial Sequence
  derived and/or modified sequence
atgatcgccagcggcatccccggcttccccggcaacagaggcctgatgggccagaagggcgagatcggcccccccggccagcagggcaagaagggcgcccccggcatgcccggcctgatgggcagcaacggcagccccggccagcccggcacccccggcagcaagggcagcaagggcgagcccggcatccagggcatgcccggcgccagcggcctgaagggcgagcccggcgccaccggcagccccggcgagcccggctacatgggcctgcccggcatccagggcaagaagggcgacaagggcaaccagggcgagaagggcatccagggccagaagggcgagaacggcagacagggcatccccggccagcagggcatccagggccaccacggcgccaagggcgagagaggcgagaagggcgagcccggcgtgagaggcgccatcggcagcaagggcgagagcggcgtggacggcctgatgggccccgccggccccaagggccagcccggcgaccccggcccccagggcccccccggcctggacggcaagcccggcagagagttcagcgagcagttcatcagacaggtgtgcaccgacgtgatcagaggccccgagggccccagaggcctgcccggcctgcccggcagagacggcgtgcccggcctggtgggcgtgcccggcagacccggcgtgagaggcctgaagggcctgcccggcagaaacggcgagaagggcagccagggcttcggctaccccggcgagcagggcccccccggcccccccggccccgagggcccccccggcatcagcaaggagggcccccccggcgaccccggcctgcccggcaaggacggcgaccacggcaagcccggcatccagggccagcccggcccccccggcatctgcgaccccagcctgtgcttcagcgtgatcgccagaagagaccccttcagaaagggccccaactactag

SEQ ID NO: 289487 - DNA, 972 bp, Artificial Sequence
  derived and/or modified sequence
atgattgcgtcaggcatccccggattcccagggaatagagggttgatgggccaaaagggggagattggtccacccggccagcagggcaaaaagggggcccccggcatgccagggctgatgggttcaaatggttccccggggcagcccggcacaccaggcagtaaggggagcaaaggcgaaccaggaatccaggggatgcccggtgcctcaggattgaaaggagaacccggcgccactggctcccccggtgagcccggttatatggggctccccggaatccaaggtaagaagggggataaggggaatcagggcgagaaggggatccaggggcagaaaggtgaaaacggacggcagggaatccccgggcagcagggtatccagggtcatcacggcgcgaagggagaaaggggggaaaagggcgagccaggcgtgcgaggcgcaattgggtccaagggcgaaagcggggttgatggactgatgggaccagccgggccgaaggggcagccaggggatccgggacctcaaggtccccccggcctcgatgggaaaccaggccgagagttttccgagcaatttatccgccaggtttgcaccgacgtgatccgcggccctgagggccctcgcggtctgcctggtctgcctggcagagacggcgtgcctggtctcgtgggggtccccgggaggcccggggtaaggggactcaaggggctgccaggtcgcaatggcgagaaggggagccaggggtttggctatcccggcgagcagggaccacccggaccacctggcccggaaggccctcccgggatttccaaggaggggccccccggagaccctggcctgccaggcaaagatggcgatcacggaaaaccgggcatccagggacagcctggcccccctgggatttgtgatcctagcttgtgttttagcgtcatagccagacgggatccctttcggaagggcccaaactattag

SEQ ID NO: 289488 - DNA, 972 bp, Artificial Sequence
  derived and/or modified sequence
atgattgccagcggcatccctggcttccctggcaacagaggcctgatgggccagaagggggagatcggccccccaggccagcagggcaagaagggggcccctggcatgcctggcctgatgggcagcaatggcagccctggccagcccggcaccccaggcagcaagggcagcaagggggagcccggcatccagggcatgcctggggccagcggcctgaagggggagcccggggccaccggcagccctggagagcccggctacatgggcctgcccggcatccagggcaagaagggggacaagggcaaccagggcgagaagggcatccagggccagaagggggagaatggccggcagggcatccctggccagcagggcatccagggccaccacggggccaagggggagcggggggagaagggggagcccggggtgcggggggccatcggcagcaaaggagagagcggcgtggatggcctgatgggccctgctggccccaagggccagcccggggaccccggcccccagggccccccaggcctggatggcaagccaggccgggagttcagcgagcagttcatccggcaggtgtgcacagatgtgatccggggccctgagggcccccggggcctgcccggcctgcccggcagagatggagtgcccggcctggtgggcgtgcccggccggcctggggtgcggggcctgaagggcctgcccggcagaaatggagagaagggcagccagggcttcggctacccaggagagcagggccccccaggccccccaggccctgagggccccccaggcatcagcaaggagggccccccaggggaccccggcctgcccgggaaggatggagaccacggcaagccaggcatccagggccagcccggccccccaggcatctgtgaccccagcctgtgcttctctgtgattgcccggcgggaccccttcaggaagggccccaactactag

SEQ ID NO: 289489 - DNA, 2038 bp, Artificial Sequence
  derived and/or modified sequence
atgattgcatcaggaatcccaggatttcctggaaaccgaggattaatgggccaaaagggagaaattgggcctccaggacagcaaggaaaaaaaggagccccagggatgcctggtttaatgggaagcaatggctcaccaggccagcctggaacaccgggatctaagggaagcaaaggtgaacctggaattcaagggatgcctggggcttctgggctcaagggagaaccaggagcaacgggttccccaggagaaccaggatacatgggtttacccgggattcaaggaaaaaagggggacaaaggaaatcaaggtgaaaaaggtattcagggtcaaaagggagaaaatggaagacagggaattccagggcaacagggaattcaaggccatcatggtgcaaaaggagagagaggtgaaaagggagaacctggtgtccgaggtgccattggatcaaaaggagaatctggggtggatggcttgatggggcccgcaggtcctaaggggcaacctggggatccaggtcctcagggacccccaggtttggatgggaagcccggaagagagttttcagaacaatttattcgacaagtttgcacagatgtaataagaggcccagagggtcccagaggattacctggtttgccaggaagagatggtgttcctggattagtgggtgtccctggacgtccaggtgtcagaggattaaaaggcctaccaggaagaaatggggaaaaagggagccaagggtttgggtatcctggagaacaaggtcctcctggtcccccaggtccagagggccctcctggaataagcaaagaaggtcctccaggagacccaggtctccctggcaaagatggagaccatggaaaacctggaatccaagggcaaccaggccccccaggcatctgcgacccatcactatgttttagtgtaattgccagaagagatccgttcagaaaaggaccaaactattagtgtctgatgcctcattcagcagcctaggcatggtgctttttctgtggtcttttgcatctcaggaagataaccaacagtaatcccttgaaaagaaacttaagtacctcggtgtttttattttttttttcttatggaaaaaaatataaaagatcacatatactgattttaaaggctcctcagtcatttggagcccttggattagcagcattaattaaatctcaagggtttcttgtaaagtccatttatgttaatcaaagttgaatataaaaatccaccattgcctgttagccagtcagttttagtcactgtgaaatatttcacattcagcctccatgcagtagagatttgagtttaatttcatgtccatgtgactttcatgtttcctatctcatagctcatgctactacataagccaaaacatgtatctcatcattggaagtaagatcagggctgatattcacctgggatagacagtattggtgaactactcatttactacagtgtctcagccttgataaggggcagtggattgcctgttgttcggtgttgtgaatagcacctctgaataagattagagtgtttcttaattcatttcaaactctaaaattagattaatggtggtgctaagaaagagtattaattactttgggaatggtcaaaattaacattaaaaacattttagacaaaaagtttcattgtacattcaaagaaaatgtaagtttggaagtactaaaagactattttatacttgttgattaatcggaatgtttgttgtatgccttcattttccatttcacttatatgtgtatgtccatatatgttaattttcattgtagcaaagctaatggaaataaagctaatgctctagttgaaagaaaaggaaaactcctgaaatcctagaatgtcttgttatttttagctgactgtaaaatattatgaacagtctttgtgtattgtgcttaatgcttttgtaagaaacagaatttgaaatatttcatccttgtcatgctcaaaattttgttacatgcttgttattcagagtataataaagttttgtacaggcctg

SEQ ID NO: 289490 - DNA, 972 bp, Artificial Sequence
  derived and/or modified sequence
atgattgcctcgggtatccccggtttccctggaaaccgaggtctgatggggcaaaagggagagattggtccccctggccaacagggaaaaaaaggggctcctggcatgccaggactgatggggagcaacgggagcccaggacagcctggcacaccaggctctaaggggagcaagggggagccagggatacagggcatgcccggagcatcaggacttaagggggagcccggagccaccggcagccccggtgaacctggatatatgggtctgccaggtatccagggcaagaagggcgataaaggcaaccagggggaaaagggaatccagggacagaagggggagaacggcaggcaaggcataccaggacagcagggaatccagggtcatcacggagctaagggcgagcggggtgaaaaaggcgagcctggtgtccgtggcgcaatcggctctaagggcgaaagcggcgtggacggactgatgggccctgcaggaccgaagggacagccaggtgaccccggtccacagggtcctcctgggttagacggcaagcccggacgtgagtttagtgagcaattcatccgccaggtttgcacagacgtgatcagaggcccagagggcccaaggggcttacctggcctgcctggaagagatggggtgccgggattggtgggagttccagggaggcccggtgtgagaggtctgaaggggctcccaggtaggaatggcgagaagggatctcaagggttcggctaccccggtgagcaaggtcccccagggcctccagggccagaaggtccacccggaatctccaaagaagggcctccaggtgacccaggcctgccaggcaaggacggggaccacggaaaacccggaatacagggacagccaggtcctcccggaatatgtgacccatccttgtgtttctctgtcatcgcaaggcgtgatccctttcgaaaaggtccaaattactag

SEQ ID NO: 289491 - DNA, 297 bp, Artificial Sequence
  derived and/or modified sequence
atgggcgagcccggcttcttcgtgaccggcgacagagccggcggcagaagctggtgcctgagaagagtgggcatgagcgccggctggctgctgctggaggacggctgcgaggtgaccgtgggcagaggcttcggcgtgacctaccagctggtgagcaagatctgccccctgatgatcagcagaaaccactgcgtgctgaagcagaaccccgagggccagtggaccatcatggacaacaagagcttccccagcgagaaggccgaggacttcaccgccgccggcgagagattcctgtag

SEQ ID NO: 289492 - DNA, 297 bp, Artificial Sequence
  derived and/or modified sequence
atgggagagcctggttttttcgttactggagacagggccggggggcgctcttggtgcctgcgtagagtgggaatgtccgccggatggctgctgctggaagacggttgcgaggtgacggtcgggcgagggtttggcgtgacatatcagctcgtgtctaagatttgtcccctcatgatctctagaaaccattgcgtcctaaaacagaaccccgagggtcagtggaccatcatggacaacaaatcctttccttccgaaaaggccgaggacttcactgccgccggggaacggttcctctag

SEQ ID NO: 289493 - DNA, 297 bp, Artificial Sequence
  derived and/or modified sequence
atgggagagcccggcttctttgtgactggagacagagctgggggccgctcctggtgcctgcggcgggtgggcatgtctgctggctggctgctgctggaggatggctgtgaggtgacagtgggccggggcttcggcgtgacctaccagctggtgtccaagatctgccccctgatgatcagcaggaaccactgtgtgctgaagcagaaccctgagggccagtggaccatcatggacaacaagagcttccccagcgagaaggccgaggacttcaccgctgctggggagcgcttcctgtag

SEQ ID NO: 289494 - DNA, 297 bp, Artificial Sequence
  derived and/or modified sequence
atgggcgagcccggcttcttcgtgaccggcgaccgggccggcggccggtcttggtgcctgaggagggtgggcatgtccgccgggtggctactgcttgaagacggctgcgaggtgacagtgggaagagggttcggagtaacataccagttagtgagtaagatatgccccctaatgatctcccgcaatcactgtgtgctgaaacagaaccctgaaggacagtggaccatcatggacaacaaatctttcccctccgagaaagctgaggactttacagccgccggtgaaagatttttatag

SEQ ID NO: 289495 - DNA, 297 bp, Artificial Sequence
  derived and/or modified sequence
atgggagaacctgggttctttgtgaccggcgatagggctggcggacgttcttggtgtctgaggcgtgtgggaatgtccgccggatggcttctgctcgaagacggatgcgaggtgaccgtgggacgtggcttcggtgttacatatcagctggtctccaaaatttgcccactgatgatcagccggaaccattgtgtactgaagcagaatcctgaaggacagtggacaattatggataataagagcttcccgagtgagaaggcagaagatttcacggcagcaggtgagcggtttctgtag

SEQ ID NO: 289496 - DNA, 419 bp, Artificial Sequence
  derived and/or modified sequence
gagcgtgtggcgattgcttctgtctgttatttagatatggaagctgaggggatgcacagaggcagccagaacctaggtcagggtctcgctcggtgctgaccgcccccggggtcgagtaggcgatgggggagcccggcttcttcgtcacaggagaccgcgccggtggccggagctggtgcctgcggcgggtggggatgagcgccgggtggctgctgctggaagatgggtgcgaggtgactgtaggacgaggatttggtgtcacataccaactggtatcaaaaatctgccccctgatgatttctcgaaaccactgtgttttgaagcagaatcctgagggccaatggacaattatggacaacaagagttttccttctgaaaaggcagaagattttacagcagcaggagagagattcctttaa

SEQ ID NO: 289497 - DNA, 2442 bp, Artificial Sequence
  derived and/or modified sequence
cgcaagaatgcatacaaactccagggctgctctctcctggagagggagggaggggatttaaaaacctgcagcaacatgggggaggaggctgtttgtccttctctctctggggaagtaactcgctcaaactgccttccttgctgagctgcttcgcgtagctttgaggaaggtctagtgaaattggtctttccattacatctggatgtactaccagagagttctgctgctgttgttttttttagcttttctttctttgagtctttaaagggcaattgtcgacactctgcaaacataccgatttgttgtctgcccactttggagtcttcaatctgggcagtaactatttaccctttttcctgctagcctgtccccctctctggattgaagtcacctgctaagacaatggactaccgaccagactcccggaaatcatgttggtaggatcccagtctttttcgcctggagggcccaatgggatcattagaagccagtcctttgcgggtttcagcggcctccaggaaaggcgatccaggtgtaactccttcattgaaaattcctccgctctcaagaagcctcaggccaaactgaagaaaatgcacaatttaggccacaaaaacaacaatccccccaaagagcctcagcctaaaagggtggaagaagtctacagggccttgaaaaatggacttgatgaatatctggaggttcaccagacggagctggacaagttgacagctcagttaaaagatatgaaaagaaactctcgcctgggtgtactgtatgacctagacaagcaaattaaaacaattgaaagatacatgagacgcctggagtttcatataagtaaggtagatgaactctatgaagcttattgtatccagcgacgcctccaggatggtgccagcaaaatgaagcaagccttcgcaacatcccctgccagcaaagctgcccgggagagtctgacagagatcaatcggagcttcaaggagtacacagagaatatgtgcaccattgaagtggagctagagaatctgctgggagaattctccatcaagatgaaaggtctggctggctttgcacgcctctgtcctggagatcaatatgaaattttcatgaagtatggccggcagcggtggaaactgaaaggcaaaatagaagtaaatggcaagcagagctgggatggagaagaaacagtttttctgcccctgatagttgggttcatctccatcaaggtcacggagctcaaagggctagcaactcacatcctggtaggtagcgtgacctgtgagaccaaagagctgtttgcagcccgacctcaggtagtggctgtcgacatcaatgaccttggtaccatcaaactgaacctggaaatcacctggtatccatttgacgtggaggacatgaccgcatcctcaggcgctgggaacaaggcagcagcccttcagaggagaatgtccatgtacagccagggtaccccggaaacgcccaccttcaaagaccactccttcttttcaaatctacctgatgacatctttgaaaatggaaaggcagccgaggagaaaatgccactgtcgctcagcttcagtgacctgcccaacggggactgcgccctcacctcccactcaacaggctccccttccaactcaacaaatccagaaattaccatcacccctgcggagtttaacctcagcagcttggcctcccagaatgagggtatggatgacaccagctcagcatcttccaggaactccctgggagaaggccaagagccaaagtcacacctgaaggaggaagacccagaggagcccagaaaacctgcctcggccccatctgaggcttgccgccgacagtcctcaggtgctggggctgagcacctgttccttgagaatgatgttgcagaagcacttctgcaagagtctgaggaggcctctgagctcaagcctgtggaactggacacttcggaaggaaacatcacaaagcagctggtcaagaggctcacatctgcagaggtgccaatggccacagacaggctgctctctgagggttctgttggtggagaatctgaaggctgcagatcctttctagatggaagcttagaggatgcttttaatgggcttttacttgcattagaaccacataaagagcagtataaagagtttcaggatctgaaccaagaagtcatgaatttggatgatattctaaaaaagtagagaagatcctctaatggatcccagtgtgcccatccctcaacctcctcagtgatcaactcatggccaatcttgtttcctattcttcaacctgctgacttccctctggattcttctgcaaccagtcccagatattgtgccattttatccatggttgtacttcttttttggatataaagatttttaaatgcattttttaaatgctaacaaaaaataaaaacttgaaacaaaaaaaaaa

SEQ ID NO: 289498 - protein, 447 aa, Artificial Sequence
  derived and/or modified sequence
MQPWHGKAMQRASEAGATAPKASARNARGAPMDPTESPAAPEAALPKAGKFGPARKSGSRQKKSAPDTQERPPVRATGARAKKAPQRAQDTQPSDATSAPGAEGLEPPAAREPALSRAGSCRQRGARCSTKPRPPPGPWDVPSPGLPVSAPILVRRDAAPGASKLRAVLEKLKLSRDDISTAAGMVKGVVDHLLLRLKCDSAFRGVGLLNTGSYYEHVKISAPNEFDVMFKLEVPRIQLEEYSNTRAYYFVKFKRNPKENPLSQFLEGEILSASKMLSKFRKIIKEEINDIKDTDVIMKRKRGGSPAVTLLISEKISVDITLALESKSSWPASTQEGLRIQNWLSAKVRKQLRLKPFYLVPKHAKEGNGFQEETWRLSFSHIEKEILNNHGKSKTCCENKEEKCCRKDCLKLMKYLLEQLKERFKDKKHLDKFSSYHVKTAFFHRLY

SEQ ID NO: 289499 - DNA, 372 bp, Artificial Sequence
  derived and/or modified sequence
atggctacccatcgctccacccttgccggctactctccctgttcttccccccagcgtgcagcaccaacgaggaatcaaaaggctgaaaaggcacgtaatcgacaggcttctcctatccccacacgactgcccagaaacccatcattggcttctaccggacggcaaggaacgccgatgtcccggaagaaacaaggatctgactgtcttgtgtacccggggcatccacccgggctgtggcctgtgatttcatgccacctggggttaagtgcactttcctcagagatctggacctccaattgtctgtgtctggctgctctgccctgcgacactgggctggaatcccttaccgtggtgtgttggtcgggcatatag

SEQ ID NO: 289500 - DNA, 372 bp, Artificial Sequence
  derived and/or modified sequence
atggccacccacaggagcaccctggccggctacagcccctgcagcagcccccagagagctgcccccaccaggaaccagaaggccgagaaggccaggaaccggcaggccagccccatccccacccggctgcccaggaaccccagcctggccagcacaggccggcagggcacccccatgagcaggaagaagcagggcagtgactgcctggtgtacccaggccaccccccaggcctgtggcctgtgatcagctgccacctgggcctgagcgccctgagcagcgagatctggaccagcaactgcctgtgcctggccgccctgccctgtgacaccggcctggagagcctgactgtggtgtgctggagcggcatctag

SEQ ID NO: 289501 - DNA, 372 bp, Artificial Sequence
  derived and/or modified sequence
atggccacccaccggagcaccctggccggctacagcccctgcagctcaccacaaagggcagcccctactcggaaccagaaggccgagaaagctagaaacaggcaagcgtctcccatcccgacccgtttaccacggaacccaagcctcgcttcaactgggcggcaaggcacccctatgtcaaggaaaaaacaggggtccgattgcctagtataccctggtcatcctcccggcctctggcctgttatcagttgtcacctgggactctctgcactctcgtccgaaatctggaccagcaattgcctctgtctggctgccctgccgtgcgacacgggactggagtcgctgactgttgtttgctggagcggtatctag

SEQ ID NO: 289502 - DNA, 372 bp, Artificial Sequence
  derived and/or modified sequence
atggcaacccatcggagcaccctcgcaggttattccccgtgttcttcccctcagagggccgcacccaccagaaatcagaaggccgagaaggccaggaatcgccaggccagccccattcccacccgcctgccacgcaatccttcccttgcctctactgggagacaggggacaccaatgagcaggaagaagcaggggtccgactgtttggtgtacccaggccacccacctggtctttggccagtgattagctgccaccttgggttgagtgcactgtcttcagaaatttggacaagtaattgtctgtgtctggcagcgttaccatgcgacactggtctggagagcttgactgtggtgtgttggagtgggatctag

SEQ ID NO: 289503 - DNA, 1344 bp, Artificial Sequence
  derived and/or modified sequence
atgcagccctggcatggtaaggctatgcagagagcctccgaagccggcgccaccgcaccaaaagcctctgcccgcaatgccagaggagctccaatggatcctaccgagtccccagcagcgccagaggccgcgctgccaaaggccggcaaattcgggcctgcgagaaaaagcggttctcgccaaaagaagagcgcacccgacacacaagagagaccacctgttcgggctacgggagcccgggccaaaaaggccccccaacgtgctcaggacacacagccatcggatgccacttcagccccgggggcagagggattggagcccccagcagctcgagagcccgctcttagtcgcgccggatcctgccgccagagaggtgcccgctgctcaacaaagccccggccaccacctggcccttgggatgtcccttctccagggttaccagtgagtgcaccgatcctggttcgcagagatgctgcaccaggcgctagtaaactccgggcagttttggagaagctcaaactgtctagagatgatatttcaacagctgccggcatggtgaagggagtggtggaccacctgctccttcggttgaaatgtgatagcgccttcaggggtgtgggtctgctcaatacgggtagctattatgagcatgtgaagattagcgcaccaaatgaattcgatgtgatgtttaagctggaggtaccccgtatacagctggaagaatacagcaacacgagggcctattattttgtgaaatttaagaggaaccctaaggagaatccactttctcagtttctggaaggagaaatcctgagtgcgagcaagatgctgagcaaattcagaaaaatcataaaggaagaaataaacgacatcaaggacacagacgtgatcatgaagcgtaagagaggaggatccccagcagtgacgctgctgatttctgagaaaatctccgtcgatatcaccttagcccttgagtcaaagtcttcttggccagcgagtacacaggaaggcttgaggattcagaattggttatctgcaaaggtccgaaagcaacttaggctgaaacctttctatctggtgcccaagcacgcgaaagaggggaacggcttccaggaagagacgtggcggctttctttttctcacattgaaaaggaaattctgaataatcatggtaagtccaagacgtgctgtgagaacaaggaagagaaatgttgccgaaaggactgccttaagcttatgaagtacctcctcgagcagctaaaagagagattcaaggataaaaaacatctagacaaattctcatcttatcacgtgaagacggcattttttcatcggctgtactag

SEQ ID NO: 289504 - DNA, 1344 bp, Artificial Sequence
  derived and/or modified sequence
atgcagccctggcacggcaaggccatgcagagggccagcgaggccggggccacagcccccaaggccagcgccagaaatgcccggggggcccccatggaccccacagagagccctgctgcccctgaggccgccctgcccaaggccggcaagtttggacctgccaggaagagcggcagccggcagaagaagagcgccccagacacccaggagcggccccctgtgcgggccactggagcccgggccaagaaggccccccagagggcccaggacacccagcccagtgatgccaccagcgcccctggagctgagggcctggagcccccagctgcccgggagcccgccctgagccgggccggcagctgccggcagagaggagcccgctgcagcaccaagccccggcccccacctggcccctgggatgtgcccagccctggcctgcctgtgtctgcccccatcctggtgagaagagatgctgcccctggggccagcaagctgcgggctgtgctggagaagctgaagctgagcagagatgacatcagcacagctgctggcatggtgaagggcgtggtggaccacctgctgctgcggctgaagtgtgacagcgccttccggggcgtgggcctgctgaacacaggcagctactatgaacatgtgaagatcagcgccccaaatgaatttgatgtgatgttcaagctggaggtgccccgcatccagctggaggagtacagcaacacccgggcctactactttgtgaagttcaagaggaaccccaaggagaaccccctgagccagttcctggagggggagatcctgagcgccagcaagatgctgagcaagttcaggaagatcatcaaggaggagatcaatgacatcaaggacacagatgtgatcatgaagaggaagagaggaggcagccctgctgtgaccctgctgatcagcgagaagatctctgtggacatcaccctggccctggagagcaagagctcctggccagccagcacccaggagggcctgcgcatccagaactggctgagcgccaaggtgaggaagcagctgcggctgaagcccttctacctggtgcccaagcacgccaaggagggcaatggcttccaggaggagacctggaggctgtccttcagccacatcgagaaggagatcctgaacaaccacggcaagagcaagacctgctgtgagaacaaggaggagaagtgctgcaggaaggactgcctgaagctgatgaagtacctgctggagcagctgaaggagcgcttcaaggacaagaagcacctggacaagttcagcagctaccacgtgaagacagccttcttccaccggctgtactag

SEQ ID NO: 289505 - DNA, 1917 bp, Artificial Sequence
  derived and/or modified sequence
aacagctgctgctggctcttcctcttgcggccttttcctgaaacggattcttctttcggggaacagaaagcgccagccatgcagccttggcacggaaaggccatgcagagagcttccgaggccggagccactgcccccaaggcttccgcacggaatgccaggggcgccccgatggatcccaccgagtctccggctgcccccgaggccgccctgcctaaggcgggaaagttcggccccgccaggaagtcgggatcccggcagaaaaagagcgccccggacacccaggagaggccgcccgtccgcgcaactggggcccgcgccaaaaaggcccctcagcgcgcccaggacacgcagccgtctgacgccaccagcgcccctggggcagaggggctggagcctcctgcggctcgggagccggctctttccagggctggttcttgccgccagaggggcgcgcgctgctccacgaagccaagacctccgcccgggccctgggacgtgcccagccccggcctgccggtctcggcccccattctcgtacggagggatgcggcgcctggggcctcgaagctccgggcggttttggagaagttgaagctcagccgcgatgatatctccacggcggcggggatggtgaaaggggttgtggaccacctgctgctcagactgaagtgcgactccgcgttcagaggcgtcgggctgctgaacaccgggagctactatgagcacgtgaagatttctgcacctaatgaatttgatgtcatgtttaaactggaagtccccagaattcaactagaagaatattccaacactcgtgcatattactttgtgaaatttaaaagaaatccgaaagaaaatcctctgagtcagtttttagaaggtgaaatattatcagcttctaagatgctgtcaaagtttaggaaaatcattaaggaagaaattaacgacattaaagatacagatgtcatcatgaagaggaaaagaggagggagccctgctgtaacacttcttattagtgaaaaaatatctgtggatataaccctggctttggaatcaaaaagtagctggcctgctagcacccaagaaggcctgcgcattcaaaactggctttcagcaaaagttaggaagcaactacgactaaagccattttaccttgtacccaagcatgcaaaggaaggaaatggtttccaagaagaaacatggcggctatccttctctcacatcgaaaaggaaattttgaacaatcatggaaaatctaaaacgtgctgtgaaaacaaagaagagaaatgttgcaggaaagattgtttaaaactaatgaaataccttttagaacagctgaaagaaaggtttaaagacaaaaaacatctggataaattctcttcttatcatgtgaaaactgccttctttcacagactctactgatatatttccaagtattaggtcacttgataagtgatccgcactgaagcaaaagataaactcagcattcttaggtgcttattctaatgccaccagttttacttctgttagcaaaaatctaaagtaacataacagacttatcacccccatttggaattagtatacaaatagaaatgatcctaatcaatttaattaattataatggacacacaagaaaaaatacctacacagcttttcgagaaacgaagacaatgactttgtctgtggatgacatactctgtagaaaagtttgcatgtgactccatttctcttcctcggtggttacaattatattttgcttcactgaacttacagcctaaaggattcaaagaacatagttcatcaaggtcatcatgattgagggtgagaccgcatacatcagctcaaaatgcatcttctctctcattggttaatgtttttaataaactgctaagcaaaatggcagacgtcctaaaaaaa

SEQ ID NO: 289506 - DNA, 1344 bp, Artificial Sequence
  derived and/or modified sequence
atgcagccctggcacggcaaggccatgcagcgggccagcgaggccggggcaacagctccaaaagcctcagcacgtaatgctcggggagctcccatggatcctactgagtcccccgccgccccagaggccgcactgccaaaggctggaaagttcggccctgccaggaaatccggatcaaggcagaaaaagagcgccccagacacacaggagcgcccccccgtccgagccacaggcgctagggcgaaaaaggcccctcagagagcccaggacactcaacctagtgacgcaacttccgcacctggggctgaaggtctggaacctcctgcagcgagagagcccgccctgagcagggcgggttcctgcaggcaacgcggggccagatgcagcacaaagccacgacccccccctggcccctgggacgtcccatcccccggcctcccagtgagcgccccaattctggtgaggcgggatgccgctccgggcgcctcaaaattgagggcagtgctagaaaaactgaagctcagtcgagacgatatctccacggcggccggaatggtgaaaggtgtcgtggatcaccttctgctccggctgaaatgtgactcagccttcaggggggtgggcctattgaataccgggagttactatgagcacgtgaagatctccgcaccgaatgagttcgacgtcatgtttaaactggaggtccctaggattcagttggaggagtattccaacacgcgggcctactattttgtgaaatttaaaagaaatcctaaggaaaatcctctgagtcaatttctcgaaggggaaatcctgtctgcttccaagatgctgagcaagtttcggaagataatcaaggaggaaattaatgatattaaggatacagatgtgataatgaaacggaaacgagggggcagccccgccgttacccttcttatctctgagaagatttccgttgatatcaccctggccttggagtctaagtctagttggcccgccagcacacaggaaggcctgcgcatacagaattggctttctgccaaggttcggaaacagcttaggctcaagccattctacctggtacctaaacacgcaaaggaggggaacggatttcaggaagagacgtggcggctcagcttctcgcacattgagaaggaaatcctcaacaaccatggcaagtctaagacgtgctgtgaaaataaggaagaaaaatgttgtaggaaggactgcctgaagctgatgaagtatcttctcgaacagctcaaagagagatttaaggacaagaagcacttagataagttctcttcatatcacgttaagaccgcctttttccaccgtttgtattag

SEQ ID NO: 289507 - DNA, 1344 bp, Artificial Sequence
  derived and/or modified sequence
atgcagccatggcacggcaaagcaatgcagagagcttcagaggccggagctaccgccccaaaagcaagtgcaagaaatgcacgcggagcgccaatggaccccacagagtctcccgctgctcctgaagcggctctgccaaaggccggtaaattcgggccagcccgaaaatcgggcagccgccagaaaaagtctgcgcctgacactcaggagaggccacctgttcgggctaccggtgccagggccaaaaaagcccctcaaagggcccaggatacgcaacctagcgatgctacaagcgccccaggcgcagagggtttggagcctccggctgcccgtgagccagcattgagtagagccggatcttgtaggcagaggggcgctagatgctccacaaagcctaggcccccacccggaccatgggacgtcccatctcctggtctcccggtctccgctccaatcttagttcgtagagatgccgctccaggggcttctaagcttagagccgtccttgagaaactcaagctctcacgggacgatatatccactgctgctggaatggtgaaaggcgtggtcgatcatctcctgctgcggctgaaatgtgacagtgccttcagaggagtaggtctgctgaataccggaagttattacgaacacgtcaagatcagcgccccaaacgagtttgacgtgatgttcaaactcgaggtacccagaatccagctcgaagaatactcgaacacacgtgcatattacttcgtgaagtttaaaagaaatcccaaggagaaccccttgtcacagtttcttgagggagagatcttgtctgcctccaagatgcttagcaagtttcggaagatcatcaaagaggagattaatgacattaaggataccgacgtgatcatgaagaggaaacggggagggtcccctgccgtgactttgcttatttccgagaagatctctgtagacattacactggctctcgagagtaagtcctcatggcccgcatctacccaggagggcctccgcattcagaattggctgtctgcaaaagtccggaagcaactgaggctgaagcccttctacctggttccaaagcacgcgaaggaaggaaatggctttcaagaggagacatggcgactgtcttttagtcacatcgagaaggaaattctgaacaaccacggaaaatcaaaaacatgctgcgaaaacaaggaggagaagtgctgcagaaaagactgtctcaagcttatgaaatatctgttggaacaactaaaggagcgctttaaagacaaaaagcatctggataagttttctagttatcacgtgaagacagccttctttcataggctctattag

SEQ ID NO: 289508 - DNA, 1344 bp, Artificial Sequence
  derived and/or modified sequence
atgcagccctggcacggcaaggccatgcagagagccagcgaggccggcgccaccgcccccaaggccagcgccagaaacgccagaggcgcccccatggaccccaccgagagccccgccgcccccgaggccgccctgcccaaggccggcaagttcggccccgccagaaagagcggcagcagacagaagaagagcgcccccgacacccaggagagaccccccgtgagagccaccggcgccagagccaagaaggccccccagagagcccaggacacccagcccagcgacgccaccagcgcccccggcgccgagggcctggagccccccgccgccagagagcccgccctgagcagagccggcagctgcagacagagaggcgccagatgcagcaccaagcccagacccccccccggcccctgggacgtgcccagccccggcctgcccgtgagcgcccccatcctggtgagaagagacgccgcccccggcgccagcaagctgagagccgtgctggagaagctgaagctgagcagagacgacatcagcaccgccgccggcatggtgaagggcgtggtggaccacctgctgctgagactgaagtgcgacagcgccttcagaggcgtgggcctgctgaacaccggcagctactacgagcacgtgaagatcagcgcccccaacgagttcgacgtgatgttcaagctggaggtgcccagaatccagctggaggagtacagcaacaccagagcctactacttcgtgaagttcaagagaaaccccaaggagaaccccctgagccagttcctggagggcgagatcctgagcgccagcaagatgctgagcaagttcagaaagatcatcaaggaggagatcaacgacatcaaggacaccgacgtgatcatgaagagaaagagaggcggcagccccgccgtgaccctgctgatcagcgagaagatcagcgtggacatcaccctggccctggagagcaagagcagctggcccgccagcacccaggagggcctgagaatccagaactggctgagcgccaaggtgagaaagcagctgagactgaagcccttctacctggtgcccaagcacgccaaggagggcaacggcttccaggaggagacctggagactgagcttcagccacatcgagaaggagatcctgaacaaccacggcaagagcaagacctgctgcgagaacaaggaggagaagtgctgcagaaaggactgcctgaagctgatgaagtacctgctggagcagctgaaggagagattcaaggacaagaagcacctggacaagttcagcagctaccacgtgaagaccgccttcttccacagactgtactag

SEQ ID NO: 289509 - protein, 216 aa, Artificial Sequence
  derived and/or modified sequence
MVFKTAWVGSLSMGMIFFCCPIVSVFTDLFGCRKTAVVGAAVGFVGLMSSSFVSSIEPLYLTYGIIFACGCSFAYQPSLVILGHYFKKRLGLVNGIVTAGSSVFTILLPLLLRVLIDSVGLFYTLRVLCIFMFVLFLAGFTYRPLATSTKDKESGGSGSSLFSRKKFSPPKKIFNFAIFKVTAYAVWAVGIPLALFGYFVPYVHLAKFSFVILKYE

SEQ ID NO: 289510 - protein, 211 aa, Artificial Sequence
  derived and/or modified sequence
  misc_feature (1)..(1): Xaa can be any naturally occurring amino acid
XWVGSLSMGMIFFCCPIVSVFTDLFGCRKTAVVGAAVGFVGLMSSSFVSSIEPLYLTYGIIFACGCSFAYQPSLVILGHYFKKRLGLVNGIVTAGSSVFTILLPLLLRVLIDSVGLFYTLRVLCIFMFVLFLAGFTYRPLATSTKDKESGGSGSSLFSRKKFSPPKKIFNFAIFKVTAYAVWAVGIPLALFGYFVPYVHLAKFSFVILKYE

SEQ ID NO: 289511 - DNA, 651 bp, Artificial Sequence
  derived and/or modified sequence
atggtttttaaaacggcttgggttggtagcctgagcatggggatgatatttttctgctgccccattgtcagcgtctttactgatttgtttggctgtaggaaaactgccgtggtgggggctgccgtgggttttgtcggcttaatgagtagttcctttgtgagttccattgagccgctctacttaacgtacggcattatcttcgcctgtggctgcagtttcgcttatcaaccctctctggtgattctcggccattatttcaaaaagcgactgggccttgtgaacgggattgtcacagccggatcttctgtctttactatactcctcccactgctcctcagagtgctaatcgattctgtgggcctgttctatacactgcgagtcctctgcattttcatgttcgtgttattcctcgccgggttcacatataggccacttgccaccagtacgaaggacaaggagagtggcggctctggctcatcactgttcagcagaaagaagttctccccacctaaaaagatcttcaactttgctattttcaaggtgacagcatatgctgtgtgggcggttggaataccactagccctatttggatactttgtgccatatgtccacctggcgaagttttcattcgtgattctaaagtatgaatag

SEQ ID NO: 289512 - DNA, 636 bp, Artificial Sequence
  derived and/or modified sequence
taatgggtggggtccctgtccatgggcatgatcttcttctgttgtccaatagtgtcagtgtttacagatctgtttggatgtcgcaagacagcagtggtgggggccgcagttggattcgtcgggttaatgagctcaagcttcgtttcctccatcgagccgctgtatctgacctacggcataatattcgcctgcggctgcagcttcgcctaccagccaagcctggtgattctcggccactattttaaaaaaagacttggccttgtcaatggaatagtgactgccggatctagcgtgttcaccatacttcttcctcttttactcagagtcctgattgatagtgtcggtcttttttacacactgagggtgctgtgcattttcatgttcgttctctttctggcgggttttacgtacaggcccctggccacttctacaaaggacaaagaatcaggagggtccggctcctcgttgttctcacggaaaaaattctcccctcctaagaagatttttaacttcgctattttcaaagtcaccgcatacgccgtctgggctgtagggatcccattagcactgtttggttacttcgtgccatacgttcacctagcgaagttcagctttgtgattctgaaatacgagtag

SEQ ID NO: 289513 - DNA, 651 bp, Artificial Sequence
  derived and/or modified sequence
atggtgttcaagacagcctgggtgggcagcctgtccatgggcatgatcttcttctgctgccccatcgtgtctgtgttcacagacctgtttggctgcaggaagacagctgtggtgggcgctgctgtgggctttgtgggcctgatgagcagcagctttgtgagcagcattgagcccctgtacctgacctacggcatcatctttgcctgtggctgcagctttgcctaccagcccagcctggtgatcctgggccactacttcaagaagaggctgggcctggtgaatggcatcgtgacagctggcagcagcgtcttcaccatcctgctgcccctgctgctgcgggtgctgattgacagcgtgggcctcttctacaccctgcgggtgctgtgcatcttcatgtttgtgctcttcctggccggcttcacctaccggcccctggccaccagcaccaaggacaaggagagcggcggcagcggcagcagcctcttcagcaggaagaagttcagcccccccaagaagatcttcaactttgccatcttcaaggtgacagcctatgctgtgtgggccgtgggcatccccctggccctgtttggctactttgtgccctacgtgcacctggccaagttctcctttgtgatcctgaagtatgaatag

SEQ ID NO: 289514 - DNA, 636 bp, Artificial Sequence
  derived and/or modified sequence
tgatgggtgggcagcctgtccatgggcatgatcttcttctgctgccccatcgtgtctgtgttcacagacctgtttggctgcaggaagacagctgtggtgggcgctgctgtgggctttgtgggcctgatgagcagcagctttgtgagcagcattgagcccctgtacctgacctacggcatcatctttgcctgtggctgcagctttgcctaccagcccagcctggtgatcctgggccactacttcaagaagaggctgggcctggtgaatggaattgtgacagctggcagctctgtgttcaccatcctgctgcccctgctgctgcgggtgctgattgattctgtgggcctcttctacaccctgcgggtgctgtgcatcttcatgtttgtgctcttcctggccggcttcacctaccggcccctggccaccagcaccaaggacaaggagagcggcggcagcggcagcagcctcttcagcaggaagaagttcagcccccccaagaagatcttcaactttgccatcttcaaggtgacagcctatgctgtgtgggccgtgggcatccccctggccctgtttggctactttgtgccctacgtgcacctggccaagttctcctttgtgatcctgaagtatgaatag

SEQ ID NO: 289515 - DNA, 651 bp, Artificial Sequence
  derived and/or modified sequence
atggtgttcaagaccgcctgggtgggcagcctgagcatgggcatgatctttttttgttgccccatcgtgagtgtgtttacagacttgtttggatgccgtaaaaccgctgtagtgggggctgcagttggtttcgtgggactgatgtcctccagtttcgtcagttctatcgagccattgtatctaacctatgggataatttttgcttgtgggtgttccttcgcttaccaaccctccttggtgattctgggacattacttcaaaaagaggcttggacttgtgaacggaatcgtaacagctggatcttctgtgtttaccatcctattgcctcttctacttcgggtcctgattgatagcgtagggctgttctacactctgagggtcttgtgcatattcatgttcgttttattccttgcggggttcacctatagaccgctcgccacgagcacaaaagacaaagagtctggcggaagtgggtcctctctcttttccaggaaaaaatttagccctccaaagaagattttcaactttgcaatctttaaggtaacggcatacgcagtgtgggccgtggggattcccctcgccttgtttggctatttcgttccctacgtgcacctggctaagttctcctttgtgattctgaaatatgaatag

SEQ ID NO: 289516 - DNA, 636 bp, Artificial Sequence
  derived and/or modified sequence
tgatgggtgggcagcctgagcatgggcatgatcttcttctgctgccctatcgtgagcgtattcacggatctgtttggctgtagaaagacagctgtcgtcggggcagcggtcgggtttgttgggctgatgtcgtcttcgtttgttagctccatagagccactatacctaacctatggaattatattcgcctgcggatgcagctttgcttatcagcctagtctcgtcatcttagggcattacttcaaaaagcgtcttgggctggtcaacgggatagtgacagctgggtcttccgtgttcactatcctgctgcccctgctgctccgagtcctgattgattcagtagggctcttttacactcttagggtgctctgtattttcatgttcgtactcttcctcgcgggatttacctatcgacctcttgctacatccacaaaggacaaagagagcggcggttcaggctcaagcctgtttagcaggaaaaaattctctcctccaaaaaaaatattcaatttcgccatatttaaggtcaccgcatatgcagtttgggccgtggggattccattggccttgttcggttacttcgtcccttacgtacacctggctaaattctccttcgtcattctgaagtacgagtag

SEQ ID NO: 289517 - DNA, 651 bp, Artificial Sequence
  derived and/or modified sequence
atggtgttcaagactgcctgggtcggctccctgtctatggggatgatttttttttgttgtccaatagtctccgtctttactgatctatttgggtgccgcaaaacagccgtggttggcgctgcggtgggcttcgttggcctgatgagcagttcctttgtgagcagcatcgagccactgtacttgacttacggcattatcttcgcatgtggctgtagctttgcataccagcccagcctggttattcttgggcactacttcaagaagcgccttggcctggtgaatggtattgtgaccgctggaagctcagtgttcaccatcctgcttccgcttctgctgagggtgctcatagactccgtggggctcttctatacactgagagtattatgcatctttatgtttgtcctttttctggctggctttacctatcggccactggccactagcacgaaggacaaggagtcaggagggtccggctcgtccctcttttcccgcaagaaattttctccacccaaaaagatctttaatttcgccatcttcaaagttacagcatatgccgtttgggccgtgggaattccgctcgccttatttggatactttgtgccatacgttcatctggccaaattctcattcgttatcctgaaatatgagtag

SEQ ID NO: 289518 - DNA, 636 bp, Artificial Sequence
  derived and/or modified sequence
tgatgggtaggcagcctgagtatggggatgatttttttctgctgcccaatcgtgtcagtgttcaccgacttgttcggatgccgaaagactgcagtggtgggcgcagctgtgggcttcgtgggtcttatgagttcttcattcgtgtcgtcaatcgagcctttgtacctgacatatggaatcatcttcgcatgcgggtgctcttttgcctaccagcccagtcttgtcatactagggcactacttcaaaaagcgcctcggcctcgtcaacggcattgtaacagctggcagcagcgtcttcacaattctcttaccccttctgctccgagtgctcatcgactcagtgggattattttacacacttcgtgtgctgtgcatcttcatgttcgtcctgtttctggccggtttcacttacagacctctggcaactagtaccaaggataaagaaagtggtggctctggaagctccctgtttagtcggaagaaattttcacctcccaagaaaatattcaattttgctatctttaaggtgaccgcctacgcggtttgggcagttggaattccgctcgcattgttcggttactttgttccctacgtccatcttgcaaagttcagtttcgtgattctgaaatacgaatag

SEQ ID NO: 289519 - DNA, 1153 bp, Artificial Sequence
  derived and/or modified sequence
gcggccgcctgcgcgctggccgcctgcgcgctgccagcccgcccgcccgccaggggctccgccgccctcgcctcggcctcgttagcccgccaggagccccgcagctcctccgggagcccgctggtaactcgcgtccctcgcgcttctccggcgcctgaggggcccgcctcgggccatggtgctctcccaggaggagccggactccgcgcggggcacgagcgaggcgcagccgctcggccccgcgcccacgggggccgctccgccgcccggcccgggaccctcggacagccccgaggcggctgtcgagaaggtggaggtggagctggcggggccggcgaccgcggagccccatgagccccccgaaccccccgagggcggctggggctggctggtgatgctggcggccatgtggtgcaacgggtcggtgttcggcatccagaacgcttgcggggtgctcttcgtgtccatgctggaaaccttcggctccaaagacgatgacaagatggtctttaagacagcatgggtaggttctctctccatggggatgattttcttttgctgcccaatagtcagcgtcttcacagacctatttggttgtcggaaaacagctgtcgtgggtgctgctgttggatttgttgggctcatgtccagttcttttgtaagttccatcgagcctctgtaccttacctatggaatcatatttgcctgcggctgctcctttgcataccagccttcattggtcattttgggacactatttcaagaagcgccttggactggtgaatggcattgtcactgctggcagcagtgtcttcacaatcctgctgcctttgctcttaagggttctgattgacagcgtgggcctcttttacacattgagggtgctctgcatcttcatgtttgttctctttctggctggctttacttaccgacctcttgctaccagtaccaaagataaagagagtggaggtagcggatcctccctcttttccaggaaaaagttcagtcctccaaaaaaaattttcaattttgccatcttcaaggtgacagcttatgcagtgtgggcagttggaataccacttgcactttttggatactttgtgccttatgttcacttggcaaaattcagctttgttatactgaaatacgaataa

SEQ ID NO: 289520 - DNA, 909 bp, Artificial Sequence
  derived and/or modified sequence
catgggtaggttctctctccatggggatgattttcttttgctgcccaatagtcagcgtcttcacagacctatttggttgtcggaaaacagctgtcgtgggtgctgctgttggatttgttgggctcatgtccagttcttttgtaagttccatcgagcctctgtaccttacctatggaatcatatttgcctgcggctgctcctttgcataccagccttcattggtcattttgggacactatttcaagaagcgccttggactggtgaatggcattgtcactgctggcagcagtgtcttcacaatcctgctgcctttgctcttaagggttctgattgacagcgtgggcctcttttacacattgagggtgctctgcatcttcatgtttgttctctttctggctggctttacttaccgacctcttgctaccagtaccaaagataaagagagtggaggtagcggatcctccctcttttccaggaaaaagttcagtcctccaaaaaaaattttcaattttgccatcttcaaggtgacagcttatgcagtgtgggcagttggaataccacttgcactttttggatactttgtgccttatgttcacttggcaaaattcagctttgttatactgaaatacgaataattaatgtctagactggggttggtgcctcacgcctgtaatcccaccactttggggggctgatgcaggagttcaagaccagcgtgggcaacataaggagacttcatccctacctggggaaggaaaaaaaaaaaagaaggaagaagcagtgtctaaagtatctgcccctggcaacgtttgttcaaaagtgttcattatgtttcttccttttttcttttgtggctgaaaatgtatttacaattcaccgtaaatgataaaaatggcattggcacacata

SEQ ID NO: 289521 - DNA, 651 bp, Artificial Sequence
  derived and/or modified sequence
atggtgttcaagaccgcctgggtgggcagcctgagcatgggcatgatcttcttctgctgccccatcgtgagcgtgttcaccgacctgttcggctgcagaaagaccgccgtggtgggcgccgccgtgggcttcgtgggcctgatgagcagcagcttcgtgagcagcatcgagcccctgtacctgacctacggcatcatcttcgcctgcggctgcagcttcgcctaccagcccagcctggtgatcctgggccactacttcaagaagagactgggcctggtgaacggcatcgtgaccgccggcagcagcgtgttcaccatcctgctgcccctgctgctgagagtgctgatcgacagcgtgggcctgttctacaccctgagagtgctgtgcatcttcatgttcgtgctgttcctggccggcttcacctacagacccctggccaccagcaccaaggacaaggagagcggcggcagcggcagcagcctgttcagcagaaagaagttcagcccccccaagaagatcttcaacttcgccatcttcaaggtgaccgcctacgccgtgtgggccgtgggcatccccctggccctgttcggctacttcgtgccctacgtgcacctggccaagttcagcttcgtgatcctgaagtacgagtag

SEQ ID NO: 289522 - DNA, 636 bp, Artificial Sequence
  derived and/or modified sequence
tgatgggtgggcagcctgagcatgggcatgatcttcttctgctgccccatcgtgagcgtgttcaccgacctgttcggctgcagaaagaccgccgtggtgggcgccgccgtgggcttcgtgggcctgatgagcagcagcttcgtgagcagcatcgagcccctgtacctgacctacggcatcatcttcgcctgcggctgcagcttcgcctaccagcccagcctggtgatcctgggccactacttcaagaagagactgggcctggtgaacggcatcgtgaccgccggcagcagcgtgttcaccatcctgctgcccctgctgctgagagtgctgatcgacagcgtgggcctgttctacaccctgagagtgctgtgcatcttcatgttcgtgctgttcctggccggcttcacctacagacccctggccaccagcaccaaggacaaggagagcggcggcagcggcagcagcctgttcagcagaaagaagttcagcccccccaagaagatcttcaacttcgccatcttcaaggtgaccgcctacgccgtgtgggccgtgggcatccccctggccctgttcggctacttcgtgccctacgtgcacctggccaagttcagcttcgtgatcctgaagtacgagtag

SEQ ID NO: 289523 - DNA, 3940 bp, Artificial Sequence
  derived and/or modified sequence
gttcgccatggatttccctatcaaccctcagccctggcctttgatcctgtacagaagatcctggcagtgggaactcagactggtgctttaaggctctttggtcgtccaggagtagaatgttattgccagcatgacagtggagctgcagtaatccagctccagttcctgattaatgagggagcgcttgtgagtgccttggctgatgacaccttacacttatggaatttacgtcagaagaggcctgccatactacattcgcttaaattttgcagagaaagggttacattttgccatctgcctttccagagtaagtggctctatgtgggcactgaacgaggtaatatacatattgtcaatgtggagtccttcacactctcaggctacgtcattatgtggaataaagccattgaactgtcatctaaatctcacccaggacctgtggtccatataagtgataatccaatggacgagggaaagatatttgaaaagactgggaaaagagagaggaaacaaataccatttttttccaaaaggtgtatgtatctcagattgcctaggaaagaagagataagcttttgattggctttgaatctggaacagtagttttatgggacctcaaatcaaagaaagccgactacagatacacatatgatgaggctatccactctgttgcttggcatcatgaaggaaaacaatttatttgcagtcattcagatggcaccttgactatatggaatgtaaggtcccctgctaaaccagtacagacaatcactccacatggaaaacagttaaaggatgggaagaagccagaaccatgcaaacctatcctcaaggtggaattcaaaacgactagatctggggagccttttattattttatcaggaggtttgtcatatgatactgtaggaagaagaccttgcttaacagtgatgcatgggaaaagcactgctgtgctagaaatggactattcaattgttgattttctaacgctgtgtgaaacaccatacccaaatgattttcaagaaccatatgctgtggttgttcttctagaaaaggatttagtacttatagaccttgcacaaaatggatatcctatatttgaaaatccctaccctttgagtatacatgagtcccctgttacatgttgcgaatattttgcggattgtcctgtggaccttattcctgcactttattctgttggagctagacagaaacgtcaaggttacagcaaaaaggaatggcccatcaacggaggtaattggggcttgggtgctcaaagttacccagaaataattattacagggcatgctgatgggtcagttaagttctgggatgcttctgcaataactctacaagtattatataagctaaagacatctaaagtatttgaaaagtcaagaaataaagatgacaggccaaacacagacattgtagatgaagatccatatgccattcagatcatctcctggtgtccagaaagtagaatgctgtgcatcgctggagtttcagctcatgtcattatttatagattcagcaagcaggaagtaatcacagaagtcattccgatgcttgaagttcgattattatatgagataaatgatgtggaaactccggagggtgagcagccaccacctttgccaacacccgtgggagggtccaaccctcagcccatccctcctcagtctcatccatctaccagtagcagttcatctgatgggcttcgtgataatgtaccttgtttaaaagttaaaaactcaccacttaaacagtctccaggttatcaaacagaactagttattcagttggtttgggtgggtggagaaccaccacaacaaataaccagcctggcagtcaattcttcctatggactggtggtttttggcaattgcaatggcattgctatggttgactacctccagaaagcagtgctgctcaacctgggcactattgaattatatggctctaatgatccttatcggagagaaccccgatctcctcgtaaatctcgacagccttcaggagccggtctgtgtgatattagtgaagggactgttgttccagaggatcgctgcaaatctccaacctctggttcttcatcaccacacaattcagatgatgaacaaaaaatgaataattttatagaaaaggcaaagatgtcaaggaagttaagcttacctactgacctaaagcctgatttagatgtaaaggataactcctttagccgatcacggagttcaagtgtaacaagcattgacaaagaatcccgagaagcgatctccgctcttcatttctgtgaaacgtttactcgaaagacggactcgtccccttccccttgtctatgggttggaacaacgctaggaacagtgcttgtcattgcactgaaccttcccccagggggagagcaaagacttcttcagccagtaattgtgtctccaagtggtactatattgaggttaaaaggtgcaatcttgagaatggcatttctggataccacaggctgcttaataccacctgcgtatgaaccctggagagagcacaatgttcctgaagaaaaagacgaaaaggagaaattgaaaaaacggcggcctgtctcagtatccccctcctcttctcaggaaattagtgaaaaccagtatgcagtgatatgttctgaaaagcaagcaaaagtaatctcactgccaacccagaactgtgcttataagcaaaatattacagagacctcgtttgtgcttcgtggagatattgtagcattgagtaacagtatctgccttgcctgtttctgtgccaatggacatataatgacttttagtttgccaagtttaagacctctgttggatgtgtattacttgccccttaccaatatgcggatagccagaacgttctgctttaccaacaatggacaagcattataccttgtttcacctacagaaatccagagacttacttatagtcaagagacctgtgaaaatcttcaggaaatgttgggtgaactcttcactcctgtagaaacacctgaagcaccaaacaggggattctttaaaggcttatttggaggtggtgcacaatctcttgacagagaagaactatttggagaatcgtcctcaggaaaggcttcaaggagccttgcacagcatattcctggccctggtggcattgaaggcgtaaaaggggcagcatctggagttgttggtgaattagcacgagccaggctggcactagatgaaagagggcagaaacttggcgatctggaagaaagaactgcggccatgttatcaagtgcagagtcattttctaaacatgctcatgagattatgttgaaatacaaagataagaagtggtaccagttctgacaaccagaatccaataagtccaacttcagccagaaggaaaaaagttttccatttttattacattctttaggaaagttaacgttaaagggatgttcgtcactgaatactgttctttcctagcacagtcatgcactgttttacctcagtcatgtggctttaactgaggagtgttcacacgcactcgaaatggagtatatggtgtgtgccagttatgagttgaccatttgggaattaaacaggtcacacgtgacagatgaagaaaccaagggggctgctgaggagacctggtgcagggactaatcctggatcattcctgtattaaactttcatatgccaaaagggtttgtgccgttttatctgccatcagtgtttgacctgtttagggcagaggcaataagtcagaagtcttgaagttgaaatagttatatgtgtgtcattggactggattataaacagctgtcttggactttccctctcttaacactgactggtcatcagtatcattagtgaaaaagaaacaaattgtttgttatcatctctttagacagataagctgaatggtgggctttaaataataaaaacatacacat

SEQ ID NO: 289524 - protein, 316 aa, Artificial Sequence
  derived and/or modified sequence
MEEEKYLPELMAEKDSLDPSFVHASRLLAEEIEKFQGSDGKKEDEEKKYLDVISNKNIKLSERVLIPVKQYPKFNFVGKLLGPRGNSLKRLQEETGAKMSILGKGSMRDKAKEEELRKSGEAKYAHLSDELHVLIEVFAPPGEAYSRMSHALEEIKKFLVPDYNDEIRQEQLRELSYLNGSEDSGRGRGIRGRGIRIAPTAPSRGRGGAIPPPPPPGRGVLTPRGSTVTRGALPVPPVARGVPTPRARGAPTVPGYRAPPPPAHEAYEEYPSLPLSLFFDTVAKSHQHCDNEVPQTGSTRLNPGRSFFLAWRWEWD

SEQ ID NO: 289525 - DNA, 1230 bp, Artificial Sequence
  derived and/or modified sequence
gcgtcctgttcccgcctctccagttaaggccgctggtgtgagccggggctctgcgcgagcgagggacgacggaagggacgggcaggtgtgggcgcggggccacgcagcccgacggcgggagtcgcaggtgctgggtgcatgggccagtgaggacgcacagagatccctcgccgcgcggaggaggagcagcgcgggagccaggcgctgccccaagaccctgcctgcgtccgagcgagcggaacctcgcgcttcgcccggggacaatccgaagtccgcgctatggaagaggagaaatatttgcctgagctgatggcagagaaagatagcctggatccatcttttgtgcatgcgtcgcgccttttggcagaagaaattgaaaagtttcaaggttctgatggaaaaaaggaagacgaagaaaagaagtatcttgatgtcatcagcaacaaaaacataaagctctcagaaagagtactgattcctgtcaagcagtatccaaagttcaattttgtggggaaattgcttggaccaagaggaaactccttgaagaggctacaggaagaaacaggtgctaaaatgtctatcctgggcaaaggatcaatgagagataaagctaaggaagaagaactaaggaagagtggggaagccaaatatgcccacttgagtgatgagcttcatgtattaattgaagtgtttgctccacctggggaagcttattcacgtatgagtcatgcattggaagagattaaaaaattcctggttcctgactacaatgatgaaattcgtcaggaacaactacgtgaattatcttacttaaatggctcagaggactctggtcgtggcagaggtattagaggcagagggatcagaatagctcccacagctccttcaaggggccgtgggggtgccattcctcctcccccaccacctggacgaggtgttctcacccctcggggaagcactgtaacccgtggagcgcttccagtgccacctgtagcaagaggtgtccctacccctcgagcccggggggcaccaacagtgccaggatacagggcacctcctcctccagcccatgaagcttatgaagaatatccatcattaccactttccttgttttttgatacggtggcaaaatctcaccagcattgtgataacgaagtaccacaaactggttcaaccagacttaacccaggacgaagcttttttctggcatggaggtgggagtgggactga

SEQ ID NO: 289526 - DNA, 951 bp, Artificial Sequence
  derived and/or modified sequence
atggaagaggagaagtatctgcccgagctgatggccgaaaaggacagcctggacccttcatttgtgcacgcaagcagactcctggctgaagagatcgaaaagtttcagggctctgacggaaagaaggaggatgaagagaaaaaatacttggacgtgatttccaataagaatatcaagctctctgagcgtgtgctgatccccgtaaagcaatacccaaagttcaactttgttggaaaacttcttggcccacgggggaacagcctcaaacggctccaggaggaaaccggtgccaagatgagtattctcggaaaaggatcgatgcgggacaaggcaaaggaggaagagctcagaaagagcggagaagctaagtatgcccatctctcagacgaacttcacgttttaattgaagtttttgctcccccaggtgaagcctattctcgcatgtcccatgctctggaggaaatcaagaagtttttggtgccagactacaacgacgaaattcgtcaagagcagctgagagagttgagctacctgaacggaagcgaggactcagggagaggtaggggaataagggggcgtggcattcgtatcgctcctactgctcctagcagaggtaggggcggggccatccctccaccacctcccccagggcggggggtgctgacgcctagggggtctaccgtcacccgtggggcattgccagtaccacctgtcgctcgcggagtccccaccccacgggccagaggtgcccctacagtacctggatatagggctccacccccgcctgctcacgaggcgtatgaggagtacccgtctctcccactgagcttgttcttcgatactgtggcgaagtctcatcagcactgtgataacgaggttcctcagactggaagcacccggctgaatcccggcaggagtttcttccttgcatggcgttgggagtgggactag

SEQ ID NO: 289527 - DNA, 951 bp, Artificial Sequence
  derived and/or modified sequence
atggaggaggagaagtacctgcctgagctgatggccgagaaggacagcctggaccccagctttgtgcacgccagccggctgctggccgaggagattgagaagttccagggcagtgatggcaagaaggaggatgaggagaagaagtacctggatgtgatcagcaacaagaacatcaagctgtctgagcgggtgctgatccctgtgaagcagtaccccaagttcaactttgtgggcaagctgctgggcccccggggcaacagcctgaagaggctgcaggaggagactggagccaagatgagcatcctgggcaagggctccatgagggacaaggccaaggaggaggagctgaggaagtctggagaggccaagtatgcccacctgagtgatgagctgcacgtgctgattgaggtgtttgcccctcctggagaggcctacagcaggatgagccacgccctggaggagatcaagaagttcctggtgcctgactacaatgatgagatccggcaggagcagctgcgggagctgagctacctgaatggaagtgaggacagcggccggggccggggcatccggggccggggcatcagaattgcccccacagcccccagccggggccggggcggggccatccccccacctcctcctcctggccggggcgtgctgaccccccggggcagcacagtgaccaggggggccctgcctgtgccccctgtggcccggggcgtgcccaccccccgggcccggggggcccccaccgtgcccggctaccgggcccctcctcctccagcccacgaggcctatgaggagtaccccagcctgcccctgagcctcttctttgacacagtggccaagagccaccagcactgtgacaatgaggtgccccagacaggcagcacccggctgaaccctggccgctccttcttcctggcctggcgctgggagtgggactag

SEQ ID NO: 289528 - DNA, 951 bp, Artificial Sequence
  derived and/or modified sequence
atggaggaggagaagtacctgcccgagctgatggccgagaaggactccctggatccaagtttcgtgcatgcgtctaggctgttggcagaggagatagagaaatttcaggggagcgatggtaagaaagaagatgaggaaaagaagtatctggacgttatcagcaacaaaaatatcaagctcagtgaaagagtgctaattcccgtgaaacagtatccgaagttcaactttgttgggaaactgctcggcccgcgagggaactccctcaaacggcttcaggaagaaaccggtgcaaaaatgtccattctgggaaaaggttccatgagggacaaggctaaagaagaggaactcagaaaatctggtgaggcaaagtatgcccacttatctgatgaactgcacgtgctgattgaagtctttgccccccctggcgaagcctactcccgtatgagtcatgcgctggaagagattaaaaaattcctggtgcctgactacaacgacgaaatacgccaggaacagctgagagaattaagttatttgaacgggagcgaagacagtgggcgcgggagggggatacgaggcagaggcattcgcattgctcccaccgccccatcccgggggagagggggcgcgattccccctcctcccccgcccgggcgaggggtactgactccccgcggcagcactgtcacccgtggggccctcccagtgccccccgtggcgagaggggttcctactcccagggccagaggcgctcccactgtaccaggctacagggcaccacctccccctgcacacgaggcttatgaggagtaccccagtctcccccttagtcttttttttgataccgtggccaagagtcatcagcactgcgataatgaggtcccccaaacagggtcgactcgtttgaatcctgggaggagcttttttctcgcgtggcgctgggagtgggactag

SEQ ID NO: 289529 - DNA, 951 bp, Artificial Sequence
  derived and/or modified sequence
atggaagaggagaaatatctgccagaactgatggccgaaaaggactctcttgatccatccttcgtgcacgcctcgcgcttgctggctgaggagattgagaagttccaaggctccgacggaaagaaggaagacgaagagaagaaatacctggatgtaatctccaacaaaaacattaaactctccgaacgggtattgattccagttaagcaataccctaaattcaacttcgtcggcaagctactggggccaagggggaactccttgaaacggcttcaggaggagactggggcaaagatgtccatcctggggaaaggctctatgagagataaagcaaaagaggaggagttaaggaaaagtggggaagctaagtacgcgcatctgagtgacgagctgcatgttctgatcgaagtgttcgcccctccaggcgaggcatacagcagaatgagtcatgccctagaggagatcaagaagttcttagtacctgactataacgacgagatccggcaggagcaactgcgcgaactgtcttatctgaacggaagcgaggactccggaagaggcagaggaatcagaggccgaggtattcgcatcgctccaacagctccatctcgcggtcgcggaggcgctattcctccacctcccccacccggacgcggagtacttactcccaggggcagtaccgtcacaaggggagcccttcccgtccccccagtagccagaggtgtcccaaccccaagagctagaggcgctcctactgtgcccggatacagagctccaccccctcccgctcacgaggcctacgaagagtacccttccctgccactgagcctcttctttgacaccgtggctaaaagtcatcagcactgcgataatgaagtgccacaaacgggctctacgagacttaatcccggacgtagtttcttcctggcgtggagatgggaatgggactag

SEQ ID NO: 289530 - DNA, 951 bp, Artificial Sequence
  derived and/or modified sequence
atggaggaggagaagtacctgcccgagctgatggccgagaaggacagcctggaccccagcttcgtgcacgccagcagactgctggccgaggagatcgagaagttccagggcagcgacggcaagaaggaggacgaggagaagaagtacctggacgtgatcagcaacaagaacatcaagctgagcgagagagtgctgatccccgtgaagcagtaccccaagttcaacttcgtgggcaagctgctgggccccagaggcaacagcctgaagagactgcaggaggagaccggcgccaagatgagcatcctgggcaagggcagcatgagagacaaggccaaggaggaggagctgagaaagagcggcgaggccaagtacgcccacctgagcgacgagctgcacgtgctgatcgaggtgttcgccccccccggcgaggcctacagcagaatgagccacgccctggaggagatcaagaagttcctggtgcccgactacaacgacgagatcagacaggagcagctgagagagctgagctacctgaacggcagcgaggacagcggcagaggcagaggcatcagaggcagaggcatcagaatcgcccccaccgcccccagcagaggcagaggcggcgccatcccccccccccccccccccggcagaggcgtgctgacccccagaggcagcaccgtgaccagaggcgccctgcccgtgccccccgtggccagaggcgtgcccacccccagagccagaggcgcccccaccgtgcccggctacagagccccccccccccccgcccacgaggcctacgaggagtaccccagcctgcccctgagcctgttcttcgacaccgtggccaagagccaccagcactgcgacaacgaggtgccccagaccggcagcaccagactgaaccccggcagaagcttcttcctggcctggagatgggagtgggactag

SEQ ID NO: 289531 - protein, 633 aa, Artificial Sequence
  derived and/or modified sequence
MTTEVGSVSEVKKDSSQLGTDATKEKPKEVAENQQNQSSDPEEEKGSQPPPAAESQSSLRRQKREKETSESRGISRFIPPWLKKQKSYTLVVAKDGGDKKEPTQAVVEEQVLDKEEPLPEEQRQAKGDAEEMAQKKQEIKVEVKEEKPSVSKEEKPSVSKVEMQPTELVSKEREEKVKETQEDKLEGGAAKRETKEVQTNELKAEKASQKVTKKTKTVQCKVTLLDGTEYSCDLEKHAKGQVLFDKVCEHLNLLEKDYFGLLFQESPEQKNWLDPAKEIKRQLRNLPWLFTFNVKFYPPDPSQLTEDITRYFLCLQLRQDIASGRLPCSFVTHALLGSYTLQAELGDYDPEEHGSIDLSEFQFAPTQTKELEEKVAELHKTHRGLSPAQADSQFLENAKRLSMYGVDLHHAKDSEGVDIKLGVCANGLLIYKDRLRINRFAWPKILKISYKRSNFYIKVRPAELEQFESTIGFKLPNHRAAKRLWKVCVEHHTFYRLVSPEQPPKAKFLTLGSKFRYSGRTQAQTRQASTLIDRPAPHFERTSSKRVSRSLDGAPIGVMDQSLMKDFPGAAGEISAYGPGLVSIAVVQDGDGRREVRSPTKAPHLQLIEGKSSHETLNIVEEKSGQRLGKTKE

SEQ ID NO: 289532 - DNA, 255 bp, Artificial Sequence
  derived and/or modified sequence
atgaccatgaccctgcacaccaaggccagcggcatggccctgctgcaccagatccagggcaacgagctggagcccctgaacagaccccagctgaagatccccctggagagacccctgggcgaggtgtacctggacagcagcaagcccgccgtgtacaactaccccgagggcgccgcctacgagttcaacgccgccgccgccgccaacgcccaggtgtacggccagaccggcctgccctacggccccggcagctag

SEQ ID NO: 289533 - DNA, 1167 bp, Artificial Sequence
  derived and/or modified sequence
tgactgaagatcatcagctgccagcccagcgacaagcccgtgccccccggcgagaacgcccccgagtggagagccggccagcccggcagcgcccccagaagccactgcggcagaagcgccgccggccccggccacagaagacccctgtgcgacttcaacggcgagggccccaacagcgacaacagaagacagggcggcagagagagactggccagcaccaacgacaagggcagcatggccatggagagcgccaaggagaccagatactgcgccgtgtgcaacgactacgccagcggctaccactacggcgtgtggagctgcgagggctgcaaggccttcttcaagagaagcatccagggccacaacgactacatgtgccccgccaccaaccagtgcaccatcgacaagaacagaagaaagagctgccaggcctgcagactgagaaagtgctacgaggtgggcatgatgaagggcggcatcagaaaggacagaagaggcggcagaatgctgaagcacaagagacagagagacgacggcgagggcagaggcgaggtgggcagcgccggcgacatgagagccgccaacctgtggcccagccccctgatgatcaagagaagcaagaagaacagcctggccctgagcctgaccgccgaccagatggtgagcgccctgctggacgccgagccccccatcctgtacagcgagtacgaccccaccagacccttcagcgaggccagcatgatgggcctgctgaccaacctggccgacagagagctggtgcacatgatcaactgggccaagagagtgcccggcttcgtggacctgaccctgcacgaccaggtgcacctgctggagtgcgcctggctggagatcctgatgatcggcctggtgtggagaagcatggagcaccccggcaagctgctgttcgcccccaacctgctgctggacagaaaccagggcaagtgcgtggagggcatggtggagatcttcgacatgctgctggccaccagcagcagattcagaatgatgaacctgcagggcgaggagttcgtgtgcctgaagagcatcatcctgctgaacagcggcatcagccacgtggaggccaagaagagaatcctgaacctgcaccccaagatcttcggcaacaagtggttccccagagtgtag

SEQ ID NO: 289534 - DNA, 348 bp, Artificial Sequence
  derived and/or modified sequence
atgaccatgaccctgcacaccaaggccagcggcatggccctgctgcaccagatccagggcaacgagctggagcccctgaacagaccccagctgaagatccccctggagagacccctgggcgaggtgtacctggacagcagcaagcccgccgtgtacaactaccccgagggcgccgcctacgagttcaacgccgccgccgccgccaacgcccaggtgtacggccagaccggcctgccctacggccccggcagcgaggccgccgccttcggcagcaacggcctgggcggcttcccccccctgaacagcgtgagccccagccccctgatgctgctgcacccccccccctag

SEQ ID NO: 289535 - DNA, 1452 bp, Artificial Sequence
  derived and/or modified sequence
atgaccatgaccctgcacaccaaggccagcggcatggccctgctgcaccagatccagggcaacgagctggagcccctgaacagaccccagctgaagatccccctggagagacccctgggcgaggtgtacctggacagcagcaagcccgccgtgtacaactaccccgagggcgccgcctacgagttcaacgccgccgccgccgccaacgcccaggtgtacggccagaccggcctgccctacggccccggcagcgaggccgccgccttcggcagcaacggcctgggcggcttcccccccctgaacagcgtgagccccagccccctgatgctgctgcacccccccccccagctgagccccttcctgcagccccacggccagcaggtgccctactacctggagaacgagcccagcggctacaccgtgagagaggccggcccccccgccttctacagacccaacagcgacaacagaagacagggcggcagagagagactggccagcaccaacgacaagggcagcatggccatggagagcgccaaggagaccagatactgcgccgtgtgcaacgactacgccagcggctaccactacggcgtgtggagctgcgagggctgcaaggccttcttcaagagaagcatccagggccacaacgactacatgtgccccgccaccaaccagtgcaccatcgacaagaacagaagaaagagctgccaggcctgcagactgagaaagtgctacgaggtgggcatgatgaagggcggcttcgtggacctgaccctgcacgaccaggtgcacctgctggagtgcgcctggctggagatcctgatgatcggcctggtgtggagaagcatggagcaccccggcaagctgctgttcgcccccaacctgctgctggacagaaaccagggcaagtgcgtggagggcatggtggagatcttcgacatgctgctggccaccagcagcagattcagaatgatgaacctgcagggcgaggagttcgtgtgcctgaagagcatcatcctgctgaacagcggcgtgtacaccttcctgagcagcaccctgaagagcctggaggagaaggaccacatccacagagtgctggacaagatcaccgacaccctgatccacctgatggccaaggccggcctgaccctgcagcagcagcaccagagactggcccagctgctgctgatcctgagccacatcagacacatgagcaacaagggcatggagcacctgtacagcatgaagtgcaagaacgtggtgcccctgtacgacctgctgctggagatgctggacgcccacagactgcacgcccccaccagcagaggcggcgccagcgtggaggagaccgaccagagccacctggccaccgccggcagcaccagcagccacagcctgcagaagtactacatcaccggcgaggccgagggcttccccgccaccgtgtag

SEQ ID NO: 289536 - DNA, 2165 bp, Artificial Sequence
  derived and/or modified sequence
gtcgcctctaacctcgggctgtgctctttttccaggtggcccgccggtttctgagccttctgccctgcggggacacggtctgcaccctgcccgcggccacggaccatgaccatgaccctccacaccaaagcatctgggatggccctactgcatcagatccaagggaacgagctggagcccctgaaccgtccgcagctcaagatccccctggagcggcccctgggcgaggtgtacctggacagcagcaagcccgccgtgtacaactaccccgagggcgccgcctacgagttcaacgccgcggccgccgccaacgcgcaggtctacggtcagaccggcctcccctacggccccgggtctgaggctgcggcgttcggctccaacggcctggggggtttccccccactcaacagcgtgtctccgagcccgctgatgctactgcacccgccgccgcagctgtcgcctttcctgcagccccacggccagcaggtgccctactacctggagaacgagcccagcggctacacggtgcgcgaggccggcccgccggcattctacaggccaaattcagataatcgacgccagggtggcagagaaagattggccagtaccaatgacaagggaagtatggctatggaatctgccaaggagactcgctactgtgcagtgtgcaatgactatgcttcaggctaccattatggagtctggtcctgtgagggctgcaaggccttcttcaagagaagtattcaaggacataacgactatatgtgtccagccaccaaccagtgcaccattgataaaaacaggaggaagagctgccaggcctgccggctccgtaaatgctacgaagtgggaatgatgaaaggtgggatacgaaaagaccgaagaggagggagaatgttgaaacacaagctcctcctcatcctctcccacatcaggcacatgagtaacaaaggcatggagcatctgtacagcatgaagtgcaagaacgtggtgcccctctatgacctgctgctggagatgctggacgcccaccgcctacatgcgcccactagccgtggaggggcatccgtggaggagacggaccaaagccacttggccactgcgggctctacttcatcgcattccttgcaaaagtattacatcacgggggaggcagagggtttccctgccacggtctgagagctccctggctcccacacggttcagataatccctgctgcattttaccctcatcatgcaccactttagccaaattctgtctcctgcatacactccggcatgcatccaacaccaatggctttctagatgagtggccattcatttgcttgctcagttcttagtggcacatcttctgtcttctgttgggaacagccaaagggattccaaggctaaatctttgtaacagctctctttcccccttgctatgttactaagcgtgaggattcccgtagctcttcacagctgaactcagtctatgggttggggctcagataactctgtgcatttaagctacttgtagagacccaggcctggagagtagacattttgcctctgataagcactttttaaatggctctaagaataagccacagcaaagaatttaaagtggctcctttaattggtgacttggagaaagctaggtcaagggtttattatagcaccctcttgtattcctatggcaatgcatccttttatgaaagtggtacaccttaaagcttttatatgactgtagcagagtatctggtgattgtcaattcattccccctataggaatacaaggggcacacagggaaggcagatcccctagttggcaagactattttaacttgatacactgcagattcagatgtgctgaaagctctgcctctggctttccggtcatgggttccagttaattcatgcctcccatggacctatggagagcagcaagttgatcttagttaagtctccctatatgagggataagttcctgatttttgtttttatttttgtgttacaaaagaaagccctccctccctgaacttgcagtaaggtcagcttcaggacctgttccagtgggcactgtacttggatcttcccggcgtgtgtgtgccttacacaggggtgaactgttcactgtggtgatgcatgatgagggtaaatggtagttgaaaggagcaggggcc

SEQ ID NO: 289537 - DNA, 624 bp, Artificial Sequence
  derived and/or modified sequence
atggtcataacagcctcctgtctaccgactcagaacggattttaccaaaactgaaaatgcaggctccatgctcagaagctctttaacaggctcgaaaggtccatgctcctttctcctgcccattctatagcataagaagacagtctctgagtgataatcttctcttcaagaagaagaaaactaggaaggagtaagcacaaagatctcttcacattctccgggactgcggtaccaaatatcagcacagcacttcttgaaaaaggatgtagattttaatctgaactttgaaccatcactgaggtggcccgccggtttctgagccttctgccctgcggggacacggtctgcaccctgcccgcggccacggaccatgaccatgaccctccacaccaaagcatctgggatggccctactgcatcagatccaagggaacgagctggagcccctgaaccgtccgcagctcaagatccccctggagcggcccctgggcgaggtgtacctggacagcagcaagcccgccgtgtacaactaccccgagggcgccgcctacgagttcaacgccgcggccgccgccaacgcgcaggtctacggtcagaccggcctcccctacggccccgggtctga

SEQ ID NO: 289538 - DNA, 255 bp, Artificial Sequence
  derived and/or modified sequence
atgaccatgaccttacatactaaggcctccggcatggcactcctccatcagatccagggtaatgagctcgaaccattgaatcgaccccagcttaagatccctctggagcgccctctcggggaagtctatcttgattcatccaagcctgccgtgtacaattatcctgaaggagccgcatatgaatttaacgccgctgccgcagcaaacgcccaggtttacggccaaacaggactgccctacggacctggatcatag

SEQ ID NO: 289539 - DNA, 1167 bp, Artificial Sequence
  derived and/or modified sequence
tagctgaagattatcagttgccagccatcggacaagcctgtgcccccaggcgagaatgccccagaatggcgcgctgggcagccaggcagtgcgcctcgctctcactgcggcaggtccgccgctggaccaggacaccggcggccactttgtgatttcaatggcgagggacctaactccgataataggcggcagggcggccgggaacgtctcgctagcacaaacgataaaggaagtatggcaatggagtcagctaaagaaacaaggtactgtgctgtttgcaacgactacgcctctgggtatcattatggggtgtggtcttgcgagggatgcaaagcctttttcaagcggagcatacaagggcataacgactacatgtgtcccgcaaccaaccagtgtactattgacaagaatcggaggaaatcctgccaggcctgcaggctgcgcaagtgctacgaagtgggaatgatgaagggcgggatcagaaaggatagacgaggaggaagaatgctcaagcacaaaaggcagcgtgacgatggtgaagggagaggggaggtgggcagcgccggcgatatgagagctgcaaatctatggccttcacccctcatgattaaaaggagcaagaagaactccctggcgctgtcattgacggcagatcagatggtgtccgccctactagacgctgaaccccccatcctctactccgagtacgatccgacccgccctttctcagaggcgtcgatgatgggcttactgacaaatctggccgatagagagctcgtgcatatgatcaattgggcgaagagagtcccagggttcgtggatttgacactccacgaccaggtgcacctcctcgagtgcgcctggctcgaaattcttatgattggcctggtgtggcgcagtatggagcaccctggcaaactcttgttcgcccccaacctccttctggatcgcaaccagggtaagtgtgtggaggggatggtggagatcttcgatatgcttcttgccacctctagtcgctttcgcatgatgaacctgcagggagaagaattcgtgtgcctcaaaagtatcatactgcttaatagcggtatttcacatgtggaagctaaaaagcgcatattgaatttgcaccctaaaatttttggaaacaagtggttccctcgcgtatag

SEQ ID NO: 289540 - DNA, 5437 bp, Artificial Sequence
  derived and/or modified sequence
gcttaaaaataatctcctgccagcccagtgacaagcctgtcccacccggggagaatgccccggagtggcgtgcgggtcagccagggtctgcgcctcgcagccactgtggaaggagcgcggccggtccaggacacaggagaccactttgtgacttcaatggcgaagggccaaattcagataatcgacgccagggtggcagagaaagattggccagtaccaatgacaagggaagtatggctatggaatctgccaaggagactcgctactgtgcagtgtgcaatgactatgcttcaggctaccattatggagtctggtcctgtgagggctgcaaggccttcttcaagagaagtattcaaggacataacgactatatgtgtccagccaccaaccagtgcaccattgataaaaacaggaggaagagctgccaggcctgccggctccgtaaatgctacgaagtgggaatgatgaaaggtgggatacgaaaagaccgaagaggagggagaatgttgaaacacaagcgccagagagatgatggggagggcaggggtgaagtggggtctgctggagacatgagagctgccaacctttggccaagcccgctcatgatcaaacgctctaagaagaacagcctggccttgtccctgacggccgaccagatggtcagtgccttgttggatgctgagcccccgatactctattccgagtatgatcctaccagacccttcagtgaagcttcgatgatgggcttactgaccaacctggcagacagggagctggttcacatgatcaactgggcgaagagggtgccaggctttgtggatttgaccctccatgatcaggtccaccttctagaatgtgcctggctagagatcctgatgattggtctcgtctggcgctccatggagcacccagggaagctactgtttgctcctaacttgctcttggacaggaaccagggaaaatgtgtagagggcatggtggagatcttcgacatgctgctggctacatcatctcggttccgcatgatgaatctgcagggagaggagtttgtgtgcctcaaatctattattttgcttaattctggtatctcacatgtagaagcaaagaagagaatcctgaacttgcatcctaaaatatttggaaacaagtggtttcctcgtgtctaaagcctctggtcataaggcctcacagtatcctgcagatcatcaaatccgtgtgtggacgtggggacattttgttttgaggcagttacatgaccatgggcaagtaaattagtctctctggccttcagttttctcatttgcaatgattcaatggtttgccttaaagtgtcttaagaaggataggatagctacccacaaactttggatcaaattttcttcaaaacatccttcccctgactttaaaatatgccctggcaaccaacactcaacacctgtagctagatgagttataacagagtgactgaagagagctcccacaattcctagttattaaatacctgactaattttcattaggagacatttaagaactttagtgatgggaagatttacatatataattgatagtacaatctgacagagctgaatagctcctgtttgtcaactgttaaattctttgtgcaattaggtcaaagatcaagatcaaaacaagggctgcccattgacctgttcactcctgagaaaaatggcaaaccattgaatcataaatcatgacagccaaaataattttaggatattaatgcacccctcatctttgcaaatgagaaaactgaaggccagagagactaatttacttgcccatttttgataaaaatgtcaccatttacagaatgtggactcctatgttggagtctgttgaaggacatggcacatttaacagcatcagagcattttttattaaaatttaatttgtgcatgacttctaatgctgaagaacgccaagctaggaagaagtcatgggctgagatggggacagagagaacacacaatattcagtgactgtccgtgcagctggctgcccttgaaaatatccgaactatccactgggaaaatgcctgtccccttggggtaattaccagagtttcaacatgcccaaagctgcctcatcttcagggggaacttgttctagcgattttagtatcaagaagctaatggtcccagggaaagggttatttttaatatttagctactgtgctaaaaatcacctaagtttctagagtcttgggaaatttcataagggaaagaacaaaggcaacttgttgactacccactggtcattctcctctggtcttattacatacatggatgccagtttagattgtgtttatataggaaaaattaaatgtgtgagcctccttaaggaacatcatcaatacagatatatcagatagttctgtccagcaaaaaacgtgcttatttgctacaagtaaatttttatttatttttctcacttccctcactccttcaaatttccaggtaaatagctgcccaggagttgcttcatctctgtcccaaaatacctagacaattgcgggataaggagaatggcagggagggagtagtggctaaaatcacacccttcaaaagaaagtgtgtaggacacacaattgtgagaagtctgaatgccatgcacatagggtatgactcactttgaaaattgtttataatcaaggaaatgaaaatgagttaatttcgtgcatgcatcatttaaagccaaatgagaagaaacttctaatttattttgttacttttcggctaacactggcagtatgtaacagatttattttgcagaaacatctagattgtccgtgatcttgatcctgcccttatgtgtcttgtctttgaaacccagtgtttcctggatatatggttcaggagacaagtttccagaatcaagttaggacccaggtcttctttttttccaaaccaaacattcttgctaatcctaaactacctgaggcagcctgtggtggcctcagctctaaaaccattgtttaaaggcttctacccatcaatggcccttcagcagagtggtacggttaacggggtagggtctggagtcaggggagacctgggttcaaatcctacatctttacacctctaatccccagtgtccttgtctataaattgggaatatagccatgtcatgggattcttgtgagggttaaatgaggtaaaacacatacaatgcttagcatgtatacaattaagcactaaataattgaaacacattaagtactaaatgaatgtcagcagcttatcactattatctgtataatgataccaagggtgtgccgactcatacccttaggggttggctggattcggccttttctctcgggaaaacatacctgatttattaatagtgctttcaagcatgtgataaatttctcaaactgcctgtcttgttccctagaaacaccaggaaggcctacctcaaatagcaacagagaaacctatcggagccttaccctacagctttccttggggcacgggtgagcaatctgccttagaggggagaggctctgtgctgaggctctttgaatgctttgaataaatagatccccagataatgaaaagacttcaaaacaaattctacaagaaactgagtagtgtttatagtgaggccctagtgtacatgcaaaaaacccccactgcccttgcttaaatgtatctgattaacttgaatacatttttaaatgagggcttttttccctctttcagtgtttcggccagtcatttgccacttctcattccatcttagttctctgtaaagaaggtgccagagacctaaggtgcccaaggcaattttgcattttacaattctaagctttagaatgaagtcatcaatttgctacatccggactacagtgcaattattcctttgccttgctggaaattggagtgaaatctttctagctgtcaatttcaactcagttgcagtagtgttttgaagaattaatggcgataaggttagaaaattttaagtcaaacgtagggaaaaagtaccagctagaccatcataagcatttgctttgaaagcatgcttctaaagtgtgtttaacctcaaataacagtcacaaatatggttattatgaatgtatgcacagatttttatgtttctaattttaagaagttctagggagctccctgtaacgatttagggaatctctagattctgatatactgcaagtcttttaatggtaggaatcacattgaattaattttgtaggcccagggcctaaatttagtaggtgttcagtacctattggcatcaattcatatgtaggtttaaaatactgtatgaagatacagaatcaccaccatcaaatcaaattgaaatatgtaacaggctagtataatattaacatctgactttaaacaacaacaaagaaaccaaatgagtaactcctcccttcaaactaatagtcagtttcttccaactcagtctctttctcctctcaggaagaatgcgtatctaaaaatttcccattgcagactgctggaaacaacattctaaactatttatgcttctgcaataacctttccaatttgctggaccagtgcaagattaaacacgagatatctcaagtctcaatgtaaaggaacaccacgacagcctggactgtgggtgaagttcattcttccccagcagactctgcctttcattctcggggttgggtgtgccccaaacagaggtaccgacggtaacgaagcccaagaatgttcaaccacaacctgtctgtgaaggtgttggatgacgtttgccattcaggtgaagattatttatgttccagtcccacctgagtagcaaagtgaacactgtgctgaatgctcagaaagatgttaatgaaccgtgctggacagagcagagctgaaaggcgccttgcgagtgtcgtagtgagaatgtggctgtcccagctgcaaagccctgttaggaggcatgaggaagcacttgctgccctaagaaacgatgccttcgacattttcaaaagatctatgtggctgtctgaaacaatgcggagagcagatagacgcaatatttgggaaccaaagagtgactgctgttggcgttgcatcataacataagcgctttcccccttctcgtcactatcatttgtatcaaccaaagaactgatctctggtatcctcgaaggaatgctgtggggatattcttcatctctgttcatggtacatcagcaatttgtggggaaaagatggactatataacacaatgatctgcctaaaagaaactgtctctacttatagggggctgagcaaaccttagagcatctgcggatgctcgtcattatcttcaaaagtccccaagagtttttctccatactttattattgctattttgtttaggctagaaaaaaaaaaactcataaaattgtcttcaaaccaaaccaaaggaaatgaaaagaaaaaaaa

SEQ ID NO: 289541 - DNA, 348 bp, Artificial Sequence
  derived and/or modified sequence
atgacaatgacattgcacaccaaagcatccggcatggccctgctgcaccaaatacagggcaacgagctggagcccctgaatcggccacagctcaagatacccctggaacgtcctttgggcgaggtgtatctggattctagcaaacccgcagtgtataattatcccgaaggtgccgcctacgaatttaatgcggctgcagccgccaacgctcaggtgtacgggcaaactgggctcccttatggaccaggttctgaagcggctgcgttcggctcaaacggtctgggaggctttccccccctgaactctgtgagccccagtccccttatgctcctgcatcccccaccatag

SEQ ID NO: 289542 - DNA, 1452 bp, Artificial Sequence
  derived and/or modified sequence
atgacaatgactcttcacacaaaggcttccggaatggccctcctgcaccagattcagggaaatgaactggaaccattgaaccgacctcagctcaagatacccctggagcgccctcttggagaggtgtacctcgattccagtaagccagcagtgtacaattacccagaaggggctgcctacgaatttaacgcagccgccgccgccaacgcacaggtgtacgggcaaaccgggctaccctacgggcccgggagcgaagccgcagctttcggaagtaatggtctggggggctttcctcctctgaattccgtttccccttccccattaatgttgcttcacccaccaccccagctgtccccattcctgcagccgcacggccagcaggtgccttactacctggagaacgagccgtcaggatatacagtgcgcgaagcggggccccccgccttttacagaccaaactcagacaacagaagacagggagggcgagaaaggctagctagcacaaacgataaaggaagcatggctatggaatccgccaaggagactagatactgcgcggtgtgcaacgattacgcatcagggtaccattacggcgtttggagctgcgaaggctgtaaggccttttttaagcgctcaatacaaggacacaatgattacatgtgtcctgccacaaaccagtgcaccatcgacaaaaaccggcggaagtcttgtcaagcatgcaggctacgtaagtgctacgaggtgggcatgatgaaaggcgggtttgtagacctgacactccatgatcaggttcacctgctggaatgcgcatggctcgagattcttatgataggcttagtttggcggtctatggagcaccctggcaagctgctgttcgctcccaatttgcttctagacaggaatcagggaaaatgcgtagagggcatggttgaaatcttcgatatgttgcttgcgaccagctcccggttccgcatgatgaatcttcagggtgaggaattcgtctgcctgaagagtataattctgttgaactccggcgtttacacgttcttgtcctcaaccctaaaatctttagaggagaaagatcatatccacagagtgcttgataaaataacagatacattaatccacctgatggctaaggctggcttgactctccaacagcagcatcagcggctggcacaactcttgctgattttgtcccacatccgacatatgtctaataaaggaatggagcacctgtacagcatgaagtgtaagaatgttgtccccctctatgatcttctgcttgagatgctggacgctcatcgcctgcatgcaccgacttctagggggggcgcctcagttgaagagaccgatcagagtcacctagcgaccgcgggctcaacttcctcccacagcttacagaagtactacatcacaggcgaagccgaaggcttcccagccacagtgtag

SEQ ID NO: 289543 - DNA, 5996 bp, Artificial Sequence
  derived and/or modified sequence
aaacacatccacacactctctctgcctagttcacacactgagccactcgcacatgcgagcacattccttccttccttctcactctctcggcccttgacttctacaagcccatggaacatttctggaaagacgttcttgatccagcagggtggcccgccggtttctgagccttctgccctgcggggacacggtctgcaccctgcccgcggccacggaccatgaccatgaccctccacaccaaagcatctgggatggccctactgcatcagatccaagggaacgagctggagcccctgaaccgtccgcagctcaagatccccctggagcggcccctgggcgaggtgtacctggacagcagcaagcccgccgtgtacaactaccccgagggcgccgcctacgagttcaacgccgcggccgccgccaacgcgcaggtctacggtcagaccggcctcccctacggccccgggtctgaggctgcggcgttcggctccaacggcctggggggtttccccccactcaacagcgtgtctccgagcccgctgatgctactgcacccgccgccgcagctgtcgcctttcctgcagccccacggccagcaggtgccctactacctggagaacgagcccagcggctacacggtgcgcgaggccggcccgccggcattctacaggccaaattcagataatcgacgccagggtggcagagaaagattggccagtaccaatgacaagggaagtatggctatggaatctgccaaggagactcgctactgtgcagtgtgcaatgactatgcttcaggctaccattatggagtctggtcctgtgagggctgcaaggccttcttcaagagaagtattcaaggacataacgactatatgtgtccagccaccaaccagtgcaccattgataaaaacaggaggaagagctgccaggcctgccggctccgtaaatgctacgaagtgggaatgatgaaaggtgggatacgaaaagaccgaagaggagggagaatgttgaaacacaagcgccagagagatgatggggagggcaggggtgaagtggggtctgctggagacatgagagctgccaacctttggccaagcccgctcatgatcaaacgctctaagaagaacagcctggccttgtccctgacggccgaccagatggtcagtgccttgttggatgctgagcccccgatactctattccgagtatgatcctaccagacccttcagtgaagcttcgatgatgggcttactgaccaacctggcagacagggagctggttcacatgatcaactgggcgaagagggtgccaggctttgtggatttgaccctccatgatcaggtccaccttctagaatgtgcctggctagagatcctgatgattggtctcgtctggcgctccatggagcacccagggaagctactgtttgctcctaacttgctcttggacagtaacaaaggcatggagcatctgtacagcatgaagtgcaagaacgtggtgcccctctatgacctgctgctggagatgctggacgcccaccgcctacatgcgcccactagccgtggaggggcatccgtggaggagacggaccaaagccacttggccactgcgggctctacttcatcgcattccttgcaaaagtattacatcacgggggaggcagagggtttccctgccacggtctgagagctccctggctcccacacggttcagataatccctgctgcattttaccctcatcatgcaccactttagccaaattctgtctcctgcatacactccggcatgcatccaacaccaatggctttctagatgagtggccattcatttgcttgctcagttcttagtggcacatcttctgtcttctgttgggaacagccaaagggattccaaggctaaatctttgtaacagctctctttcccccttgctatgttactaagcgtgaggattcccgtagctcttcacagctgaactcagtctatgggttggggctcagataactctgtgcatttaagctacttgtagagacccaggcctggagagtagacattttgcctctgataagcactttttaaatggctctaagaataagccacagcaaagaatttaaagtggctcctttaattggtgacttggagaaagctaggtcaagggtttattatagcaccctcttgtattcctatggcaatgcatccttttatgaaagtggtacaccttaaagcttttatatgactgtagcagagtatctggtgattgtcaattcattccccctataggaatacaaggggcacacagggaaggcagatcccctagttggcaagactattttaacttgatacactgcagattcagatgtgctgaaagctctgcctctggctttccggtcatgggttccagttaattcatgcctcccatggacctatggagagcagcaagttgatcttagttaagtctccctatatgagggataagttcctgatttttgtttttatttttgtgttacaaaagaaagccctccctccctgaacttgcagtaaggtcagcttcaggacctgttccagtgggcactgtacttggatcttcccggcgtgtgtgtgccttacacaggggtgaactgttcactgtggtgatgcatgatgagggtaaatggtagttgaaaggagcaggggccctggtgttgcatttagccctggggcatggagctgaacagtacttgtgcaggattgttgtggctactagagaacaagagggaaagtagggcagaaactggatacagttctgaggcacagccagacttgctcagggtggccctgccacaggctgcagctacctaggaacattccttgcagaccccgcattgccctttgggggtgccctgggatccctggggtagtccagctcttcttcatttcccagcgtggccctggttggaagaagcagctgtcacagctgctgtagacagctgtgttcctacaattggcccagcaccctggggcacgggagaagggtggggaccgttgctgtcactactcaggctgactggggcctggtcagattacgtatgcccttggtggtttagagataatccaaaatcagggtttggtttggggaagaaaatcctcccccttcctcccccgccccgttccctaccgcctccactcctgccagctcatttccttcaatttcctttgacctataggctaaaaaagaaaggctcattccagccacagggcagccttccctgggcctttgcttctctagcacaattatgggttacttcctttttcttaacaaaaaagaatgtttgatttcctctgggtgaccttattgtctgtaattgaaaccctattgagaggtgatgtctgtgttagccaatgacccaggtgagctgctcgggcttctcttggtatgtcttgtttggaaaagtggatttcattcatttctgattgtccagttaagtgatcaccaaaggactgagaatctgggagggcaaaaaaaaaaaaaaagtttttatgtgcacttaaatttggggacaattttatgtatctgtgttaaggatatgtttaagaacataattcttttgttgctgtttgtttaagaagcaccttagtttgtttaagaagcaccttatatagtataatatatatttttttgaaattacattgcttgtttatcagacaattgaatgtagtaattctgttctggatttaatttgactgggttaacatgcaaaaaccaaggaaaaatatttagtttttttttttttttttgtatacttttcaagctaccttgtcatgtatacagtcatttatgcctaaagcctggtgattattcatttaaatgaagatcacatttcatatcaacttttgtatccacagtagacaaaatagcactaatccagatgcctattgttggatactgaatgacagacaatcttatgtagcaaagattatgcctgaaaaggaaaattattcagggcagctaattttgcttttaccaaaatatcagtagtaatatttttggacagtagctaatgggtcagtgggttctttttaatgtttatacttagattttcttttaaaaaaattaaaataaaacaaaaaaaaatttctaggactagacgatgtaataccagctaaagccaaacaattatacagtggaaggttttacattattcatccaatgtgtttctattcatgttaagatactactacatttgaagtgggcagagaacatcagatgattgaaatgttcgcccaggggtctccagcaactttggaaatctctttgtatttttacttgaagtgccactaatggacagcagatattttctggctgatgttggtattgggtgtaggaacatgatttaaaaaaaaactcttgcctctgctttcccccactctgaggcaagttaaaatgtaaaagatgtgatttatctggggggctcaggtatggtggggaagtggattcaggaatctggggaatggcaaatatattaagaagagtattgaaagtatttggaggaaaatggttaattctgggtgtgcaccagggttcagtagagtccacttctgccctggagaccacaaatcaactagctccatttacagccatttctaaaatggcagcttcagttctagagaagaaagaacaacatcagcagtaaagtccatggaatagctagtggtctgtgtttcttttcgccattgcctagcttgccgtaatgattctataatgccatcatgcagcaattatgagaggctaggtcatccaaagagaagaccctatcaatgtaggttgcaaaatctaacccctaaggaagtgcagtctttgatttgatttccctagtaaccttgcagatatgtttaaccaagccatagcccatgccttttgagggctgaacaaataagggacttactgataatttacttttgatcacattaaggtgttctcaccttgaaatcttatacactgaaatggccattgatttaggccactggcttagagtactccttcccctgcatgacactgattacaaatactttcctattcatactttccaattatgagatggactgtgggtactgggagtgatcactaacaccatagtaatgtctaatattcacaggcagatctgcttggggaagctagttatgtgaaaggcaaatagagtcatacagtagctcaaaaggcaaccataattctctttggtgcaggtcttgggagcgtgatctagattacactgcaccattcccaagttaatcccctgaaaacttactctcaactggagcaaatgaactttggtcccaaatatccatcttttcagtagcgttaattatgctctgtttccaactgcatttcctttccaattgaattaaagtgtggcctcgtttttagtcatttaaaattgttttctaagtaattgctgcctctattatggcacttcaattttgcactgtcttttgagattcaagaaaaatttctattcttttttttgcatccaattgtgcctgaacttttaaaatatgtaaatgctgccatgttccaaacccatcgtcagtgtgtgtgtttagagctgtgcaccctagaaacaacatattgtcccatgagcaggtgcctgagacacagacccctttgcattcacagagaggtcattggttatagagacttgaattaataagtgacattatgccagtttctgttctctcacaggtgataaacaatgctttttgtgcactacatactcttcagtgtagagctcttgttttatgggaaaaggctcaaatgccaaattgtgtttgatggattaatatgcccttttgccgatgcatactattactgatgtgactcggttttgtcgcagctttgctttgtttaatgaaacacacttgtaaacctcttttgcactttgaaaaagaatccagcgggatgctcgagcacctgtaaacaattttctcaacctatttgatgttcaaataaagaattaaactaaa

SEQ ID NO: 289544 - DNA, 731 bp, Artificial Sequence
  derived and/or modified sequence
atgcaaccgcacaccccattctatctgccctatctcggttacagtgtagtcctccccagggtcatcctatgtacacactacgtatttctagccaacgaggagggggaatcaaacagaaagagagacaaacagagatatatcggagtctggcacggggcacataaggcagcacattagagaaagccggcccctggatccgtctttcgcgtttattttaagcccagtcttccctgggccacctttagcagatcctcgtgcgcccccgccccctggccgtgaaactcagcctctatccagcagcgacgacaagtaaagtggcccgccggtttctgagccttctgccctgcggggacacggtctgcaccctgcccgcggccacggaccatgaccatgaccctccacaccaaagcatctgggatggccctactgcatcagatccaagggaacgagctggagcccctgaaccgtccgcagctcaagatccccctggagcggcccctgggcgaggtgtacctggacagcagcaagcccgccgtgtacaactaccccgagggcgccgcctacgagttcaacgccgcggccgccgccaacgcgcaggtctacggtcagaccggcctcccctacggccccgggtctgaggctgcggcgttcggctccaacggcctggggggtttccccccactcaacagcgtgtctccgagcccgctgatgctactgcacccgccgccgca

SEQ ID NO: 289545 - DNA, 5978 bp, Artificial Sequence
  derived and/or modified sequence
aaacacatccacacactctctctgcctagttcacacactgagccactcgcacatgcgagcacattccttccttccttctcactctctcggcccttgacttctacaagcccatggaacatttctggaaagacgttcttgatccagcagggtggcccgccggtttctgagccttctgccctgcggggacacggtctgcaccctgcccgcggccacggaccatgaccatgaccctccacaccaaagcatctgggatggccctactgcatcagatccaagggaacgagctggagcccctgaaccgtccgcagctcaagatccccctggagcggcccctgggcgaggtgtacctggacagcagcaagcccgccgtgtacaactaccccgagggcgccgcctacgagttcaacgccgcggccgccgccaacgcgcaggtctacggtcagaccggcctcccctacggccccgggtctgaggctgcggcgttcggctccaacggcctggggggtttccccccactcaacagcgtgtctccgagcccgctgatgctactgcacccgccgccgcagctgtcgcctttcctgcagccccacggccagcaggtgccctactacctggagaacgagcccagcggctacacggtgcgcgaggccggcccgccggcattctacaggccaaattcagataatcgacgccagggtggcagagaaagattggccagtaccaatgacaagggaagtatggctatggaatctgccaaggagactcgctactgtgcagtgtgcaatgactatgcttcaggctaccattatggagtctggtcctgtgagggctgcaaggccttcttcaagagaagtattcaaggacataacgactatatgtgtccagccaccaaccagtgcaccattgataaaaacaggaggaagagctgccaggcctgccggctccgtaaatgctacgaagtgggaatgatgaaaggtggctttgtggatttgaccctccatgatcaggtccaccttctagaatgtgcctggctagagatcctgatgattggtctcgtctggcgctccatggagcacccagggaagctactgtttgctcctaacttgctcttggacaggaaccagggaaaatgtgtagagggcatggtggagatcttcgacatgctgctggctacatcatctcggttccgcatgatgaatctgcagggagaggagtttgtgtgcctcaaatctattattttgcttaattctggagtgtacacatttctgtccagcaccctgaagtctctggaagagaaggaccatatccaccgagtcctggacaagatcacagacactttgatccacctgatggccaaggcaggcctgaccctgcagcagcagcaccagcggctggcccagctcctcctcatcctctcccacatcaggcacatgagtaacaaaggcatggagcatctgtacagcatgaagtgcaagaacgtggtgcccctctatgacctgctgctggagatgctggacgcccaccgcctacatgcgcccactagccgtggaggggcatccgtggaggagacggaccaaagccacttggccactgcgggctctacttcatcgcattccttgcaaaagtattacatcacgggggaggcagagggtttccctgccacggtctgagagctccctggctcccacacggttcagataatccctgctgcattttaccctcatcatgcaccactttagccaaattctgtctcctgcatacactccggcatgcatccaacaccaatggctttctagatgagtggccattcatttgcttgctcagttcttagtggcacatcttctgtcttctgttgggaacagccaaagggattccaaggctaaatctttgtaacagctctctttcccccttgctatgttactaagcgtgaggattcccgtagctcttcacagctgaactcagtctatgggttggggctcagataactctgtgcatttaagctacttgtagagacccaggcctggagagtagacattttgcctctgataagcactttttaaatggctctaagaataagccacagcaaagaatttaaagtggctcctttaattggtgacttggagaaagctaggtcaagggtttattatagcaccctcttgtattcctatggcaatgcatccttttatgaaagtggtacaccttaaagcttttatatgactgtagcagagtatctggtgattgtcaattcattccccctataggaatacaaggggcacacagggaaggcagatcccctagttggcaagactattttaacttgatacactgcagattcagatgtgctgaaagctctgcctctggctttccggtcatgggttccagttaattcatgcctcccatggacctatggagagcagcaagttgatcttagttaagtctccctatatgagggataagttcctgatttttgtttttatttttgtgttacaaaagaaagccctccctccctgaacttgcagtaaggtcagcttcaggacctgttccagtgggcactgtacttggatcttcccggcgtgtgtgtgccttacacaggggtgaactgttcactgtggtgatgcatgatgagggtaaatggtagttgaaaggagcaggggccctggtgttgcatttagccctggggcatggagctgaacagtacttgtgcaggattgttgtggctactagagaacaagagggaaagtagggcagaaactggatacagttctgaggcacagccagacttgctcagggtggccctgccacaggctgcagctacctaggaacattccttgcagaccccgcattgccctttgggggtgccctgggatccctggggtagtccagctcttcttcatttcccagcgtggccctggttggaagaagcagctgtcacagctgctgtagacagctgtgttcctacaattggcccagcaccctggggcacgggagaagggtggggaccgttgctgtcactactcaggctgactggggcctggtcagattacgtatgcccttggtggtttagagataatccaaaatcagggtttggtttggggaagaaaatcctcccccttcctcccccgccccgttccctaccgcctccactcctgccagctcatttccttcaatttcctttgacctataggctaaaaaagaaaggctcattccagccacagggcagccttccctgggcctttgcttctctagcacaattatgggttacttcctttttcttaacaaaaaagaatgtttgatttcctctgggtgaccttattgtctgtaattgaaaccctattgagaggtgatgtctgtgttagccaatgacccaggtgagctgctcgggcttctcttggtatgtcttgtttggaaaagtggatttcattcatttctgattgtccagttaagtgatcaccaaaggactgagaatctgggagggcaaaaaaaaaaaaaaagtttttatgtgcacttaaatttggggacaattttatgtatctgtgttaaggatatgtttaagaacataattcttttgttgctgtttgtttaagaagcaccttagtttgtttaagaagcaccttatatagtataatatatatttttttgaaattacattgcttgtttatcagacaattgaatgtagtaattctgttctggatttaatttgactgggttaacatgcaaaaaccaaggaaaaatatttagtttttttttttttttttgtatacttttcaagctaccttgtcatgtatacagtcatttatgcctaaagcctggtgattattcatttaaatgaagatcacatttcatatcaacttttgtatccacagtagacaaaatagcactaatccagatgcctattgttggatactgaatgacagacaatcttatgtagcaaagattatgcctgaaaaggaaaattattcagggcagctaattttgcttttaccaaaatatcagtagtaatatttttggacagtagctaatgggtcagtgggttctttttaatgtttatacttagattttcttttaaaaaaattaaaataaaacaaaaaaaaatttctaggactagacgatgtaataccagctaaagccaaacaattatacagtggaaggttttacattattcatccaatgtgtttctattcatgttaagatactactacatttgaagtgggcagagaacatcagatgattgaaatgttcgcccaggggtctccagcaactttggaaatctctttgtatttttacttgaagtgccactaatggacagcagatattttctggctgatgttggtattgggtgtaggaacatgatttaaaaaaaaactcttgcctctgctttcccccactctgaggcaagttaaaatgtaaaagatgtgatttatctggggggctcaggtatggtggggaagtggattcaggaatctggggaatggcaaatatattaagaagagtattgaaagtatttggaggaaaatggttaattctgggtgtgcaccagggttcagtagagtccacttctgccctggagaccacaaatcaactagctccatttacagccatttctaaaatggcagcttcagttctagagaagaaagaacaacatcagcagtaaagtccatggaatagctagtggtctgtgtttcttttcgccattgcctagcttgccgtaatgattctataatgccatcatgcagcaattatgagaggctaggtcatccaaagagaagaccctatcaatgtaggttgcaaaatctaacccctaaggaagtgcagtctttgatttgatttccctagtaaccttgcagatatgtttaaccaagccatagcccatgccttttgagggctgaacaaataagggacttactgataatttacttttgatcacattaaggtgttctcaccttgaaatcttatacactgaaatggccattgatttaggccactggcttagagtactccttcccctgcatgacactgattacaaatactttcctattcatactttccaattatgagatggactgtgggtactgggagtgatcactaacaccatagtaatgtctaatattcacaggcagatctgcttggggaagctagttatgtgaaaggcaaatagagtcatacagtagctcaaaaggcaaccataattctctttggtgcaggtcttgggagcgtgatctagattacactgcaccattcccaagttaatcccctgaaaacttactctcaactggagcaaatgaactttggtcccaaatatccatcttttcagtagcgttaattatgctctgtttccaactgcatttcctttccaattgaattaaagtgtggcctcgtttttagtcatttaaaattgttttctaagtaattgctgcctctattatggcacttcaattttgcactgtcttttgagattcaagaaaaatttctattcttttttttgcatccaattgtgcctgaacttttaaaatatgtaaatgctgccatgttccaaacccatcgtcagtgtgtgtgtttagagctgtgcaccctagaaacaacatattgtcccatgagcaggtgcctgagacacagacccctttgcattcacagagaggtcattggttatagagacttgaattaataagtgacattatgccagtttctgttctctcacaggtgataaacaatgctttttgtgcactacatactcttcagtgtagagctcttgttttatgggaaaaggctcaaatgccaaattgtgtttgatggattaatatgcccttttgccgatgcatactattactgatgtgactcggttttgtcgcagctttgctttgtttaatgaaacacacttgtaaacctcttttgcactttgaaaaagaatccagcgggatgctcgagcacctgtaaacaattttctcaacctatttgatgttcaaataaagaattaaactaaa

SEQ ID NO: 289546 - DNA, 5418 bp, Artificial Sequence
  derived and/or modified sequence
gcttaaaaataatctcctgccagcccagtgacaagcctgtcccacccggggagaatgccccggagtggcgtgcgggtcagccagggtctgcgcctcgcagccactgtggaaggagcgcggccggtccaggacacaggagaccactttgtgacttcaatggcgaaggccaaattcagataatcgacgccagggtggcagagaaagattggccagtaccaatgacaagggaagtatggctatggaatctgccaaggagactcgctactgtgcagtgtgcaatgactatgcttcaggctaccattatggagtctggtcctgtgagggctgcaaggccttcttcaagagaagtattcaaggacataacgactatatgtgtccagccaccaaccagtgcaccattgataaaaacaggaggaagagctgccaggcctgccggctccgtaaatgctacgaagtgggaatgatgaaaggtgggatacgaaaagaccgaagaggagggagaatgttgaaacacaagcgccagagagatgatggggagggcaggggtgaagtggggtctgctggagacatgagagctgccaacctttggccaagcccgctcatgatcaaacgctctaagaagaacagcctggccttgtccctgacggccgaccagatggtcagtgccttgttggatgctgagcccccgatactctattccgagtatgatcctaccagacccttcagtgaagcttcgatgatgggcttactgaccaacctggcagacagggagctggttcacatgatcaactgggcgaagagggtgccaggctttgtggatttgaccctccatgatcaggtccaccttctagaatgtgcctggctagagatcctgatgattggtctcgtctggcgctccatggagcacccagggaagctactgtttgctcctaacttgctcttggacaggaaccagggaaaatgtgtagagggcatggtggagatcttcgacatgctgctggctacatcatctcggttccgcatgatgaatctgcagggagaggagtttgtgtgcctcaaatctattattttgcttaattctggtatctcacatgtagaagcaaagaagagaatcctgaacttgcatcctaaaatatttggaaacaagtggtttcctcgtgtctaaagcctctggtcataaggcctcacagtatcctgcagatcatcaaatccgtgtgtggacgtggggacattttgttttgaggcagttacatgaccatgggcaagtaaattagtctctctggccttcagttttctcatttgcaatgattcaatggtttgccttaaagtgtcttaagaaggataggatagctacccacaaactttggatcaaattttcttcaaaacatccttcccctgactttaaaatatgccctggcaaccaacactcaacacctgtagctagatgagttataacagagtgactgaagagagctcccacaattcctagttattaaatacctgactaattttcattaggagacatttaagaactttagtgatgggaagatttacatatataattgatagtacaatctgacagagctgaatagctcctgtttgtcaactgttaaattctttgtgcaattaggtcaaagatcaagatcaaaacaagggctgcccattgacctgttcactcctgagaaaaatggcaaaccattgaatcataaatcatgacagccaaaataattttaggatattaatgcacccctcatctttgcaaatgagaaaactgaaggccagagagactaatttacttgcccatttttgataaaaatgtcaccatttacagaatgtggactcctatgttggagtctgttgaaggacatggcacatttaacagcatcagagcattttttattaaaatttaatttgtgcatgacttctaatgctgaagaacgccaagctaggaagaagtcatgggctgagatggggacagagagaacacacaatattcagtgactgtccgtgcagctggctgcccttgaaaatatccgaactatccactgggaaaatgcctgtccccttggggtaattaccagagtttcaacatgcccaaagctgcctcatcttcagggggaacttgttctagcgattttagtatcaagaagctaatggtcccagggaaagggttatttttaatatttagctactgtgctaaaaatcacctaagtttctagagtcttgggaaatttcataagggaaagaacaaaggcaacttgttgactacccactggtcattctcctctggtcttattacatacatggatgccagtttagattgtgtttatataggaaaaattaaatgtgtgagcctccttaaggaacatcatcaatacagatatatcagatagttctgtccagcaaaaaacgtgcttatttgctacaagtaaatttttatttatttttctcacttccctcactccttcaaatttccaggtaaatagctgcccaggagttgcttcatctctgtcccaaaatacctagacaattgcgggataaggagaatggcagggagggagtagtggctaaaatcacacccttcaaaagaaagtgtgtaggacacacaattgtgagaagtctgaatgccatgcacatagggtatgactcactttgaaaattgtttataatcaaggaaatgaaaatgagttaatttcgtgcatgcatcatttaaagccaaatgagaagaaacttctaatttattttgttacttttcggctaacactggcagtatgtaacagatttattttgcagaaacatctagattgtccgtgatcttgatcctgcccttatgtgtcttgtctttgaaacccagtgtttcctggatatatggttcaggagacaagtttccagaatcaagttaggacccaggtcttctttttttccaaaccaaacattcttgctaatcctaaactacctgaggcagcctgtggtggcctcagctctaaaaccattgtttaaaggcttctacccatcaatggcccttcagcagagtggtacggttaacggggtagggtctggagtcaggggagacctgggttcaaatcctacatctttacacctctaatccccagtgtccttgtctataaattgggaatatagccatgtcatgggattcttgtgagggttaaatgaggtaaaacacatacaatgcttagcatgtatacaattaagcactaaataattgaaacacattaagtactaaatgaatgtcagcagcttatcactattatctgtataatgataccaagggtgtgccgactcatacccttaggggttggctggattcggccttttctctcgggaaaacatacctgatttattaatagtgctttcaagcatgtgataaatttctcaaactgcctgtcttgttccctagaaacaccaggaaggcctacctcaaatagcaacagagaaacctatcggagccttaccctacagctttccttggggcacgggtgagcaatctgccttagaggggagaggctctgtgctgaggctctttgaatgctttgaataaatagatccccagataatgaaaagacttcaaaacaaattctacaagaaactgagtagtgtttatagtgaggccctagtgtacatgcaaaaaacccccactgcccttgcttaaatgtatctgattaacttgaatacatttttaaatgagggcttttttccctctttcagtgtttcggccagtcatttgccacttctcattccatcttagttctctgtaaagaaggtgccagagacctaaggtgcccaaggcaattttgcattttacaattctaagctttagaatgaagtcatcaatttgctacatccggactacagtgcaattattcctttgccttgctggaaattggagtgaaatctttctagctgtcaatttcaactcagttgcagtagtgttttgaagaattaatggcgataaggttagaaaattttaagtcaaacgtagggaaaaagtaccagctagaccatcataagcatttgctttgaaagcatgcttctaaagtgtgtttaacctcaaataacagtcacaaatatggttattatgaatgtatgcacagatttttatgtttctaattttaagaagttctagggagctccctgtaacgatttagggaatctctagattctgatatactgcaagtcttttaatggtaggaatcacattgaattaattttgtaggcccagggcctaaatttagtaggtgttcagtacctattggcatcaattcatatgtaggtttaaaatactgtatgaagatacagaatcaccaccatcaaatcaaattgaaatatgtaacaggctagtataatattaacatctgactttaaacaacaacaaagaaaccaaatgagtaactcctcccttcaaactaatagtcagtttcttccaactcagtctctttctcctctcaggaagaatgcgtatctaaaaatttcccattgcagactgctggaaacaacattctaaactatttatgcttctgcaataacctttccaatttgctggaccagtgcaagattaaacacgagatatctcaagtctcaatgtaaaggaacaccacgacagcctggactgtgggtgaagttcattcttccccagcagactctgcctttcattctcggggttgggtgtgccccaaacagaggtaccgacggtaacgaagcccaagaatgttcaaccacaacctgtctgtgaaggtgttggatgacgtttgccattcaggtgaagattatttatgttccagtcccacctgagtagcaaagtgaacactgtgctgaatgctcagaaagatgttaatgaaccgtgctggacagagcagagctgaaaggcgccttgcgagtgtcgtagtgagaatgtggctgtcccagctgcaaagccctgttaggaggcatgaggaagcacttgctgccctaagaaacgatgccttcgacattttcaaaagatctatgtggctgtctgaaacaatgcggagagcagatagacgcaatatttgggaaccaaagagtgactgctgttggcgttgcatcataacataagcgctttcccccttctcgtcactatcatttgtatcaaccaaagaactgatctctggtatcctcgaaggaatgctgtggggatattcttcatctctgttcatggtacatcagcaatttgtggggaaaagatggactatataacacaatgatctgcctaaaagaaactgtctctacttatagggggctgagcaaaccttagagcatctgcggatgctcgtcattatcttcaaaagtccccaagagtttttctccatactttattattgctattttgtttaggctagaaaaaaaaaaactcataaaattgtcttcaaaccaaaccaaagg

SEQ ID NO: 289547 - DNA, 255 bp, Artificial Sequence
  derived and/or modified sequence
atgaccatgaccctgcacaccaaggccagcggcatggccctgctgcaccagatccagggcaatgagctggagcccctgaaccggccccagctgaagatccccctggagcggcccctgggggaggtgtacctggacagcagcaagccagctgtgtacaactacccagagggcgccgcctatgagttcaatgctgctgctgctgccaatgcccaggtgtatggccagacaggcctgccctacggccctggcagctag

SEQ ID NO: 289548 - DNA, 1167 bp, Artificial Sequence
  derived and/or modified sequence
tgactgaagatcatcagctgccagcccagcgacaagcctgtgcccccaggagaaaatgcccctgagtggagggctggccagcccggcagcgcccccaggagccactgcggccgctctgctgctggccctggccaccggcggcccctgtgtgacttcaatggagagggccccaacagcgacaacagacggcagggcggccgggagcggctggccagcaccaatgacaagggctccatggccatggagagcgccaaggagacccgctactgtgctgtgtgcaatgactatgccagcggctaccactacggcgtgtggagctgtgagggctgcaaggccttcttcaagaggagcatccagggccacaatgactacatgtgcccagccaccaaccagtgcaccatcgacaagaacagaaggaagagctgccaggcctgccgcctgaggaaatgttatgaggtgggcatgatgaagggcggcatcaggaaggaccggcggggcggccgcatgctgaagcacaagaggcagagagatgatggagagggccgcggggaggtgggcagcgctggggacatgagagctgccaacctgtggcccagccccctgatgatcaagaggagcaagaagaacagcctggccctgagcctgacagctgaccagatggtgtctgccctgctggatgctgagccccccatcctgtacagtgaatatgaccccacccggcccttcagcgaggcctccatgatgggcctgctgaccaacctggccgaccgggagctggtgcacatgatcaactgggccaagagggtgcccggctttgtggacctgaccctgcatgaccaggtgcacctgctggagtgtgcctggctggagatcctgatgattggcctggtgtggaggtccatggagcaccctgggaagctgctgtttgcccccaacctgctgctggacaggaaccagggcaaatgtgtggagggcatggtggagatctttgacatgctgctggccaccagcagccgcttcaggatgatgaacctgcagggcgaggagtttgtgtgcctgaagagcatcatcctgctgaacagcggcatcagccacgtggaggccaagaagaggatcctgaacctgcaccccaagatcttcggcaacaagtggttcccccgggtgtag

SEQ ID NO: 289549 - DNA, 348 bp, Artificial Sequence
  derived and/or modified sequence
atgaccatgaccctgcacaccaaggccagcggcatggccctgctgcaccagatccagggcaatgagctggagcccctgaaccggccccagctgaagatccccctggagcggcccctgggggaggtgtacctggacagcagcaagccagctgtgtacaactacccagagggcgccgcctatgagttcaatgctgctgctgctgccaatgcccaggtgtatggccagacaggcctgccctacggccctggcagcgaggccgccgccttcggcagcaatggcctgggcggcttcccccccctgaacagcgtgagccccagccccctgatgctgctgcaccccccaccctag

SEQ ID NO: 289550 - DNA, 1452 bp, Artificial Sequence
  derived and/or modified sequence
atgaccatgaccctgcacaccaaggccagcggcatggccctgctgcaccagatccagggcaatgagctggagcccctgaaccggccccagctgaagatccccctggagcggcccctgggggaggtgtacctggacagcagcaagccagctgtgtacaactacccagagggcgccgcctatgagttcaatgctgctgctgctgccaatgcccaggtgtatggccagacaggcctgccctacggccctggcagcgaggccgccgccttcggcagcaatggcctgggcggcttcccccccctgaacagcgtgagccccagccccctgatgctgctgcaccccccaccccagctgagccccttcctgcagccccacggccagcaggtgccctactacctggagaatgagcccagcggctacacagtgcgggaggccggccccccagccttctaccggcccaacagcgacaacagacggcagggcggccgggagcggctggccagcaccaatgacaagggctccatggccatggagagcgccaaggagacccgctactgtgctgtgtgcaatgactatgccagcggctaccactatggagtgtggagctgtgagggctgcaaggccttcttcaagaggagcatccagggccacaatgactacatgtgcccagccaccaaccagtgcaccatcgacaagaacagaaggaagagctgccaggcctgccgcctgaggaagtgctatgaggtgggcatgatgaagggcggctttgtggacctgaccctgcatgaccaggtgcacctgctggagtgtgcctggctggagatcctgatgattggcctggtgtggaggtccatggagcaccctgggaagctgctgtttgcccccaacctgctgctggacaggaaccagggcaaatgtgtggagggcatggtggagatctttgacatgctgctggccaccagcagccgcttcaggatgatgaacctgcagggcgaggagtttgtgtgcctgaagagcatcatcctgctgaacagcggcgtgtacaccttcctgagcagcaccctgaagagcctggaggagaaggaccacatccaccgggtgctggacaagatcacagacaccctcatccacctgatggccaaggccggcctgaccctgcagcagcagcaccagaggctggcccagctgctgctgatcctgagccacatccgccacatgagcaacaagggcatggagcacctgtacagcatgaagtgcaagaatgtggtgcccctgtatgacctgctgctggagatgctggatgcccaccggctgcacgcccccaccagccggggcggggcctctgtggaggagacagaccagagccacctggccacagctggcagcaccagcagccacagcctgcagaagtactacatcactggagaggccgagggcttccctgccaccgtgtag

SEQ ID NO: 289551 - DNA, 255 bp, Artificial Sequence
  derived and/or modified sequence
atgaccatgaccctgcacaccaaggccagcggcatggccctgctgcatcagattcaaggaaatgagttagagccactgaaccggcctcagctgaagataccgctggagcgccccctgggggaagtttatctggatagctctaagccagccgtttacaattatccagaaggagccgcctacgagttcaatgctgctgcagcagccaacgcccaagtgtatggacagacaggcctgccttacggccccggctcctag

SEQ ID NO: 289552 - DNA, 1167 bp, Artificial Sequence
  derived and/or modified sequence
tgactgaagatcatcagctgccagcccagcgacaagcccgtgccccccggcgagaacgctcccgagtggcgagctgggcaacccgggtctgctcctcgctcccattgtggccgcagtgccgcaggccccgggcatcgccgccctctatgcgacttcaatggcgagggccccaactctgataacagacggcagggggggagggagagactggcgtcgactaacgataagggttccatggccatggagagcgcaaaggagacgcggtactgcgcggtttgtaacgattacgcatccggataccattatggcgtttggagttgtgaaggctgcaaggctttctttaagaggagtattcagggacacaacgactacatgtgtcccgctaccaatcagtgcactattgacaagaaccgccgcaagtcctgtcaggcatgccgcctcaggaaatgctacgaagtcgggatgatgaagggaggtattcggaaagaccgcagaggaggacgcatgctcaaacacaaacgccagcgtgacgacggagagggccggggagaagtgggctcggccggagatatgagggcagccaatctgtggccatcgcccctaatgattaaacggtctaaaaaaaactctctggctttgtctttgaccgccgaccagatggtgagcgctcttctggacgcagagcctccaattctctatagtgaatatgaccctacacgaccattctctgaggcgtccatgatgggcttacttaccaatttagcggaccgtgaattagttcacatgataaattgggccaagagagttccggggttcgtggatctgacccttcacgatcaggtgcacctgttggagtgcgcctggctggagatcctgatgatagggcttgtgtggcgaagcatggaacacccaggcaagcttctgttcgcgcctaatctcctgctcgatcgcaaccaggggaaatgtgtggaaggcatggtggagatctttgatatgctgcttgccacgtcatcccgatttaggatgatgaatttgcagggcgaggaattcgtgtgtctgaagagtataattctgctgaatagcggaatctcccacgtcgaggctaagaaaaggatcttgaatctgcatcctaaaatctttggtaataagtggttcccacgggtgtag

SEQ ID NO: 289553 - DNA, 348 bp, Artificial Sequence
  derived and/or modified sequence
atgaccatgaccctgcacaccaaggccagcggcatggccctgctgcaccagatccaggggaacgagctggagcccctaaaccgtccgcagcttaaaatccctttggaaaggcctctaggtgaggtctacctggattcttctaaaccagccgtgtacaattacccagaaggagctgcttacgaatttaacgccgccgctgccgccaacgcacaggtatacggacagaccgggctgccctatgggcctggttcagaagcagcagccttcggaagcaatggtctgggcggcttcccccctctgaacagtgtgtcacctagcccattgatgctactacaccctccaccttag

SEQ ID NO: 289554 - DNA, 1452 bp, Artificial Sequence
  derived and/or modified sequence
atgaccatgaccctgcacaccaaggccagcggcatggccctgctgcatcaaatccagggcaacgagctggaaccactcaaccggccacaactgaaaatccccctagaaagaccactgggagaggtctatctggattcttctaagccggctgtgtataactatcccgagggggcggcctatgagttcaatgctgctgccgctgccaatgcccaggtctatgggcaaacgggactaccatatggccccgggtccgaagcagccgctttcggatccaatgggcttgggggtttccctcctttgaacagtgtgagtccttcgccccttatgctcctccatccaccaccacaactgtcgcctttcttgcaacctcatggccaacaggttccatattatcttgagaacgagccgagcggctacacagtccgggaagccggcccccccgccttttaccgtccaaattcagacaaccggcggcagggaggcagagaacggctggcttcaaccaacgacaagggatctatggccatggagtcagcaaaggagacgagatactgcgctgtgtgtaatgactatgccagcgggtaccactatggggtgtggtcttgtgagggctgtaaggctttctttaaacgttccatccaggggcacaatgactacatgtgtcccgccacaaaccaatgcacaatcgacaagaatagaagaaagtcatgtcaggcttgtagattacgcaagtgctacgaagtgggtatgatgaagggcggctttgtggacctgacactccacgatcaggtccatctgctggaatgtgcttggctggaaattttgatgatcggactggtctggagaagcatggaacaccctgggaagttactgtttgcccctaacctccttttagatcggaaccagggaaagtgcgtggagggaatggtggagatttttgatatgctcctcgctacttcttctcgattccggatgatgaacttgcagggagaagaattcgtgtgcttgaaatctataatcttgctcaattctggagtgtacacctttcttagctcaacactaaaatcactcgaagaaaaagaccacattcaccgcgtccttgacaagatcactgatacactaattcatctcatggccaaagccggtctgactctgcagcagcagcatcagcgcctggctcagctgctgttgattctgtcccatatcaggcatatgagtaataagggcatggagcacctatacagtatgaaatgtaagaatgtagtgcctctctacgatcttcttcttgagatgctcgacgcacataggcttcatgcccccacatctagaggtggcgcttccgtggaagaaactgaccagtctcatttagctactgccggatctactagtagtcactcactccagaaatattacattaccggagaagctgaaggctttcctgctaccgtgtag

SEQ ID NO: 289555 - DNA, 255 bp, Artificial Sequence
  derived and/or modified sequence
atgacaatgacattgcacacgaaagcctcaggtatggctctgcttcaccagatacagggcaacgaactcgaacccctgaacagacctcagctgaaaatccctctggagcggccactgggagaggtgtacctggattctagcaagccagccgtttataactaccccgaaggggctgcctacgagttcaatgcggctgcagccgctaatgcccaagtgtacgggcagacagggctgccgtatgggccaggctcgtag

SEQ ID NO: 289556 - DNA, 1167 bp, Artificial Sequence
  derived and/or modified sequence
tgactgaagattatttcatgccaaccatccgacaaaccagtgccccctggagagaatgcccctgaatggcgcgcaggccagcctggcagcgctcctcgtagtcactgcggcagatcggcagccggacctggccaccgtcgtccactgtgtgattttaacggcgagggacctaattccgacaaccgacgccagggtggtcgcgagcgcctggcttctacgaacgacaaaggaagcatggcaatggagtctgcgaaagagactcggtactgtgccgtgtgcaatgactatgcatcaggttaccactacggggtctggtcctgcgaggggtgtaaggctttttttaagaggtcgatccagggccataacgattatatgtgtcccgctaccaatcagtgtactatcgacaaaaatagacgaaagtcatgccaggcttgtcgtctgcggaagtgctacgaagtgggcatgatgaaaggcggaatccgcaaagaccgccgtggtggccgtatgctaaagcataaaaggcagagggatgacggggagggcaggggggaggtgggctccgccggagatatgagggcggcaaacttgtggcccagtcccctgatgatcaagcggtctaaaaagaattctcttgcattgtctctaacagccgatcagatggttagtgctctgctcgatgcggagccgccaatcctgtacagtgagtatgaccccacgcgacccttctccgaggcttccatgatgggcttgctgacaaacttggccgatcgcgagctggtgcatatgatcaattgggccaagagggtgcctggctttgtggatcttacactccacgatcaagtccatctcctcgagtgcgcctggcttgagatcctgatgatcgggctcgtctggcgatcaatggagcaccccggaaagctgctgttcgcacctaacctgcttttggaccggaatcaggggaaatgtgtagagggcatggtcgaaattttcgatatgctgcttgcgacctcgtctcgcttccgaatgatgaatttacagggggaggagttcgtgtgcctgaaaagcattattctactgaacagcggaatatctcacgtagaggccaaaaaacggattctgaacctccatccaaaaatcttcggtaacaaatggtttcctcgagtgtag

SEQ ID NO: 289557 - DNA, 348 bp, Artificial Sequence
  derived and/or modified sequence
atgactatgaccctacacaccaaggcttccgggatggctctgttacaccagattcaggggaatgagctggaacccctgaataggccacaactgaagatcccacttgagaggcccctgggagaagtgtatctcgattccagtaagcctgccgtctacaattatcccgaaggagctgcttatgagtttaacgcagccgctgccgctaatgcacaggtgtatgggcagactgggttgccttacgggccaggttccgaggcggctgcttttggctccaacgggttgggcggtttcccacctttgaattctgtctcacccagccccctgatgctgttgcacccaccgccatag

SEQ ID NO: 289558 - DNA, 1452 bp, Artificial Sequence
  derived and/or modified sequence
atgaccatgaccctgcacaccaaagcgagcggcatggcacttctccatcaaatccaaggaaatgaattagagccccttaatcggccacagctcaagatcccactggaaaggccattgggcgaagtctacttagattcctctaagcctgccgtgtacaactatccggaaggcgcagcctacgaattcaacgctgccgctgccgctaacgcacaggtgtatggccagacagggctgccctacgggccaggaagcgaggcagctgcctttgggagtaacggcctcggtggattccctcctttgaactcagttagcccatcaccactaatgcttctgcatcctccaccccaactgagccccttcctgcagccccacggccaacaggtgccttactacttggaaaatgaacccagcggctacacggtccgagaagccggacctcctgctttctaccgacccaattctgacaacaggcggcagggtgggagggagcgtctggccagcacgaacgacaaagggagtatggctatggaaagcgctaaagagacccgctactgcgctgtgtgtaacgattacgcctccgggtaccattatggtgtatggtcttgcgaaggatgcaaggcatttttcaagagatcaatccagggtcataacgactatatgtgccctgccaccaatcagtgcaccattgacaaaaacagacgcaaatcgtgtcaggcatgtcggctgcgcaagtgttatgaagtgggcatgatgaaaggaggtttcgttgatctgacacttcacgatcaggtccacctgctggagtgcgcctggctggaaattctcatgattgggctggtctggagaagtatggaacaccccggaaagttgctttttgccccaaacctgctgctggaccggaaccaggggaagtgtgtcgaaggcatggtagaaatttttgacatgctcctggccacatcttcccggttccgtatgatgaatctgcaaggcgaggagttcgtgtgcctcaagagcattattcttctcaactccggggtgtatactttcctgtcctcaaccctgaagagtctcgaggaaaaagaccacattcaccgggttctggacaaaatcactgacaccctgattcacctcatggcgaaagcaggcctgacactccagcagcagcaccagcggctcgcacaactcctgctgatactttctcacattaggcacatgagtaacaagggaatggagcacctctatagcatgaaatgcaagaacgtcgtccccctgtacgacctcctgctggagatgctcgacgcccataggctgcacgctccaacaagcaggggtggcgcatcagtggaggaaacagaccaatctcatctggcaaccgccggatctacaagttcccacagcctccagaaatattacatcactggcgaggccgaaggcttccccgctactgtgtag

SEQ ID NO: 289559 - protein, 1911 aa, Artificial Sequence [sequence omitted]

SEQ ID NO: 289560 - DNA, 5736 bp, Artificial Sequence
  derived and/or modified sequence
atgaccagccaggagaagaccgaggagtaccccttcgccgacatcttcgacgaggacgagaccgagagaaacttcctgctgagcaagcccgtgtgcttcgtggtgttcggcaagcccggcgtgggcaagaccaccctggccagatacatcacccaggcctggaagtgcatcagagtggaggccctgcccatcctggaggagcagatcgccgccgagaccgagagcggcgtgatgctgcagagcatgctgatcagcggccagagcatccccgacgagctggtgatcaagctgatgctggagaagctgaacagccccgaggtgtgccacttcggctacatcatcaccgagatccccagcctgagccaggacgccatgaccaccctgcagcagatcgagctgatcaagaacctgaacctgaagcccgacgtgatcatcaacatcaagtgccccgactacgacctgtgccagagaatcagcggccagagacagcacaacaacaccggctacatctacagcagagaccagtgggaccccgaggtgatcgagaaccacagaaagaagaagaaggaggcccagaaggacggcaagggcgaggaggaggaggaggaggaggagcaggaggaggaggaggccttcatcgccgagatgcagatggtggccgagatcctgcaccacctggtgcagagacccgaggactacctggagaacgtggagaacatcgtgaagctgtacaaggagaccatcctgcagaccctggaggaggtgatggccgagcacaacccccagtacctgatcgagctgaacggcaacaagcccgccgaggagctgttcatgatcgtgatggacagactgaagtacctgaacctgaagagagccgccatcctgaccaagctgcagggcgccgaggaggagatcaacgacaccatggagaacgacgagctgttcagaaccctggccagctacaagctgatcgcccccagatacagatggcagagaagcaagtggggcagaacctgccccgtgaacctgaaggacggcaacatctacagcggcctgcccgactacagcgtgagcttcctgggcaagatctactgcctgagcagcgaggaggccctgaagcccttcctgctgaaccccagaccctacctgctgccccccatgcccggccccccctgcaaggtgttcatcctgggcccccagtacagcggcaagaccaccctgtgcaacatgctggccgagaactacaagggcaaggtggtggactacgcccagctggtgcagcccagattcgacaaggccagagagaccctggtggagaacaccatcgccgaggccaccgccgccgccatcaaggtggtgaaggagaagctgctgagagagctgcaggccagaaagcaggccgagaccgccctgagagagttccagagacagtacgagaagatggagttcggcgtgttccccatggaggccacccacagcagcatcgacgaggagggctacatccagggcagccagagagacagaggcagcagcctggtggacaccgaggaggccaagaccaagagcgagaacgtgctgcacgaccaggccgccaaggtggacaaggacgacggcaaggagaccggcgagaccttcaccttcaagagacacagccaggacgccagccaggacgtgaagctgtacagcgacaccgcccccaccgaggacctgatcgaggaggtgaccgccgaccaccccgaggtggtgaccatgatcgaggagaccatcaagatgagccaggacatcaacttcgagcagccctacgagaagcacgccgagatcctgcaggaggtgctgggcgaggtgatggaggagaacaaggacagattccccggcgcccccaagtacggcggctggatcgtggacaactgccccatcgtgaaggagctgtggatggccctgatcaagaagggcatcatccccgacctggtgatctacctgagcgacaccgagaacaacggcaagtgcctgttcaacagaatctacctgcagaagaagagcgagatcgacagcaagatcctggagagactgctggaggagctgcagaagaagaagaaggaggaggaggaggccagaaaggccaccgaggaggagctgagactggaggaggagaacagaagactgctggagctgatgaaggtgaaggccaaggaggccgaggagaccgacaacgaggacgaggaggagatcgagggcgacgagctggaggtgcacgaggagcccgaggccagccacgacaccagaggcagctggctgcccgaggagttcgaggccagcgaggtgcccgagaccgagcccgaggccgtgagcgagcccatcgaggagaccaccgtggagaccgagatccccaagggcagcaaggagggcctggagatcgagaagctgagcgagaccgtggtgctgcccgagttccccgaggacagctaccccgacgtgcccgagatggagcccttcaaggagaagatcggcagcttcatcatcctgtggaagcagctggaggccaccatcagcgaggcctacatcaagatcctgaacctggagatcgccgacagaaccccccaggagctgctgcagaaggtggtggagaccatggagaagcccttccagtacaccgcctgggagctgaccggcgaggactacgaggaggagaccgaggactaccagaccgaggccgaggtggacgaggagctggaggaggaggaggaggaggagggcgaggacaagatgaaggagagaaagagacacctgggcgacaccaagcacttctgccccgtggtgctgaaggagaacttcatcctgcagcccggcaacaccgaggaggccgccaagtacagagagaagatctactacttcagcagcgccgaggccaaggagaagttcctggagcaccccgaggactacgtggcccacgaggagcccctgaaggccccccccctgagaatctgcctggtgggcccccagggcagcggcaagaccatgtgcggcagacagctggccgagaagctgaacatcttccacatccagttcgaggaggtgctgcaggagaagctgctgctgaagaccgagaagaaggtgggccccgagttcgaggaggacagcgagaacgagcaggccgccaagcaggagctggaggagctggccatccaggccaacgtgaaggtggaggaggagaacaccaagaagcagctgcccgaggtgcagctgaccgaggaggaggaggtgatcaagagcagcctgatggagaacgagcccctgccccccgagatcctggaggtgatcctgagcgagtggtggctgaaggagcccatcagaagcaccggcttcatcctggacggcttccccagataccccgaggaggcccagttcctgggcgacagaggcttcttccccgacgccgccgtgttcatccaggtggacgaccaggacatcttcgacagactgctgcccgcccagatcgagaagtggaagctgaagcagaagaagaagctggagagaaagaagctgatcaaggacatgaaggccaagatcagagtggacaccatcgccaagagaagagccgagctgatcctggagagagacaagaagagaagagagaacgtggtgagagacgacgaggagatcagcgaggaggagctggaggaggacaacgacgacatcgagaacatcctggaggacgagttccccaaggacgaggaggagatgagcggcgaggaggacgaggagcaggagaccgacgccatcgagagactgagaggcgagctgggcgagaagttcgaggccgacacccacaacctgcagatcatccaggacgagctggagagatacctgatccccatcatcagcatcaacggcgccagaagaaaccacatcgtgcagtacaccctgaacatgaagctgaagcccctggtggagaacagagccagcatcttcgagaagtgccaccccatccccgcccccctggcccagaagatgctgaccttcacctacaagtacatcagcagcttcggctactgggaccccgtgaagctgagcgagggcgagaccatcaagcccgtggagaacgccgagaaccccatctaccccgtgatccacagacagtacatctacttcctgagcagcaaggagaccaaggagaagttcatgaagaaccccatcaagtacatcagacagcccaagcccaagcccaccgtgcccatcagaatcatcatcgtgggcccccccaagagcggcaagaccaccgtggccaagaagatcaccagcgagtacggcctgaagcacctgagcatcggcggcgccctgagatacgtgctgaacaaccaccccgagaccgagctggccctgatgctgaactggcacctgcacaagggcatgaccgcccccgacgagctggccatccaggccctggagctgagcctgatggagagcgtgtgcaacaccgccggcgtggtgatcgacggctaccccgtgaccaagcaccagatgaacctgctggaggccagaagcatcatccccatggtgatcttcgagctgagcgtgcccagcaaggagatcttcaagagactgctgctggagaaggagaacgagcagagactgccctaccccctgcacaacagcgcccagatcgtggccgtgaacaacgtgaagtacagaaagaacatcggcgagatcagacagtactaccaggagcagcaccagaactggtacgtgatcgacggcttccacagcaagtggtgggtgtggaacgaggtgatcaagaacgtgcagatggtgaacaagtacatgcagacctacctggagagaatcaaggccggcaaggccgcctgcatcgacaagctgtgcatcaccccccaggagctgctgagcagactgggcgagttcgagcagttctgccccgtgagcctggccgagagccaggagctgttcgactgcagcgccaccgacagcctggagttcgccgccgagttcagaggccactactacaagatgagcagccaggagaagctgaacaagttcctggagaaccccgagctgtacgtgccccccctggccccccaccccctgcccagcgccgacatgatccccaagagactgaccctgagcgagctgaagagcagattccccaagtgcgccgagctgcagggctactgccccgtgacctacaaggacggcaaccagagatacgaggccctggtgcccggcagcatcaactacgccctggagtaccacaacagaatctacatctgcgagaacaaggagaagctgcagaagttcctgagaagccccctgaagtactgggagcagaagctgccccacaagctgccccccctgagagagcccatcctgctgaccagcctgcccctgcccggctacctggagcagggcatcgccaccagcctgatcaaggccatgaacgccgccggctgcctgaagcccaagttccccttcctgagcatcagaagaagcgccctgctgtacatcgccctgcacctgaaggccttcaaccccaagggcagcgagtacaccagaaagaagtacaagaagaagatggagcagttcatggagagctgcgagctgatcacctacctgggcgccaagatgaccagaaagtacaaggagccccagttcagagccatcgacttcgaccacaagctgaagaccttcctgagcctgagaaacatcgaccccatcaacggctag

SEQ ID NO: 289561 - DNA, 6326 bp, Artificial Sequence
  derived and/or modified sequence
gaggtcgggtagaggctcccgggacctgcgtgctgccgagagaggaagcgaagggcaccatctttgtattttgtgtcatgacttctcaagagaagacagaagagtatccttttgcagatatatttgatgaagatgaaactgaaaggaattttttgttgtccaaacctgtttgctttgttgtatttgggaaaccaggtgttgggaaaacaacattagcccgttacataacacaggcatggaaatgtattcgtgttgaagctttgccaattttagaagaacagattgctgctgaaaccgaatcaggagttatgttgcaatcaatgttgatcagcggtcaaagcattccagatgaacttgtcataaagctaatgttggagaagctcaactccccagaagtctgtcactttggttatattatcactgaaataccatcactttcacaggatgccatgactaccttacagcaaatagaattaattaaaaacttaaacctgaaacctgatgttataatcaatataaagtgtcctgactatgatttgtgccagagaatttctgggcaaagacagcacaataatacgggatacatatacagtagagaccagtgggatcctgaagtcattgagaatcataggaaaaagaagaaagaagcccaaaaggacggaaaaggagaagaggaagaagaggaagaagagcaagaagaagaagaggcatttattgccgaaatgcagatggtggctgaaattcttcatcatctagttcagaggcctgaagattatttggaaaatgttgaaaacattgttaagctttataaggaaacaattctccaaactttagaagaagtaatggctgaacacaatccccagtatctcattgagctaaatggaaataaaccagcagaggagctctttatgattgttatggatcgacttaaatatctgaacctaaaaagagcagctattctaaccaaacttcagggtgcagaggaagaaattaatgacacaatggaaaatgatgagctatttcgtactcttgcatcttataaacttattgcaccaagatacagatggcaaagaagtaaatggggacgtacatgtcctgtgaatttaaaagatggtaacatttattcaggattaccagattattctgtgagttttctaggtaaaatctactgtctttcatcagaagaagcattaaaaccatttttgttgaacccacgtccctatctgcttccacctatgccaggaccaccatgtaaagtattcatacttggacctcaatattcagggaaaacaacactttgcaatatgcttgcagaaaattacaaaggaaaggtagtcgactatgcccaacttgttcagccacgttttgataaagcccgtgaaacattagtagaaaataccatagctgaggccactgcagcagcaattaaagttgtgaaagaaaagcttctcagggaactgcaagctagaaaacaagctgaaacagctttaagagaatttcaaaggcaatatgaaaaaatggagtttggagtattcccaatggaggcaacacactcatcaattgatgaagaagggtacattcaaggctcccaaagggacagaggcagctctttagtggacaccgaagaagccaaaacaaagtcagaaaatgtcctccatgatcaagctgctaaagttgataaagatgatggaaaagaaactggtgaaacattcacatttaaaaggcattctcaagatgctagtcaagatgtaaagttgtattcagatacagccccaacagaagacttgatagaagaggtaactgcagatcatccagaggttgtgaccatgattgaagagactataaaaatgtcacaggatataaactttgaacagccatatgaaaaacatgctgaaatcttacaggaagtccttggagaggtaatggaagaaaacaaggataggtttcctggtgccccaaaatatggaggctggattgtggacaactgccctattgtaaaagaattgtggatggccttaatcaagaaaggaattatacctgatttggtcatctatttatcagatacagaaaacaatggaaaatgtttatttaatagaatatatttacagaagaaatctgaaattgactctaagattttagaaagattattagaagaactacaaaagaaaaaaaaagaagaagaagaagcaagaaaagccacagaagaggaattgagactcgaagaagaaaatcgaaggctactggaacttatgaaagtgaaggcaaaagaagctgaagagactgataatgaggatgaagaggagattgaaggtgatgagttggaagttcacgaagagcctgaggcatctcacgatacccgagggtcatggttacctgaggagtttgaagcatctgaggtccctgaaactgagcctgaagcagtatctgagcctatcgaggaaactacagtggaaacagaaatcccaaaaggatccaaagagggcctggaaattgaaaaattatctgaaacagttgtactacctgagtttccagaagactcttatcctgatgttcccgaaatggagccatttaaagagaagattggttctttcatcatcctctggaaacagctagaagcaacaattagtgaggcttacattaaaattttaaacttggagattgctgacagaactccacaggaattacttcaaaaagtagttgagactatggaaaaaccatttcaatatactgcatgggagttaactggggaagattatgaggaagaaacagaagactaccagactgaagcagaggttgatgaggagctagaggaagaggaagaggaagagggtgaagataaaatgaaggagagaaagaggcatttgggagacacaaaacacttttgtccggtggtcctcaaagaaaacttcatcctgcaaccaggaaacacagaagaagcagccaagtatcgagaaaagatctactacttttcaagtgctgaggctaaagaaaagtttttggagcatcctgaggattatgtggctcatgaagaaccattgaaggctcctccattaagaatatgccttgtcggcccccagggctctggcaaaactatgtgtggaagacagttggcagaaaaattaaacatttttcacattcagtttgaagaagttcttcaagaaaaactactactcaaaactgaaaagaaagtgggacctgaatttgaggaagattctgagaacgagcaagctgccaaacaagaacttgaagagcttgcaattcaggccaatgtcaaagttgaggaagaaaatacaaaaaagcagcttccagaagtacaacttacagaagaagaagaagtaatcaaatcaagtctaatggaaaatgagcccttgcctcctgaaattcttgaagtaattctttctgagtggtggcttaaggaaccaatacgttccacaggttttatattagatggtttcccacgatatccagaagaggcccagtttttgggagatcgtggatttttcccagatgcagctgtttttatacaagttgatgatcaagatatttttgatcgcctccttcctgcccaaattgaaaagtggaaactaaaacaaaagaagaaattagaaaggaagaaactgatcaaagacatgaaggcaaaaatcagggttgatacgattgctaaaagaagggctgaacttatattagagagagataaaaaaaggagggagaatgttgttagagatgatgaagagattagtgaggaagaacttgaagaagacaatgatgatattgaaaacatccttgaagatgagtttccaaaagatgaggaagagatgagtggcgaggaagatgaagaacaggaaactgatgcaattgagcgcctgagaggtgaactaggagaaaaatttgaagcagatacacataatttacaaataatacaggatgaacttgagaggtatttgataccaataatttccattaatggagctcggagaaatcacattgtacaatatacattgaatatgaaactgaaaccactggtggaaaatcgtgcaagcatttttgagaaatgtcatccaataccagcaccccttgcccagaaaatgctcacctttacctacaagtatataagctcattcggctattgggaccctgtaaagctaagtgaaggagagacaatcaagccagttgaaaatgcagagaatccaatttatcctgtaatccatcgtcagtatatttattttttatctagtaaagaaacaaaagaaaaatttatgaagaacccaatcaaatatatccgccaacccaaacctaagcctactgtgcccattaggattataattgtggggcctccaaaatctgggaaaactacagttgccaaaaaaattacaagtgaatatgggttaaagcatttatcaataggaggagctttgcgttatgtactaaacaatcacccggaaacagagctggcacttatgttaaattggcatcttcataaaggaatgacagcacctgatgaactggctattcaagccttagaactttctctgatggaaagtgtgtgcaatactgcaggtgttgtcatcgatggatatcctgtaactaaacatcaaatgaatctcttggaagctaggtcaatcattcccatggtcatctttgaattgagtgtgccttccaaggagattttcaaaagattgctcctagaaaaagaaaatgaacaaagattgccttatccattgcacaatagtgcacaaattgtagctgtcaataatgtaaagtatcgcaaaaatattggtgagattaggcaatattatcaagaacagcatcagaactggtatgtgattgatggatttcacagcaaatggtgggtatggaatgaagtcattaagaatgttcaaatggtgaataaatacatgcagacatacctggaaagaataaaagcaggaaaagctgcctgcattgacaagttatgtatcacacctcaagagctgctttctcgcctgggagaatttgaacagttctgccctgtcagcctggcagaatcccaggaattatttgattgctctgcaactgactccttggaatttgcagcagagttcagggggcactactataaaatgagttctcaggaaaaactgaataaattcttggagaacccagaattgtacgtgcctcccttagcacctcatccactcccatctgctgacatgatccccaaaagactgacactgtcagagctgaagagtcgattccctaagtgtgcggagctccagggctactgtccagtgacctataaggatggaaaccaaagatatgaagctctagtacctggtagcattaactatgctttagaatatcataatcgtatatatatttgtgagaacaaagaaaaactccagaaatttttgaggtcgccactgaaatactgggaacagaagcttccacacaagcttcccccattaagggaaccgatacttcttactagtcttcctttgcctggatatctggaacagggtattgcaacttctctaattaaagcaatgaatgcagcgggatgcttaaagcccaagttcccctttttaagtataaggagatctgcactgctatatatagcacttcatctcaaagcatttaatcccaaaggttccgaatacacaagaaaaaagtataagaagaagatggagcagtttatggagagttgtgaactcataacatacttgggtgccaagatgaccagaaaatacaaggaacctcagttcagagccattgactttgatcataagttaaagacctttctctctctcagaaatatagacccaattaatgggtagtttacttaggtgatagcagcctgaatctcaagagttatctgaaagtgatagagggaaactgagagaagtagattgaaaatctgggcctcttggaagtacttttgcctcctgagcaaggtaccatggctgccagacttcaggtgaactcaaaggtctgccagccaggaaggagcactcttatggaaacaagttttaatacaattttaaaatgtattgctctttgcctgaactttgatgctttaacaaaataaacattctatttataattccatatagaaaagttaagtgacttatttaataaatgtattattttcctttttaacattttcagtagaaaagtcagtctctgttaaaattactcattaaatgttagaaagctttaagacatttaacattgttataaatgaaaccaaaatatgggttatacattttacatacaaaactgtttgtgaactttgtgaacataagatactatcattttcccaataaaataaatggattttgcaacaactt

SEQ ID NO: 289562 - DNA, 5736 bp, Artificial Sequence
  derived and/or modified sequence
atgacaagccaggaaaagacagaagaatatccctttgccgatatttttgatgaagacgagaccgagaggaactttttgctgtcaaagccggtgtgctttgttgtttttggcaaaccaggcgttggcaagacaacactggcaagatacatcactcaggcctggaaatgcatccgggtggaggcccttcccatcctggaagagcagatcgccgccgagaccgagtccggggtgatgcttcagtccatgctgatctctggccagtcaattcccgacgagttagtgattaaactcatgctggagaagctcaactcccctgaggtgtgccatttcggctatatcatcacagagattccttccctgtcccaggacgcgatgaccacactacagcaaatagaactgataaaaaatctcaatttgaaaccagatgtcattattaatataaagtgtcctgactatgatctgtgtcagcgcatctccggacagcggcaacacaataatactggctatatatatagtcgcgaccagtgggaccctgaagttatcgaaaaccataggaagaagaagaaggaggcccaaaaggatggaaaaggagaagaggaagaagaagaggaggaacaggaggaggaggaagctttcatcgccgagatgcaaatggtcgctgagatcttacaccatcttgtgcagcggccggaggactacttagagaacgtggagaacattgttaaactgtacaaagaaacaatacttcagaccctggaagaggttatggcagaacataaccctcagtacctgatcgaacttaacggcaataagccagccgaggagctttttatgatagtcatggaccgcctgaagtacctgaacctgaaacgagccgctattctgactaagctccagggagccgaagaggaaatcaatgatacaatggaaaatgacgaattattcaggacactggcttcttacaaactgatcgctccgaggtatagatggcagagatccaagtggggtcggacttgcccggtgaacctcaaagatggcaacatttattctggcctacccgattattctgtaagcttccttggtaagatttactgcttgagtagtgaggaggcactgaagccattcctgctgaatccaaggccataccttctgccgccaatgcctggaccaccttgcaaagtatttatcctagggccacagtattcaggcaaaacaacgctttgtaacatgctggcggagaactacaaaggcaaagtggtcgactatgctcagcttgtgcagcctcgatttgataaagctcgtgagacactggtggagaacacaatcgcggaggcaaccgcagcagccatcaaagtcgtgaaggaaaagttgctccgcgaattacaggcacggaagcaagccgagacagcccttcgggagtttcaacgtcagtatgaaaaaatggaattcggcgtcttccccatggaggcgacgcactcctccattgacgaggaggggtacatacagggttcacagcgcgaccgcgggtcttctctggtggacactgaggaagctaaaacgaagtctgagaacgttctacacgatcaggctgccaaggtcgacaaggacgacggaaaggaaacaggtgaaacatttacctttaagaggcacagccaagacgccagccaggatgtgaagctgtatagtgacaccgcccctaccgaagaccttatagaggaggtgaccgctgatcatcccgaggtggtgactatgatagaggagaccataaagatgagtcaggacatcaactttgagcagccttacgagaagcacgccgaaatcctgcaagaggtgctaggcgaggtcatggaggagaataaggatcgcttccccggagcgccgaagtacggtggatggatcgtggacaactgtcctattgttaaggagttgtggatggcactgatcaagaagggtataatccctgatctagttatttatctgtccgacacagagaacaacggaaagtgtctctttaacaggatatacctgcagaaaaaaagtgagatagactcaaaaatcttagagagactgctcgaagagctccagaaaaagaagaaggaagaagaggaggcccgaaaggccacggaggaagagctcaggctagaggaggagaacagacggctgttagaattaatgaaagtgaaggccaaagaggcagaagagacagataacgaagatgaggaagaaatcgagggagacgagttagaggtgcacgaagaacccgaagcatcgcatgatacccggggatcctggctgcccgaagaattcgaagcctctgaggtgcccgagacagagcctgaagcggtaagcgagcctattgaggaaactactgtggagactgagatccccaagggatctaaagagggcttggagatagagaagctgtcagaaactgttgttttacccgaattcccagaggactcataccctgacgttccagaaatggagcccttcaaggaaaagatcgggagcttcattatcctgtggaaacagctggaggccacgatctcggaggcgtatattaagattctcaatctcgagatcgctgaccgaacccctcaagaactgctgcagaaagtggtggagaccatggaaaagccatttcaatacaccgcttgggaactgacaggggaagactacgaggaggaaacggaggactaccaaaccgaagccgaggtcgacgaggagttggaggaggaggaagaggaagaaggggaagacaaaatgaaagaacgcaagaggcatctgggcgacacaaaacatttttgccctgtcgtgttaaaggagaattttatcctccagcctggcaatacagaggaggcagcgaaatatcgagagaaaatctattatttcagtagtgccgaggcaaaggaaaagtttttagagcacccagaagattacgtggctcatgaggaaccgctgaaggctcctcctttgcggatctgccttgtcggtccccaaggatccggaaagactatgtgtgggcgccagctcgctgagaagctcaatatctttcacattcaattcgaggaagtgcttcaggagaagctacttttgaaaactgaaaaaaaagtgggccccgagtttgaagaagatagcgaaaatgagcaggctgctaagcaggagctagaggagctagcaattcaggctaacgtcaaagtcgaggaagagaatacaaagaaacaactgcccgaggtgcagttgacagaagaagaagaagttatcaagtccagccttatggaaaacgagccgcttccgcccgagatcttagaggtcattctttccgaatggtggctgaaagagcctataaggtccacaggttttatactggacgggttcccacgctatcccgaagaggctcagtttctgggggaccgcggcttttttcccgatgcagctgtcttcattcaagtggatgatcaggacatattcgatcgattattacccgcacagattgaaaaatggaagcttaagcagaagaagaaattggaacgaaaaaaactgataaaagatatgaaggccaaaattcgcgtggatactattgcaaaacgtagagcggaactcattcttgagcgcgataaaaagagaagggaaaatgtcgtcagggacgacgaggaaataagcgaggaggaactagaggaagacaatgatgacattgagaacattttagaggatgagtttccgaaggatgaggaggagatgtctggggaagaggatgaggagcaggaaactgatgccatcgagcggctgcggggggagctcggagagaagtttgaagcagacacccacaatctccagattatccaggacgaactggagcgctaccttattccaattatttctatcaacggggctcgacgtaatcacatcgttcagtatacactgaacatgaagctcaagccccttgttgaaaatcgcgcgtccatctttgagaaatgtcaccccattccggctccactcgcccagaaaatgctgacctttacatataaatacatatcttccttcgggtattgggaccccgtgaaattgtcagaaggcgagactatcaaacccgtggaaaatgctgaaaaccccatctatcctgtgattcatagacagtatatctacttcctatcttccaaagaaacaaaggagaagttcatgaagaacccgattaaatacatccgacaacccaaacccaaacccacagtccctatacgcatcatcattgtgggaccaccaaagtctggtaaaactacggttgcaaagaaaatcacttccgagtacggccttaagcacctttcaatagggggtgcactccgctacgtgttgaataaccacccagagacggagctcgcccttatgctcaattggcatctgcacaaaggtatgacagccccggacgaattggctatccaggcactggagctgtcactcatggagtctgtgtgcaacacggctggagtcgtgattgatggatacccagtgactaaacaccaaatgaacctgctggaggcccgatccatcatccctatggtgattttcgaactctccgtgccaagcaaggagatctttaagcggctcctgcttgaaaaggaaaatgaacagaggctgccctacccactgcataactcagcccaaatcgtcgccgtgaacaatgttaagtataggaagaacatcggagagatccgtcaatactaccaggaacagcatcagaattggtacgtcatagacggatttcatagcaagtggtgggtctggaacgaggtgatcaagaatgtacaaatggtcaataagtacatgcaaacttatctagagagaatcaaagcaggtaaggccgcttgcatcgacaagctgtgtatcactccccaggagttgctctcacgcttaggagagtttgaacagttttgcccagtaagtctggcggagtcacaggagttattcgactgtagcgccactgatagtctcgagttcgccgcagaattcagaggccactactacaagatgtcgtctcaggaaaagctgaacaaattcctcgagaaccctgagctctacgttcccccgctagcaccccaccctctgccatccgcagacatgatcccgaagcgcctcacactatccgagctcaagagtaggtttcccaaatgtgccgagctgcaggggtattgtcccgtgacttacaaggatggcaatcagaggtacgaagccctcgtacctggaagcataaattatgccctagagtatcacaatcgaatctacatttgtgaaaataaggaaaagctgcagaaattcctgcggagcccactcaagtactgggaacagaaactcccccataaacttccacctctccgcgagcccatcctgctcacttctctgcctcttcccggctacctcgagcagggtatcgctacctcactcatcaaggccatgaatgcggcaggctgtctgaaaccaaagtttcctttcctgtcaataagacggagcgctctgttgtatatcgccctccatctcaaggcctttaatccaaagggatctgaatatactagaaagaagtacaaaaagaaaatggagcagtttatggagtcatgcgagctaattacttatctcggtgccaagatgacaagaaagtacaaggaaccgcaattccgtgccatcgatttcgatcataagttgaaaactttcttatcgctgaggaacatcgatccgattaatgggtag

SEQ ID NO: 289563 - DNA, 5736 bp, Artificial Sequence
  derived and/or modified sequence
atgaccagccaggagaagacagaggagtacccctttgctgacatctttgatgaagatgaaacagaaagaaacttcctgctgagcaagcctgtgtgctttgtggtgtttgggaagccaggagtgggcaagaccaccctggcccgctacatcacccaggcctggaagtgcatccgggtggaggccctgcccatcctggaggagcagattgctgctgagacagaaagtggagtgatgctgcagagcatgctgatcagcggccagagcatcccagatgagctggtgatcaagctgatgctggagaagctgaacagccctgaggtgtgccacttcggctacatcatcacagagatccccagcctgagccaggatgccatgaccaccctgcagcagatcgagctgatcaagaacctgaacctgaagccagatgtgatcatcaacatcaagtgcccagactatgacctgtgccagaggatcagcggccagaggcagcacaacaacacaggctacatctacagccgggaccagtgggaccctgaggtgattgagaaccacaggaagaagaagaaggaggcccagaaggatggcaagggggaggaggaggaggaggaggaggagcaggaggaggaggaggccttcatcgccgagatgcagatggtggccgagatcctgcaccacctggtgcagaggcctgaggactacctggagaatgtggagaacatcgtgaagctgtacaaggagaccatcctgcagaccctggaggaggtgatggccgagcacaacccccagtacctgattgagctgaatggaaacaagccagctgaggagctgttcatgattgtgatggaccggctgaagtacctgaacctgaagagagctgccatcctgaccaagctgcagggcgctgaggaggagatcaatgacaccatggagaatgatgagctgttccgcaccctggccagctacaagctgattgccccccgctaccgctggcagaggagcaagtggggccgcacctgccctgtgaacctgaaggatggcaacatctacagcggcctgcctgactacagcgtgtccttcctgggcaagatctactgcctgagcagcgaggaggccctgaagcccttcctgctgaacccccggccctacctgctgccccccatgcctggccccccctgcaaggtgttcatcctgggcccccagtacagcggcaagaccaccctgtgcaacatgctggccgagaactacaagggcaaggtggtggactatgcccagctggtgcagcccaggtttgacaaggcccgggagaccctggtggagaacaccatcgccgaggccacagctgctgccatcaaggtggtgaaggagaagctgctgcgggagctgcaggccaggaagcaggccgagacagccctgcgggagttccagaggcagtatgagaagatggagtttggagtcttccccatggaggccacccacagcagcattgatgaggagggctacatccagggcagccagagggaccggggcagcagcctggtggacacagaggaggccaagaccaagtcagaaaatgtgctgcatgaccaggccgccaaggtggacaaggatgatggcaaggagactggagagaccttcaccttcaagaggcacagccaggatgccagccaggatgtgaagctgtacagcgacacagcccccacagaggacctgattgaggaggtgacagctgaccaccctgaggtggtgaccatgattgaggagaccatcaagatgagccaggacatcaactttgagcagccctatgagaagcatgctgagatcctgcaggaggtgctgggggaggtgatggaggagaacaaggaccgcttccctggggcccccaagtatggaggctggatcgtggacaactgccccatcgtgaaggagctgtggatggccctgatcaagaagggcatcatcccagacctggtgatctacctgagtgacacagagaacaacgggaagtgcctcttcaaccgcatctacctgcagaagaagtcagaaattgacagcaagatcctggagcggctgctggaggagctgcagaagaagaagaaggaggaggaggaggccaggaaggccacagaggaggagctgcggctggaggaggagaacagaaggctgctggagctgatgaaggtgaaggccaaggaggccgaggagacagacaatgaagatgaggaggagattgaaggagatgagctggaggtgcatgaggagcctgaggccagccatgacacccggggctcctggctgcctgaggagtttgaggccagcgaggtgcctgagacagagcctgaggccgtgtctgagcccatcgaggagaccaccgtggagacagagatccccaagggcagcaaggagggcctggagattgagaagctgtctgaaacagtggtgctgcctgagttcccagaagattcctacccagatgtgcctgagatggagcccttcaaggagaagattggcagcttcatcatcctgtggaagcagctggaggccaccatcagcgaggcctacatcaagatcctgaacctggagattgctgacaggaccccccaggagctgctgcagaaggtggtggagaccatggagaagcccttccagtacacagcctgggagctgactggagaagattatgaggaggagacagaggactaccagacagaggccgaggtggatgaggagctggaggaggaggaggaggaggagggggaggacaagatgaaggagaggaagaggcacctgggggacaccaagcacttctgccctgtggtgctgaaggagaacttcatcctgcagcccggcaacacagaggaggccgccaagtaccgggagaagatctactacttcagcagcgctgaggccaaggagaagttcctggagcaccctgaggactatgtggcccacgaggagcccctgaaggccccacccctgcgcatctgcctggtgggcccccagggcagcggcaagaccatgtgtggccggcagctggccgagaagctgaacatcttccacatccagtttgaggaggtgctgcaggagaagctgctgctgaagacagagaagaaggtgggccctgagtttgaggaggacagtgaaaatgagcaggccgccaagcaggagctggaggagctggccatccaggccaacgtgaaggtggaggaggagaacaccaagaagcagctgcctgaggtgcagctgacagaggaggaggaggtgatcaagagcagcctgatggagaatgagcccctgcccccagagatcctggaggtgatcctgtctgagtggtggctgaaggagcccatccgcagcacaggcttcatcctggatggcttcccccgctacccagaggaggcccagttcctgggggaccggggcttcttcccagatgctgctgtgttcatccaggtggatgaccaggacatctttgaccggctgctgcctgcccagatcgagaagtggaagctgaagcagaagaagaagctggagaggaagaagctgatcaaggacatgaaggccaagatccgggtggacaccatcgccaagagaagagctgagctgatcctggagcgggacaagaagagaagagaaaatgtggtgagagatgatgaggagatcagcgaggaggagctggaggaggacaatgatgacatcgagaacatcctggaggatgagttccccaaggatgaggaggagatgtctggagaagaagatgaggagcaggagacagatgccatcgagcggctgcggggggagctgggggagaagtttgaagctgacacccacaacctgcagatcatccaggatgagctggagcgctacctgatccccatcatcagcatcaacggggcccggaggaaccacatcgtgcagtacaccctgaacatgaagctgaagcccctggtggagaacagagccagcatctttgagaagtgccaccccatcccagcccccctggcccagaagatgctgaccttcacctacaagtacatcagcagctttggctactgggaccctgtgaagctgtctgagggggagaccatcaagcctgtggagaatgctgagaaccccatctaccctgtgatccaccggcagtacatctacttcctgagcagcaaggagaccaaggagaagttcatgaagaaccccatcaagtacatccggcagcccaagcccaagcccaccgtgcccatccgcatcatcatcgtgggcccccccaagagcggcaagaccaccgtggccaagaagatcaccagtgaatatggcctgaagcacctgagcatcggcggggccctgcgctacgtgctgaacaaccaccctgagacagagctggccctgatgctgaactggcacctgcacaagggcatgacagccccagatgagctggccatccaggccctggagctgagcctgatggagagcgtgtgcaacacagctggggtggtgattgatggctaccctgtgaccaagcaccagatgaacctgctggaggcccggagcatcatccccatggtgatctttgagctgtctgtgcccagcaaggagatcttcaagaggctgctgctggagaaggaaaatgagcagaggctgccctaccccctgcacaacagcgcccagatcgtggccgtgaacaacgtgaagtacaggaagaacatcggggagatccggcagtactaccaggagcagcaccagaactggtacgtgattgatggcttccacagcaagtggtgggtgtggaatgaggtgatcaagaatgtgcagatggtgaacaagtacatgcagacctacctggagcgcatcaaggccggcaaggccgcctgcatcgacaagctgtgcatcaccccccaggagctgctgagccggctgggggagtttgagcagttctgccctgtgtccctggccgagagccaggagctgtttgactgcagcgccacagacagcctggagtttgctgctgagttccggggccactactacaagatgagcagccaggagaagctgaacaagttcctggagaaccctgagctgtatgtgccccccctggccccccaccccctgcccagcgctgacatgatccccaagaggctgaccctgtctgagctgaagagccgcttccccaagtgtgccgagctgcagggctactgccctgtgacctacaaggatggcaaccagagatatgaggccctggtgcccggcagcatcaactatgccctggagtaccacaaccgcatctacatctgtgagaacaaggagaagctgcagaagttcctgcggagccccctgaagtactgggagcagaagctgccccacaagctgccccccctgcgggagcccatcctgctgaccagcctgcccctgcccggctacctggagcagggcatcgccaccagcctcatcaaggccatgaatgctgctggctgcctgaagcccaagttccccttcctgagcatccgccgcagcgccctgctgtacatcgccctgcacctgaaggccttcaaccccaagggcagcgagtacaccaggaagaagtacaagaagaagatggagcagttcatggagagctgtgagctgatcacctacctgggcgccaagatgaccaggaagtacaaggagccccagttccgggccatcgactttgaccacaagctgaagaccttcctgagcctgaggaacatcgaccccatcaatggatag

SEQ ID NO: 289564 - DNA, 5736 bp, Artificial Sequence
  derived and/or modified sequence
atgaccagccaggagaagaccgaggagtaccccttcgccgacatcttcgatgaggacgagaccgagcggaattttttactcagtaagccagtgtgcttcgtcgtattcggcaaacccggggttggaaaaactacgttagcccgatatatcacccaggcttggaagtgtattcgggttgaagcacttccaatcctcgaggaacagatcgccgcagaaacagagagcggcgtgatgctgcagagtatgctcatcagcggacaatcaatcccggacgagctggtcatcaaactgatgctggaaaaactaaacagccccgaggtgtgtcactttggttatatcattaccgaaataccctcattgtcccaggacgctatgacgacgctccagcaaatcgagctaattaaaaacctgaacctgaaacctgacgtgattatcaacatcaaatgcccggactatgatctttgccagcgtatctccgggcaaaggcagcacaacaacacgggctacatatacagtcgcgatcagtgggaccccgaggtcatcgagaaccaccggaagaagaagaaagaggcccagaaagacgggaaaggggaagaagaggaagaggaagaggaacaagaagaggaggaagccttcattgcggaaatgcagatggttgcagagatcctccaccacctggtacaaagacccgaggattatttggagaatgttgagaacatcgttaagctgtacaaagagaccatccttcaaaccctcgaggaggtgatggccgaacacaatccacaatacttgatcgagctgaacgggaataagccagccgaggaactgtttatgatcgtgatggatcggctgaaatatctcaacctgaagcgtgcagccattttgactaaactgcagggcgctgaggaggaaataaatgataccatggagaatgatgaattattcagaactctggcaagctacaagctcatagcaccgaggtacagatggcagagaagcaaatggggaagaacctgccccgtgaacctgaaggatggtaatatctattccggtttacccgactatagtgtctctttcttaggcaagatctattgcctcagttcagaagaggcgctcaagccgtttttacttaatcctcggccctatctcttgcctccaatgccaggtccaccttgtaaggtgttcattctgggaccccagtacagcggcaaaaccaccctctgcaacatgctggccgagaattataagggaaaagtcgtggactatgctcagttagtacagcccagattcgataaggcgagagaaaccttggtagaaaatacaatagccgaagctacggctgccgccatcaaggtcgtcaaagagaaactcctacgggaattacaggcgcgcaagcaggccgaaaccgcgctgcgcgaattccagaggcagtacgagaaaatggagttcggtgtattcccgatggaggccacacactcttcaattgatgaagagggctatatccagggttcacaaagagatcgggggtctagcttagtcgatacagaggaggccaagaccaaaagtgaaaacgtgttgcacgatcaggccgctaaggtagacaaagatgacgggaaagaaaccggtgagacttttacgtttaagagacactcccaggatgcttcccaagatgtaaaattgtactctgatactgcccctaccgaagatctgatcgaagaagtgactgcggaccaccccgaggtggtaacaatgatagaagagacaattaagatgtctcaggatatcaactttgaacagccctacgaaaagcatgccgagattctgcaggaggttctcggggaggtgatggaagaaaacaaggacagatttcccggggctccaaaatacggaggatggatagttgacaattgcccaatcgtcaaggagctctggatggcgctgataaaaaaagggatcatccctgacctggttatctatctaagtgacacagagaacaatggcaaatgtctgttcaacaggatttatctgcagaaaaagtcggagatagacagcaagatactagaacgtctgctcgaagagttgcaaaagaagaagaaagaagaggaggaggcacgcaaagctacggaggaggagctgaggcttgaagaagaaaacagacgcttgctggaactaatgaaggtgaaggccaaagaggctgaggagaccgataatgaagacgaggaagaaatcgaaggcgacgagctggaggtgcatgaggaacctgaagctagtcatgacactcgcggcagctggctcccagaggaatttgaagcaagtgaagtgccagagaccgagccggaagccgtcagtgagcccatcgaagagactaccgttgaaactgaaatacccaagggttcaaaggagggactcgagatagaaaaactgagcgagaccgtcgtactacctgagttccccgaagactcgtatccagatgtgccagaaatggagcctttcaaagagaagatcgggagcttcatcattctatggaagcagctagaggcaacaatctcagaggcttatataaagatcttaaacctagagatcgccgatcgtaccccacaggagttattgcaaaaggtagtcgaaacaatggagaaaccattccaatacaccgcgtgggaactcacgggtgaagattacgaggaggaaactgaagattatcagactgaagccgaagtggacgaggagctggaagaggaagaggaggaggaaggagaagataagatgaaagagcgcaaacggcacctgggggacacaaaacacttttgccccgtggtgctgaaggaaaactttatcctgcaacccggcaacacagaagaggccgccaagtatcgggaaaagatctactactttagctcagccgaagcaaaggagaaattccttgagcaccccgaggattacgtggcacacgaagaaccactaaaagccccaccacttcgaatctgtctggtcggaccccagggatctggcaaaactatgtgtggacgccagctcgcggaaaagcttaatatcttccacattcagttcgaagaggtgttgcaggaaaagttgttgctcaaaaccgagaaaaaagtggggcccgagttcgaagaggacagtgaaaatgagcaggccgctaagcaggaacttgaggaactcgcgatacaggcgaacgtgaaggtggaggaggagaacacaaagaagcagctgccagaagtgcagttgaccgaagaggaagaggtcataaaatcaagtctaatggagaacgagcctctgccccctgagatcctagaagtcatcctgtctgagtggtggcttaaagaacccatccgctccaccggcttcatcttggacggatttcctcggtatcctgaagaagctcagtttctgggcgaccgagggttctttccggatgccgcagtgttcatccaggtggatgatcaggatatcttcgatcgtcttctccctgcccagattgagaagtggaagctcaaacagaaaaaaaaactcgaaagaaaaaagcttatcaaggacatgaaagccaaaataagggtcgatactattgccaaacggcgtgccgagttaatcctggagcgggataagaaaagaagagaaaatgtggtacgtgacgacgaggagatcagcgaagaggaactggaggaagacaatgacgacatcgagaacatcctggaagatgagttccccaaggacgaggaggagatgagcggagaggaggacgaagaacaagaaaccgacgcgattgaaagacttcggggcgagctgggtgaaaagtttgaggcagacactcataacctccaaattattcaggacgagctggaaaggtatctaatcccaatcatctctatcaacggggctaggcgaaaccacattgtgcagtacacactgaatatgaagttgaaaccgctcgtggaaaatagggctagtatttttgaaaagtgtcaccccatccctgccccgctggcccagaagatgctaaccttcacctacaagtatatttcaagtttcggatactgggatcccgtgaagttgtccgaaggcgaaacgattaagcccgtggaaaacgcagaaaacccaatttaccctgtaatacaccggcagtacatttacttcctgtcttctaaagagacgaaggagaagtttatgaagaatcctatcaagtatatcaggcagcctaaacctaagcccactgtacccattcgcattatcatcgtcggccctcccaaaagcggtaaaacaacggtggcgaagaaaattacatcggaatacgggctgaagcacctttccatagggggagcgctcaggtacgtgttaaacaaccatccggaaaccgaacttgccctcatgctcaattggcacttgcataaaggcatgaccgctcctgacgaactggcaattcaggctttggagctgagtttgatggagtcagtgtgtaacactgcaggagtggtgatcgacgggtacccagttactaagcaccaaatgaacctgctcgaagccagatcaattattcctatggtaatattcgaactgtccgtgcccagtaaagaaatttttaagaggctgctgctggaaaaggaaaatgagcaacgcttaccttatcctctgcacaatagtgcccaaatagtagcagttaacaacgttaagtaccggaaaaacattggagaaataagacaatactaccaagagcagcaccagaattggtacgtgatcgatgggttccattcaaagtggtgggtttggaatgaagttattaagaacgtgcagatggtcaacaagtatatgcagacatacttagagaggatcaaggccggcaaagcagcgtgcatagacaagctatgcattacacctcaagagctgctgtcaaggcttggtgaatttgagcagttctgccccgtgtctcttgctgagagtcaagagctttttgattgtagtgctaccgatagcctggaatttgctgctgaatttcgcgggcactattacaagatgagtagccaagagaaactgaacaaattccttgagaatcctgaactctacgtgccccccctggctccacacccgctgccttcagccgatatgatccctaagcgccttaccctctcagaattgaagtctcgtttccccaagtgcgccgagcttcagggctattgccccgtgacatacaaagatggcaatcaacgctatgaggccctggtacctggctctatcaattacgctctggaatatcacaaccggatctacatctgtgagaacaaggagaagctgcagaaattcctgcgcagcccactgaaatactgggagcaaaaactgccgcacaaattaccgcctctccgcgagcctatcctgctcacctctctgccgctacccggataccttgagcagggcatagcgacctcattaattaaagctatgaacgccgccggatgcctgaagcctaagttccccttcctgtcaatccgcagaagtgcattactgtatattgcgcttcacctgaaagcctttaaccccaagggatccgaatatacccgcaagaaatacaaaaagaagatggaacagttcatggagtcatgcgaactcattacgtacctcggcgctaagatgacccgtaaatataaggagcctcagtttcgcgcaatcgactttgaccacaaattgaaaacctttctgtctctgaggaatattgatcctatcaacgggtag

SEQ ID NO: 289565 - DNA, 5735 bp, Artificial Sequence
  derived and/or modified sequence
atgacaagccaggaaaaaaccgaggaatacccattcgctgatatctttgatgaagacgagacagagcggaatttcttgttgtccaagcctgtttgctttgtggtattcggaaaacctggagtagggaaaaccactctcgcacgctatatcacacaggcttggaagtgcatcagagttgaagccctgcccatccttgaagaacagatagctgccgaaacggagagcggcgtgatgttacagagcatgcttattagtggccagagcattcctgatgaacttgtcatcaaactcatgttggaaaagctcaatagccccgaggtgtgccactttggatatatcattacggaaattccctccctgagccaggatgctatgacaacactccagcagattgaactgatcaagaatctcaaccttaagccagatgtgataatcaacatcaagtgtccagattacgatctttgccagcgaatttcggggcagagacagcacaataacaccgggtacatctacagtagagaccagtgggatccagaagtgatcgagaatcaccgcaagaagaaaaaagaagcacaaaaggatggcaagggtgaagaggaagaagaggaggaagagcaggaggaagaagaggcgtttattgccgagatgcagatggtggccgaaattctgcaccatcttgttcaacggcctgaggattacctggaaaatgtggagaatatagtgaaattatataaagagaccatactgcagactcttgaagaggtaatggctgaacataacccccagtacctcatagagcttaatggcaacaaacctgccgaggagctgttcatgatagtgatggacaggctcaagtatctcaatctgaagagagcggcaatcttgacaaaactacaaggggctgaggaagaaataaatgacacaatggaaaatgacgagcttttccgaactttggcgtcctacaagctgattgcccctaggtatcgctggcagagaagcaaatggggtaggacctgtccagtgaacctcaaagatggtaatatatactcgggacttccagattactccgtctcattcctgggtaagatctattgtctgtcttcagaggaagctctgaagcctttccttctgaatccacgaccatacctcctgccacctatgcccggacccccatgtaaagtgttcattctcggcccacagtattccgggaagactaccttatgtaatatgttagccgagaactataagggaaaggtggtggattatgcccagctggttcagccacgcttcgacaaggctagggagacactggtggagaataccatcgccgaggccaccgcagccgcaatcaaagtggtgaaggagaagctgttgcgtgagctgcaggcgagaaagcaggctgagactgcgcttagggaattccagcgacagtatgagaaaatggagttcggtgtgtttcccatggaagcaactcattctagcatcgatgaggagggatatatccagggaagccaacgcgatcgcggatcctctctggtggacacagaggaagccaagactaaaagtgaaaatgtcctacacgaccaggcagcgaaagtagacaaagacgacgggaaggagacgggagaaactttcaccttcaaaagacacagccaggatgctagccaggacgtcaaactctattctgatacagcacccacagaagatctgatcgaggaggtcactgctgaccatcctgaggtggtcacaatgattgaggaaaccatcaaaatgtcacaggatatcaatttcgaacaaccttacgagaagcacgctgaaatactgcaagaggttctgggcgaagtcatggaggagaacaaagaccggttccccggagcacccaaatatggcggatggatcgtagacaactgccccattgtgaaggaactttggatggccctgatcaaaaaaggcataatccctgacttggtgatttacctttcagacacggaaaacaacggcaagtgtctgtttaacagaatttacttacagaagaagtccgagatagatagtaagatcctggaaaggttgttagaggaactacaaaaaaagaaaaaggaggaggaagaagcacgaaaagctacagaagaggaattgcgccttgaggaggaaaacagacggctcctggaacttatgaaagtgaaggccaaggaagccgaggagacagacaacgaggacgaggaagagatcgagggggacgaactcgaagttcatgaggaacccgaggcttcccatgacaccaggggctcatggctgcctgaagaattcgaggcctccgaagtgcccgagaccgaaccagaagccgtgagtgaacctattgaggaaactaccgtggaaacggagattcccaagggttctaaggaaggactagaaatcgagaaactcagcgaaacagtcgtactgccagagttcccagaagactcctatcccgatgtacctgagatggagccctttaaggagaagatcggcagctttataatcctgtggaagcagctggaagccactatctctgaagcttatatcaagatcttgaatctggagattgctgacagaacaccgcaggaactccttcagaaggtcgtggaaaccatggagaagccatttcagtatacagcctgggaattgacaggtgaagactacgaagaagaaacggaggactaccaaaccgaagccgaagtggacgaggagctggaagaagaggaggaggaagagggtgaggacaagatgaaggagcgcaagcgccatctgggggataccaaacacttttgccccgtggtactgaaagaaaatttcattctccagcctggaaataccgaagaagctgccaaatatcgtgagaaaatttactacttcagttctgcggaagctaaggagaaattcctcgaacacccagaagattacgtggcacacgaggagcccctcaaggccccaccccttcggatttgcctggtcggccctcaaggctccggaaagactatgtgtggcagacagctggcggaaaagctgaatatatttcacattcagttcgaggaggtcctgcaggaaaagctactgctaaaaaccgagaaaaaagttggaccggaattcgaggaggactccgaaaatgagcaggcagctaagcaggaactggaggagctggctattcaagcaaacgtcaaggtggaggaggaaaatactaaaaagcaactccccgaggtgcagcttactgaggaggaggaagttattaaaagcagcctcatggaaaatgaaccgctgccccctgagatactggaggttatcctgtccgagtggtggctgaaggagccaataaggagtaccggctttattttagatggtttcccgagataccctgaagaagcacaatttctgggcgaccgtggctttttccctgatgctgccgttttcattcaggtcgacgaccaggacatttttgatcggctgttgcctgcccaaattgagaagtggaagctaaagcaaaaaaagaagctggagcggaagaagctgatcaaggacatgaaagccaagattcgcgtcgacactatagccaagcggagggccgagttgatcctggagcgggacaaaaagcggagggagaacgtggtgagggatgatgaggagatcagtgaggaagagctcgaagaggataatgacgacattgaaaacatcctcgaagacgagtttcccaaagacgaagaggaaatgtctggggaagaggacgaagaacaggagaccgatgccattgagagactgcgcggtgagcttggcgagaagttcgaggcggacactcataatttgcagattatccaggatgagctggagcgctatctgatccctatcatcagtattaatggcgcaagacggaaccatatcgttcagtataccttgaacatgaagcttaagcccctcgtcgagaacagagcctcaatctttgagaagtgtcatcctattcccgcacccctcgcccagaagatgctgacatttacctataagtatatcagcagtttcggatactgggatcccgtgaaattgagcgagggcgagacgatcaaaccggtggagaatgctgagaacccgatttacccagtgatccatagacagtacatctattttctgtctagtaaagagacaaaagagaagttcatgaaaaaccccatcaaatatatacggcagcccaagcctaaacctacagttcccattcgtatcatcatagtcggcccacccaagagcgggaagaccaccgtcgccaagaaaattaccagtgagtacggcctgaagcacctgtccatcgggggagcattaagatatgtgctcaataaccatcctgagaccgaactggctttaatgctgaattggcacctgcacaagggcatgacagcgcctgatgaacttgccatccaagcgctggagctttcccttatggaaagtgtgtgcaacactgccggtgtagtcatcgacggctatccagtgacgaaacatcagatgaatcttctggaggcgagaagcatcatcccaatggtgatattcgagctgtctgtgccatcaaaagagatatttaagaggctgttacttgaaaaggaaaacgaacagcgattgccttaccctttacataactcggcccagatcgtcgccgtgaacaatgtgaagtatcggaaaaatatcggagaaatccgccagtactatcaggagcaacatcagaattggtatgtgatcgatggtttccactccaaatggtgggtgtggaatgaggtgatcaagaacgtgcagatggtgaacaagtatatgcagacatacctggaaagaattaaggctggaaaggccgcttgtattgacaagctctgtattaccccacaggagctactcagtagactcggcgagttcgagcagttctgcccggtgtcccttgccgaatctcaggagctgttcgattgctcggctaccgattctcttgaattcgcagctgagttcagaggacactactataaaatgagtagccaggagaagctgaataagttcttagaaaaccccgagctatacgtgccaccattggcgccacatccattaccatccgccgacatgatcccaaagaggctgacactttctgagctgaagtctcgctttcctaagtgcgcggagttacagggctactgccctgtcacttacaaagacggtaatcaacgctatgaggccttggtccccggttcaattaactatgcgctggaatatcacaacagaatttatatctgcgaaaataaagagaagctccagaaattcttgaggagccctctgaaatactgggaacaaaaacttccacataagcttccaccgctgcgggaacctatactgctgactagtctgccccttcctggctaccttgagcaggggatcgcaaccagtcttattaaggccatgaatgctgcaggctgtctgaaaccaaagtttcctttcctctctatacggaggtcggccctcttgtatatcgccctccatctcaaggcattcaatccaaaaggatccgagtacacgcgtaaaaagtacaaaaaaaagatggaacaatttatggagtcatgcgagctgatcacttatttgggcgctaagatgactcggaagtacaaggaaccgcagttcagagcaattgattttgatcacaaactgaaaacctttctgagcctacgcaatatcgacccgataaacggtta

SEQ ID NO: 289566 - DNA, 683 bp, Artificial Sequence
  derived and/or modified sequence
gccgcgtccggcccggtcctgtcccgcagcgtcccgccagccagctccttgcacccttcgcggccgaggcgctccctggtgctccccgcgcagccatggctcagcacttctccctggccgcctgcgacgtggtcggattcgacctggaccacactctgtgtcgctacaacctgcccgagagcgccccgctcatttataatagctttgcccagttcctagttaaggagaaagggtacgataaggaattgctcaatgtgaccccagaggattgggatttctgttgcaaaggtttggcattggatctagaagatgggaacttccttaaacttgcaaataatggcactgttctcagggcaagccatggcaccaagatgatgactccagaggtgctggcagaggcatatggcaagaaagagtggaagcacttcttgtcggacactggaatggcttgccgctcaggaaagtattacttttacgacaactactttgacctgccaggagctcttctgtgtgccagggtggtggactatttaacaaaactgaacaatggtcaaaaaacatttgatttttggaaggatatagttgctgctatacaacacaattataaaatgtcagcttttaaggtaagaagattggccacatccttgcttcaggatatatctacaagtttcatacttatttaa

SEQ ID NO: 289567 - DNA, 417 bp, Artificial Sequence
  derived and/or modified sequence
caagccatggcaccaagatgatgactccagaggtgctggcagaggcatatggcaagaaagagtggaagcacttcttgtcggacactggaatggcttgccgctcaggaaagtattacttttacgacaactactttgacctgccaggagctcttctgtgtgccagggtggtggactatttaacaaaactgaacaatggtcaaaaaacatttgatttttggaaggatatagttgctgctatacaacacaattataaaatgtcagcttttaagggtaagtattgtgaagaggggccttctaatacgtgtttgttaagctatgtttgtctagtgaattagctgaaaagtaggtactttgctgtgtatcttacttaggatttaatttaagcttaaatattattataaagttggttctgactac

SEQ ID NO: 289568 - DNA, 667 bp, Artificial Sequence
  derived and/or modified sequence
gtcctgtcccgcagcgtcccgccagccagctccttgcacccttcgcggccgaggcgctccctggtgctccccgcgcagccatggctcagcacttctccctggccgcctgcgacgtggtcggattcgacctggaccacactctgtgtcgctacaacctgcccgagagcgccccgctcatttataatagctttgcccagttcctagttaaggagaaagggtacgataaggaattgctcaatgtgaccccagaggattgggatttctgttgcaaaggtttggcattggatctagaagatgggaacttccttaaacttgcaaataatggcactgttctcagggcaagccatggcaccaagatgatgactccagaggtgctggcagaggcatatggcaagaaagagtggaagcacttcttgtcggacactggaatggcttgccgctcaggaaagtattacttttacgacaactactttgacctgccaggagctcttctgtgtgccagggtggtggactatttaacaaaactgaacaatggtcaaaaaacatttgatttttggaaggatatagttgctgctatacaacacaattataaaatgtcagcttttaaggtaagaagattggccacatccttgcttcaggatatatctacaagtttcatacttattta

SEQ ID NO: 289569 - DNA, 588 bp, Artificial Sequence
  derived and/or modified sequence
atggcccagcacttcagcctggccgcctgcgacgtggtgggcttcgacctggaccacaccctgtgcagatacaacctgcccgagagcgcccccctgatctacaacagcttcgcccagttcctggtgaaggagaagggctacgacaaggagctgctgaacgtgacccccgaggactgggacttctgctgcaagggcctggccctggacctggaggacggcaacttcctgaagctggccaacaacggcaccgtgctgagagccagccacggcaccaagatgatgacccccgaggtgctggccgaggcctacggcaagaaggagtggaagcacttcctgagcgacaccggcatggcctgcagaagcggcaagtactacttctacgacaactacttcgacctgcccggcgccctgctgtgcgccagagtggtggactacctgaccaagctgaacaacggccagaagaccttcgacttctggaaggacatcgtggccgccatccagcacaactacaagatgagcgccttcaaggtgagaagactggccaccagcctgctgcaggacatcagcaccagcttcatcctgatctag

SEQ ID NO: 289570 - DNA, 336 bp, Artificial Sequence
  derived and/or modified sequence
tgaagccacggcaccaagatgatgacccccgaggtgctggccgaggcctacggcaagaaggagtggaagcacttcctgagcgacaccggcatggcctgcagaagcggcaagtactacttctacgacaactacttcgacctgcccggcgccctgctgtgcgccagagtggtggactacctgaccaagctgaacaacggccagaagaccttcgacttctggaaggacatcgtggccgccatccagcacaactacaagatgagcgccttcaagggcaagtactgcgaggagggccccagcaacacctgcctgctgagctacgtgtgcctggtgaactag

SEQ ID NO: 289571 - DNA, 588 bp, Artificial Sequence
  derived and/or modified sequence
atggcccagcacttctcactggccgcttgcgatgtggtgggcttcgatttagaccacacactgtgtcggtacaaccttccagaatcagctccgttaatttataattcttttgcccagttcctagtgaaggagaaagggtacgacaaggaactactgaatgtgacacccgaggactgggacttctgttgcaaagggctagcattagatttggaggacggtaatttcctgaagcttgctaacaatggtaccgtccttcgggctagccacggaacaaaaatgatgacccctgaagtcttagcagaagcatacggaaagaaggagtggaagcattttctctcagacaccggaatggcctgcagaagtgggaaatattacttttatgataattacttcgacctcccaggcgccctcctctgtgcccgggtagtggactacctcacaaagctgaacaacggccagaagacatttgacttctggaaagatatcgtggcggctattcagcataactataaaatgtcagccttcaaagtgaggagacttgcaacatcactgctgcaggacataagtacatctttcattctcatttag

SEQ ID NO: 289572 - DNA, 336 bp, Artificial Sequence
  derived and/or modified sequence
taatcccatggcaccaagatgatgacccctgaagtgttagcagaggcctatggaaagaaggaatggaagcactttctttccgacactggcatggcatgtcgtagtggaaaatactacttctacgataattacttcgacctgccaggggctctcttgtgcgcacgcgtcgtggactatctcactaaactaaataatggccagaaaactttcgatttctggaaggacatagtggcggcaatccagcacaattataaaatgtcagcctttaaggggaaatattgcgaagagggtccctccaacacttgccttctctcttatgtgtgcttagtgaactag

SEQ ID NO: 289573 - DNA, 588 bp, Artificial Sequence
  derived and/or modified sequence
atggcgcaacatttttcactggctgcatgtgacgtggtgggctttgacctcgatcacaccctgtgtcgctacaacctcccagagagcgcaccattaatctataactcctttgcccagtttctggtgaaggaaaaaggttatgacaaggaactgctgaacgtgacacccgaggattgggatttctgctgtaaagggctggctctcgacttggaagatgggaattttctgaaactcgccaataatggaacagtgcttcgcgcctctcacggaactaagatgatgacccccgaggtgcttgccgaggcgtacggcaagaaggagtggaaacactttctgtccgatacaggcatggcctgcaggtcgggcaagtattatttttacgataattatttcgatctcccaggcgcactactgtgtgcacgcgttgtggactaccttactaagcttaacaatggccagaagacatttgacttttggaaggatatcgtcgctgcaatccagcataactacaagatgtctgcttttaaagtgcgacgactggctacctctttactccaagatatttctaccagcttcatccttatttag

SEQ ID NO: 289574 - DNA, 588 bp, Artificial Sequence
  derived and/or modified sequence
atggcccagcacttcagcctggccgcctgtgatgtggtgggctttgacctggaccacaccctgtgccgctacaacctgcctgagagcgcccccctcatctacaacagctttgcccagttcctggtgaaggagaagggctatgacaaggagctgctgaatgtgaccccagaggactgggacttctgctgcaagggcctggccctggacctggaggatggcaacttcctgaagctggccaacaatggaacagtgctgcgggccagccacggcaccaagatgatgaccccagaggtgctggccgaggcctacggcaagaaggagtggaagcacttcctgagtgacaccggcatggcctgccgcagcggcaagtactacttctatgacaactactttgacctgcccggggccctgctgtgtgcccgggtggtggactacctgaccaagctgaacaacggccagaagacctttgacttctggaaggacatcgtggccgccatccagcacaactacaagatgtctgccttcaaggtgcggcggctggccaccagcctgctgcaggacatcagcaccagcttcatcctgatctag

SEQ ID NO: 289575 - DNA, 336 bp, Artificial Sequence
  derived and/or modified sequence
tgaagccacggcaccaagatgatgaccccagaggtgctggccgaggcctacggcaagaaggagtggaagcacttcctgagtgacaccggcatggcctgccgcagcggcaagtactacttctatgacaactactttgacctgcccggggccctgctgtgtgcccgggtggtggactacctgaccaagctgaacaacggccagaagacctttgacttctggaaggacatcgtggccgccatccagcacaactacaagatgtctgccttcaagggcaagtactgtgaggagggccccagcaacacctgcctgctgtcctatgtgtgcctggtgaactag

SEQ ID NO: 289576 - DNA, 588 bp, Artificial Sequence
  derived and/or modified sequence
atggcccagcacttcagcctggccgcctgcgacgtggtgggcttcgacctagatcataccctgtgtcgatataatctgccagagagcgctcctctgatatataacagtttcgctcagttcctcgttaaggagaagggctacgataaggaactcttaaatgtcactcctgaggattgggatttctgctgtaagggcctggctcttgacctagaagatgggaattttttaaaactggcgaacaacgggactgtccttcgggcatcacacgggacaaaaatgatgacacccgaagtgttagctgaggcttatggtaagaaggagtggaagcactttctgtcggatacaggaatggcttgtcgtagcggtaaatactacttctacgacaactattttgacttacccggtgcgttactctgtgctcgggtggttgattatctgacgaagttaaacaacggccaaaaaacattcgacttttggaaggatatagttgccgcaatccagcataattacaaaatgagcgcattcaaagtgcgaaggctcgcaacttctctgctccaggacatttctacctcttttatacttatctag

SEQ ID NO: 289577 - DNA, 336 bp, Artificial Sequence
  derived and/or modified sequence
tgaagccacggcaccaagatgatgacccccgaggtgctggccgaggcctacgggaaaaaagaatggaaacatttcttgtcggatacagggatggcgtgtagatccggtaaatactacttttatgataattacttcgacctccccggcgccctgctgtgcgcccgcgtggtggattacctcactaaattaaataacggccagaagacctttgatttctggaaggacatagtggcggccattcagcataactataaaatgtccgcttttaaagggaagtactgtgaagaaggcccctctaacacatgtctactcagttatgtctgccttgtcaactag

SEQ ID NO: 289578 - DNA, 588 bp, Artificial Sequence
  derived and/or modified sequence
atggcccagcacttcagcctggccgcctgcgacgtggtgggcttcgatctggatcacaccttgtgtaggtacaatctgccagagtccgcccccctcatctacaattcttttgcacaattcctggtgaaggaaaaggggtatgacaaggagcttctcaacgtcacacccgaggattgggatttctgctgtaaaggccttgctctggacttagaagatggcaactttctcaaactcgccaacaacgggaccgtcctgagggctagtcatggcactaaaatgatgacgccagaggtgctggctgaagcctacgggaagaaggaatggaagcacttcctcagcgatacaggaatggcctgcagatctgggaagtactatttctacgacaattatttcgaccttccgggagccctcctctgtgctcgagtggttgattatctcaccaagcttaacaacggccagaaaacattcgatttctggaaggacatcgtagccgccatacagcacaactacaagatgagcgcattcaaagttcggaggctcgcgacgagcctcctgcaggatataagtacttcctttatcctgatctag

SEQ ID NO: 289579 - DNA, 588 bp, Artificial Sequence
  derived and/or modified sequence
atggcccaacatttttccctggctgcctgcgacgtcgtcgggtttgacctcgatcacaccttgtgccggtacaacttgccagagtccgccccactgatctacaactcattcgcccagttcttagtgaaagagaaagggtacgataaggagctgctaaatgtgactccggaagactgggatttttgctgtaaagggttggcgctcgacctggaggatggcaacttcctaaagctagcaaacaacggtactgtgctgagagcttcacatggtactaagatgatgactcccgaggtcctggctgaggcatacggaaagaaagagtggaaacacttcctgagcgacaccggcatggcctgccgctccggcaaatactatttctacgacaactactttgatctgccaggtgcactgttatgtgctagggttgtggattatctgactaagttgaataacggccagaaaactttcgacttctggaaagacatcgtcgcagctattcagcacaattataagatgagcgcattcaaagtgcgcaggctggccacctcattgctccaggatatcagcacatcgttcattctcatctag

SEQ ID NO: 289580 - DNA, 336 bp, Artificial Sequence
  derived and/or modified sequence
taatcccacggcactaagatgatgacacccgaggttctcgcagaagcctacgggaaaaaggaatggaaacacttcctgtccgatactggcatggcctgccggagtgggaagtattatttttatgacaattacttcgaccttcccggtgccctgctgtgtgcaagggtggttgactatctcactaagctgaataacgggcagaagaccttcgatttttggaaggacatcgtcgccgctattcagcataactataaaatgtccgctttcaaagggaagtattgcgaggaagggccttctaacacgtgcttgctgtcttacgtctgcttagtcaactag

SEQ ID NO: 289581 - DNA, 588 bp, Artificial Sequence
  derived and/or modified sequence
atggcacagcacttctctctagctgcctgcgacgttgtcgggtttgacctcgatcacacgctgtgtagatataacctgcctgaatctgccccattgatctacaatagcttcgctcagttcctagtaaaggagaagggctacgacaaagagctgcttaacgtgacaccagaggattgggacttttgttgcaaaggactggctttagacctggaggacggaaactttctgaaattagctaataatggcacggtactgagagcgtctcacggtacaaagatgatgacgccagaagtcctcgcagaggcatatggtaagaaagaatggaaacatttcctgtcggatacaggcatggcttgtaggtccggaaagtactatttttatgataactattttgacctgccaggcgcactcttatgcgcacgggttgtggactacctgaccaagctgaacaacggtcagaagacatttgacttttggaaggacattgttgctgcaatccagcacaactacaagatgagcgccttcaaagtgaggaggttggctactagcttgctgcaagacatctccacgtctttcattctgatctag

SEQ ID NO: 289582 - DNA, 2934 bp, Artificial Sequence
  derived and/or modified sequence
atggtggtggccgaggacctgagcgccctgagaatggccgaggacagctgcgtggacgccgacctgcccgactgcaactgcgacgtgaccagacagagagtgaagaagctgaaggagaccctggtggccgtgcagcagctggacaagaacatgagcagcctgagaacctggctggcccacatcgagagcgagctggccaagcccatcgtgtacgacagctgcaacagcgaggagatccagagaaagctgaacgagcagcaggagctgcagagagacatcgagaagcacagcaccggcgtggccagcgtgctgaacctgtgcgaggtgctgctgcacgactgcgacgcctgcgccaccgacgccgagtgcgacagcatccagcaggccaccagaaacctggacagaagatggagaaacatctgcgccatgagcatggagagaagactgaagatcgaggagacctggagactgtggcagaagttcctggacgactacagcagattcgaggactggctgaagagcagcgagagaaccgccgccttccccagcagcagcggcgtgatctacaccgtggccaaggaggagctgaagaagttcgaggccttccagagacaggtgcacgagtgcctgacccagctggagctgatcaacaagcagtacagaagactggccagagagaacagaaccgacagcgcctgcagcctgaagcagatggtgcacgagggcaaccagagatgggacaacctgcagaagagagtgaccagcatcctgagaagactgaagcacttcatcggccagagagaggagttcgagaccgccagagacagcatcctggtgtggctgaccgagatggacctgcagctgaccaacatcgagcacttcagcgagtgcgacgtgcaggccaagatcaagcagctgaaggccttccagcaggagatcagcctgaaccacaacaagatcgagcagatcatcgcccagggcgagcagctgatcgagaagagcgagcccctggacgccgccatcatcgaggaggagctggacgagctgagaagatactgccaggaggtgttcggcagagtggagagataccacaagaagctgatcagactgcccctgcccgacgacgagcacgacctgagcgacagagagctggagctggaggacagcgccgccctgagcgacctgcactggcacgacagaagcgccgacagcctgctgagcccccagcccagcagcaacctgagcctgagcctggcccagcccctgagaagcgagagaagcggcagagacacccccgccagcgtggacagcatccccctggagtgggaccacgactacgacctgagcagagacctggagagcgccatgagcagagccctgcccagcgaggacgaggagggccaggacgacaaggacttctacctgagaggcgccgtgggcctgagcgacgtgatgatccccgagagccccgaggcctacgtgaagctgaccgagaacgccatcaagaacaccagcggcgaccacagcgccctggagagccagatcagacagctgggcaaggccctggacgacagcagattccagatccagcagaccgagaacatcatcagaagcaagacccccaccggccccgagctggacaccagctacaagggctacatgaagctgctgggcgagtgcagcagcagcatcgacagcgtgaagagactggagcacaagctgaaggaggaggaggagagcctgcccggcttcgtgaacctgcacagcaccgagacccagaccgccggcgtgatcgacagatgggagctgctgcaggcccaggccctgagcaaggagctgagaatgaagcagaacctgcagaagtggcagcagttcaacagcgacctgaacagcatctgggcctggctgggcgacaccgaggaggagctggagcagctgcagagactggagctgagcaccgacatccagaccatcgagctgcagatcaagaagctgaaggagctgcagaaggccgtggaccacagaaaggccatcatcctgagcatcaacctgtgcagccccgagttcacccaggccgacagcaaggagagcagagacctgcaggacagactgagccagatgaacggcagatgggacagagtgtgcagcctgctggaggagtggagaggcctgctgcaggacgccctgatgcagtgccagggcttccacgagatgagccacggcctgctgctgatgctggagaacatcgacagaagaaagaacgagatcgtgcccatcgacagcaacctggacgccgagatcctgcaggaccaccacaagcagctgatgcagatcaagcacgagctgctggagagccagctgagagtggccagcctgcaggacatgagctgccagctgctggtgaacgccgagggcaccgactgcctggaggccaaggagaaggtgcacgtgatcggcaacagactgaagctgctgctgaaggaggtgagcagacacatcaaggagctggagaagctgctggacgtgagcagcagccagcaggacctgagcagctggagcagcgccgacgagctggacaccagcggcagcgtgagccccaccagcggcagaagcacccccaacagacagaagacccccagaggcaagtgcagcctgagccagcccggccccagcgtgagcagcccccacagcagaagcaccaagggcggcagcgacagcagcctgagcgagcccggccccggcagaagcggcagaggcttcctgttcagagtgctgagagccgccctgcccctgcagctgctgctgctgctgctgatcggcctggcctgcctggtgcccatgagcgaggaggactacagctgcgccctgagcaacaacttcgccagaagcttccaccccatgctgagatacaccaacggccccccccccctgtag

SEQ ID NO: 289583 - DNA, 2934 bp, Artificial Sequence
  derived and/or modified sequence
atggtcgtcgcggaagacctcagtgcactgcggatggcagaggacagctgtgtggatgccgaccttcccgactgtaattgcgatgtcacccggcagcgagtgaaaaaattgaaagaaaccttggtcgcagtgcaacaacttgataagaacatgtcgagtctaaggacttggttagcacacattgaatcagagcttgctaaacctattgtctatgacagttgcaactctgaggaaatccagagaaaactgaacgagcagcaggaactgcaaagggacatcgaaaagcacagcaccggcgtggcttcagttcttaacctctgcgaggtcctgctgcatgactgtgatgcctgcgccaccgacgcggagtgcgacagtatccagcaagccaccagaaatctggaccggaggtggcggaacatttgcgcaatgtccatggagagaaggctgaagatcgaagagacatggagactctggcagaagtttctcgatgactattcaaggtttgaggattggctgaaatcatccgagagaactgctgcgtttccatctagttcaggcgtgatctacacagtggctaaagaagaactgaagaagttcgaggccttccagcgacaggtgcatgaatgtctaactcagcttgaactcattaacaaacagtatcgacgactggcccgcgaaaatagaaccgatagtgcatgtagtctgaaacagatggtacacgaggggaatcagcggtgggataacctgcagaagcgggtaacctcaattctgagacgactgaagcatttcataggacagcgtgaagagttcgagaccgcccgagatagcattttagtctggctgacagagatggacttacaactcactaacatagagcatttttccgagtgcgacgtccaagccaagataaaacagcttaaggcctttcagcaggagattagccttaaccataacaagatcgaacagatcatcgcccaaggtgaacagctgattgagaagtccgagccactggacgcagcaatcattgaggaagaattggatgagctgcgccgttactgtcaggaggtcttcggaagagtcgagcgttatcacaagaagttgattagactgcccttacccgacgacgaacacgatctgagtgatagggagctggagctagaggactctgctgcgctgtctgaccttcactggcacgacaggtccgccgactccctactgagccctcagccttccagcaatctgagcctgagcctggcccagccgctgaggtccgaacgctcaggccgcgatacccctgccagtgtagatagcattccattagagtgggaccacgactacgacctgagtcgggaccttgagagcgctatgtctagagctctgccttccgaagatgaagaagggcaagacgataaggacttttacctccgtggtgctgttggcctgtccgacgtgatgattccggagtcacctgaggcttacgtgaaactcaccgagaatgctatcaaaaatactagcggagatcacagcgcccttgaaagccagattcggcagctgggcaaggccttagatgactctagattccagatccagcaaaccgaaaacatcattcggagtaagacaccgactgggccggaattggatacctcttacaagggctacatgaagctcctgggggagtgttctagtagcatagattcagttaaaaggctcgaacacaagctgaaagaggaagaagagtccctgccgggttttgtgaacttgcacagcaccgagacccagacagccggcgtgatcgatagatgggagttgctgcaggcacaggctctgtcaaaggaactccgcatgaaacagaatctacaaaagtggcaacagtttaattcggacctgaactctatttgggcctggctcggcgacacagaggaggaactggaacagctgcagcgcctggaattgagcaccgatatccagactattgaattgcagatcaaaaagctgaaagaactgcagaaggcagttgatcaccgcaaagccataatcctttctattaacctgtgctctcccgaatttacccaagcagactctaaggagtctcgcgatctgcaagatcgactctctcaaatgaatggacgatgggaccgcgtgtgttctctgctggaggaatggcgaggattgctgcaggatgcactcatgcagtgtcagggtttccacgagatgtctcacggcctgctgctcatgctagagaacatcgatcgtcggaaaaatgagatagtgcccattgacagtaatctggatgctgaaattctgcaagaccaccacaaacagctgatgcagataaaacacgaacttctcgaaagccagctgcgggttgcaagtctacaggatatgagttgccagctcttggtgaacgcggaaggtactgattgcctcgaagctaaggagaaggtccacgtgatagggaaccgtttaaaacttcttcttaaggaggtaagcagacatattaaagaacttgagaaactcctcgacgtttcctcttcacagcaagacctctcaagttggagcagcgccgatgaacttgatacctctggttctgtgtctccaacatcaggcagaagtacccctaatcggcagaagacaccccggggcaaatgtagcctttcccagcctggacccagcgtgagctcaccacactcacgcagcaccaagggcggtagcgattcctccctaagtgagccaggccctggtcgctcgggaagaggttttctcttcagggtattacgtgcagccctgcccctccagctcctgctgcttctgctcatcgggctggcttgcctcgttccaatgtctgaggaggactatagttgcgcactgtccaataactttgccaggtcatttcacccgatgctgaggtataccaacgggcctccacctttatag

SEQ ID NO: 289584 - DNA, 2934 bp, Artificial Sequence
  derived and/or modified sequence
atggtggtggccgaggacctgagcgccctgaggatggccgaggacagctgtgtggatgctgacctgcctgactgcaactgtgatgtgacccggcagagggtgaagaagctgaaggagaccctggtggccgtgcagcagctggacaagaacatgagcagcctgcggacctggctggcccacattgaaagtgagctggccaagcccatcgtgtatgacagctgcaacagcgaggagatccagaggaagctgaatgagcagcaggagctgcagagggacatcgagaagcacagcactggagtggcctctgtgctgaacctgtgtgaggtgctgctgcatgactgtgatgcctgtgccacagatgctgaatgtgacagcatccagcaggccaccaggaacctggaccggcgctggaggaacatctgtgccatgtccatggagcggcggctgaagattgaggagacctggaggctgtggcagaagttcctggatgactacagcagatttgaggactggctgaagagcagcgagaggacagctgccttccccagcagcagtggagtcatctacacagtggccaaggaggagctgaagaagtttgaggccttccagaggcaggtgcatgagtgcctgacccagctggagctgatcaacaagcagtacagaaggctggcccgggagaacagaacagattctgcctgcagcctgaagcagatggtgcatgagggcaaccagcgctgggacaacctgcagaagagggtgaccagcatcctgcggcggctgaagcacttcatcggccagcgggaggagtttgaaacagcccgggacagcatcctggtgtggctgacagagatggacctgcagctgaccaacatcgagcacttctctgaatgtgatgtgcaggccaagatcaagcagctgaaggccttccagcaggagatcagcctgaaccacaacaagattgagcagatcatcgcccagggcgagcagctgattgagaagtctgagcccctggatgctgccatcatcgaggaggagctggatgagctgcggcgctactgccaggaggtgtttggccgggtggagcgctaccacaagaagctgatccggctgcccctgcctgatgatgaacatgacctgagtgaccgggagctggagctggaggacagcgctgccctgagtgacctgcactggcatgacagatctgctgacagcctgctgagcccccagcccagcagcaacctgagcctgagcctggcccagcccctgcggtctgagaggagcggccgggacaccccagcctctgtggacagcatccccctggagtgggaccatgactatgacctgagccgggacctggagagcgccatgagccgggccctgcccagtgaagatgaggagggccaggatgacaaggacttctacctgcggggagctgtgggcctgagtgatgtgatgatccctgagagccctgaggcctacgtgaagctgacagaaaatgccatcaagaacaccagcggggaccacagcgccctggagagccagatccggcagctgggcaaggccctggatgacagccgcttccagatccagcagacagagaacatcatccgcagcaagacccccaccggccctgagctggacaccagctacaagggctacatgaagctgctgggagaatgtagcagcagcattgacagcgtgaagaggctggagcacaagctgaaggaggaggaggagagcctgcccggctttgtgaacctgcacagcacagagacccagacagctggggtcatcgaccgctgggagctgctgcaggcccaggccctgagcaaggagctgaggatgaagcagaacctgcagaagtggcagcagttcaacagcgacctgaacagcatctgggcctggctgggggacacagaggaggagctggagcagctgcagaggctggagctgagcacagacatccagaccatcgagctgcagatcaagaagctgaaggagctgcagaaggctgtggaccacaggaaggccatcatcctgagcatcaacctgtgcagccctgagttcacccaggccgacagcaaggagagccgggacctgcaggaccggctgagccagatgaatggccgctgggacagagtgtgcagcctgctggaggagtggaggggcctgctgcaggatgccctgatgcagtgccagggcttccacgagatgagccacggcctgctgctgatgctggagaacatcgacaggaggaagaatgagatcgtgcccatcgacagcaacctggatgctgagatcctgcaggaccaccacaagcagctgatgcagatcaagcatgagctgctggagagccagctgcgggtggccagcctgcaggacatgagctgccagctgctggtgaatgctgagggcacagactgcctggaggccaaggagaaggtgcacgtgattggcaaccggctgaagctgctgctgaaggaggtgagccgccacatcaaggagctggagaagctgctggatgtgagcagcagccagcaggacctgagctcctggagcagcgcagatgagctggacaccagcggctctgtgagccccaccagcggccgcagcacccccaaccggcagaagaccccccggggcaagtgcagcctgagccagcccggccccagcgtgagcagcccccacagccgcagcaccaagggcggcagtgacagcagcctgtctgagcccggccctggccgcagcggccggggcttcctgttccgggtgctgcgggccgccctgcccctgcagctgctgctgctgctgctgattggcctggcctgcctggtgcccatgtctgaggaggactacagctgtgccctgagcaacaactttgcccgctccttccaccccatgctgcgctacaccaacggccccccacccctgtag

SEQ ID NO: 289585 - DNA, 2934 bp, Artificial Sequence
  derived and/or modified sequence
atggtggtggccgaggacctgagcgccctgcggatggccgaggactcctgcgtcgacgctgacctacccgactgcaactgtgatgtgacaaggcagcgggtcaaaaaactgaaagagactttggtcgctgtccaacagctagataagaacatgtcaagtcttagaacctggctcgcgcacatcgaaagcgagctggcaaaaccaatcgtatacgattcatgcaactctgaggagattcagcgcaaattaaacgaacagcaagaactgcagcgcgatatcgaaaagcattccacaggcgtggcgtcggtcctgaatctgtgcgaggtactcttacatgactgtgacgcctgcgccactgacgcagagtgcgacagcatccagcaggccaccagaaatctggacaggcgctggaggaacatttgcgctatgagtatggaacggcgattgaagatagaggagacttggcggttgtggcagaaatttctagacgactacagtcgtttcgaagattggctgaaaagctctgagaggaccgctgccttcccgtcgagctcaggcgtcatttacaccgttgcaaaagaggaactcaaaaagtttgaagcattccaaaggcaagtgcatgagtgtctgacacagttggagctcataaataagcagtatcggcgtctcgcaagagagaataggaccgatagcgcttgttcacttaaacaaatggtgcacgaaggaaaccaacgatgggataacttgcagaagagagtcacttccatactaagacggctcaaacattttattggccagagggaggagtttgaaactgcaagagattcaattctggtgtggctgacggaaatggacctgcaactgacaaatatagaacactttagcgagtgcgacgtacaagccaagatcaaacagctcaaggcgtttcagcaggaaatcagcctcaatcacaataaaatcgagcaaatcattgctcagggagagcagcttatagaaaagagcgagcctttggatgctgcaatcatcgaggaggagctggatgagcttcggcgctactgtcaagaagtgtttggcagagtggaaagataccataagaagctcattcgcctcccattgccggacgacgagcacgacctgagcgatagggaactcgaactcgaggattcagcagccttatctgatctacattggcacgaccggagcgccgactccctcctgtcacctcagccttcctctaacttgtccctctcattggcccagcccctccgctctgaacggtccggccgggacaccccagcttctgtagacagcatccctctagagtgggaccacgactatgatctttcacgggacctcgagtcagcgatgtcccgtgccttgccttctgaggacgaagagggtcaagacgacaaagacttttacctgaggggggcagtgggtttgtccgacgtgatgatcccggagtcaccagaagcctacgtgaaactgaccgaaaacgccatcaagaatacaagtggggatcattcagccctggaaagccagatccgacagcttggtaaagcgctcgatgactcgagatttcagatccagcagaccgagaacattattcgaagtaagacccctacaggccccgagctggacacatcctacaaaggatatatgaagctactcggagagtgcagtagtagtattgactccgtcaagcgtctcgaacacaaactcaaagaggaggaagaaagtctccctggcttcgtcaacctccattccacagagacccagacagccggggttatcgaccgatgggaactactgcaggcccaggccctatctaaggagcttcggatgaagcagaatctgcagaagtggcaacagtttaactcagatctgaacagcatttgggcatggttgggcgatactgaggaagaactggaacaactccagcggctggaattgtctaccgatattcagactatcgaactgcagatcaagaaactgaaagagctgcagaaggcagttgatcaccgcaaggccatcattctctccatcaatctctgttcccccgagtttacccaggccgactcgaaggagtctcgggacttacaggacagactatcccagatgaatgggaggtgggaccgggtgtgtagcctgctggaggagtggcggggcctcctgcaggatgccttgatgcagtgccaaggtttccacgaaatgtctcatggacttctgttgatgcttgagaacattgacagaaggaagaatgaaatcgtgcctatcgattccaacctggatgctgagatactccaagatcaccacaagcagttgatgcaaataaaacacgagttgctggagtctcagcttcgggtcgcatcactccaggacatgtcatgccagttattagtcaacgcggaaggaactgattgcctagaggcaaaggagaaagttcacgtgatcgggaacaggttaaagctcctgctgaaggaggtgtcaagacacattaaagaacttgaaaagctactagacgtaagtagctcacaacaggatctctccagttggtcgtcggcagacgaacttgatacgtcagggagcgtcagccccacaagcggacgctccactccaaaccggcagaaaacaccgagaggcaagtgttctctgtcccaacccggcccctcagtgtcatctcctcactcacgctctacgaagggaggctctgactcatcactctctgagcctggcccaggtagatctggtcgggggtttctttttcgggtgcttagggcagcgcttcccttgcagctactcctactgctgttaataggtctcgcctgtttggtgcccatgtccgaagaagactatagttgtgctctctctaacaacttcgccagaagcttccatcccatgctgaggtatacaaatggtcctccacccctctag

SEQ ID NO: 289586 - DNA, 2934 bp, Artificial Sequence
  derived and/or modified sequence
atggttgtcgccgaagatctcagtgcgctgaggatggctgaggattcttgcgttgatgcagatctgcctgattgtaattgcgatgtgactcggcagagggttaagaagctaaaagagactcttgttgctgtccaacagctcgacaagaatatgtccagcctgagaacttggctagcgcacatagagtcagagctcgccaagcccattgtgtacgattcttgtaattccgaggaaatccaaaggaagttgaacgaacaacaggagttacagcgcgatattgagaagcactctacaggcgttgcgagcgtactaaatttgtgtgaagtgctgttgcatgattgtgacgcttgcgccaccgatgcagagtgtgattctatccagcaggccactcgtaacttggaccggagatggcgcaatatttgcgccatgtcaatggagcgcaggttgaagattgaagagacatggcgcctgtggcaaaaatttcttgatgattactcccgattcgaggactggctgaagtcttcagaacgcacagctgcatttccctcgtcctccggggtgatttataccgtagctaaggaagagttaaaaaagtttgaagcctttcagcggcaggtgcacgagtgcctcactcagttagaactgataaacaagcaatatagacgcttggcgagagagaaccgaaccgattctgcgtgcagtttaaagcaaatggtacacgagggtaaccagagatgggacaacctgcagaaaagggtgacatctatcctgagaagacttaagcattttatcgggcagagggaggagtttgagactgccagggactcaattctggtgtggctcacagaaatggaccttcagctcaccaatatagaacacttttccgagtgcgacgtgcaggccaaaatcaagcaattgaaggcttttcagcaggaaatctctttgaaccataacaagatagaacagatcatcgcccaaggggagcagctgattgagaagagtgagccactggatgctgcaataattgaggaggaacttgacgagctccgcaggtattgccaggaggtgtttgggagagtggagcgttatcataagaagttgattagactgcctctcccagatgacgagcatgatctttctgatagggagttagaactagaagacagcgccgctttgagtgacctgcactggcacgaccgatctgcagattccttgttatctcctcagccatcctccaacttatctctgagtctcgcccaaccccttcggagtgaacgctcagggagagacacacccgcatccgtggatagcatcccactcgagtgggaccatgactatgacctctccagagatctagagtccgctatgtcccgcgctctgcctagtgaagacgaggagggacaggacgacaaggacttctacctccgcggagctgtgggtctgtccgatgtaatgattccggagtcccctgaagcttacgttaagctcacggagaatgcaattaagaatacgtctggagatcattccgcccttgagagccagatccgccagttgggaaaggctctggacgatagcaggtttcaaatccagcagacagaaaacattattaggtccaaaactcccaccggcccagagctggataccagttataaaggatacatgaaactcctgggcgaatgttcatcttctatcgactctgtgaagcgactggagcacaagctgaaggaagaagaggaatcccttcccggattcgtcaatctgcacagtacagaaacacaaacggcgggagtaatcgatcgatgggaactgctccaggctcaggcgcttagcaaggaacttaggatgaagcagaaccttcagaaatggcagcagttcaactctgatctcaacagcatctgggcttggctgggagacaccgaggaagaattagaacagctccagcgcctcgagttgtccactgacatccaaacgatcgaactccagattaaaaagttgaaggagctacagaaagcagtggatcaccgcaaggctattatactgtcaattaacctatgtagcccagaattcacccaggcggacagtaaggaaagtcgggacctccaagataggttatcacagatgaacggcaggtgggaccgtgtgtgttcactcctggaagagtggaggggactgctacaggacgcactaatgcaatgccaggggtttcatgagatgagtcacggcctactgctgatgctggagaatatcgatcgacgaaagaatgaaatcgtgcctattgactctaatctggatgccgaaatcttgcaagaccatcacaagcagctgatgcagataaaacacgagcttctagagagtcagctccgcgtcgcgagcctacaggatatgagttgccagctgctggtgaatgctgagggaaccgactgtctcgaagcaaaagaaaaggtgcacgtgatagggaatagactcaagttgttattaaaagaagtgagtcgccatataaaagagctggagaagctgcttgatgtgagctcatctcaacaggacttgagttcttggagctcagcggatgaactggatacctccgggagcgtcagtcctaccagcgggcgatccaccccaaaccgccagaaaacacctcggggaaaatgctcactgtcccagccaggtccctccgttagctccccccacagtcgcagtaccaaaggaggctccgattccagtctcagcgagccaggtcctggcaggtccggacggggattccttttcagggtgctgcgcgcagcacttccattgcagctgctgttactgctgttgatagggcttgcttgtctggtcccgatgtccgaggaagattactcctgcgctttgtcaaacaattttgcacggtctttccacccaatgttacgatacaccaatggaccgcctcccctgtag

SEQ ID NO: 289587 - DNA, 3683 bp, Artificial Sequence
  derived and/or modified sequence
atggtggtggcggaggacctgagtgccctgaggatggcagaggacagctgtgtggatgcagatctcccagattgtaactgcgatgtcacaaggcagagggtgaagaagctgaaggagaccctggtagccgtgcagcagcttgataagaacatgagcagcctgaggacctggctcgctcacatcgagtcagagctggccaagccaatagtctacgattcctgtaactcggaagaaatacagagaaagcttaatgagcagcaggagcttcagagagacatagagaagcacagtacaggtgttgcatctgtcctcaacctgtgtgaagtcctgctgcacgactgtgacgcctgtgccactgatgccgagtgtgactctatacagcaggctacgagaaacctggaccggcggtggagaaacatttgtgctatgtccatggaaaggaggctgaaaatcgaagagacgtggcgattgtggcagaaatttctggatgactattcacgttttgaagattggctgaagtcttcagaaaggacagctgcttttcccagctcttctggggtgatctatacagttgccaaggaagaactaaagaaatttgaggctttccagcgacaggtccacgagtgcctgacgcagctggaactgatcaacaagcagtaccgccgcctggccagggagaaccgcactgattcagcatgtagcctcaaacagatggttcacgaaggcaaccagagatgggacaacctgcaaaagcgtgtcacctccatcttgcgcagactcaagcattttattggccagcgtgaggagtttgagactgcgcgggacagcattctggtctggctcacagagatggatctgcagctcactaatattgaacatttttctgagtgtgatgttcaagctaaaataaagcaactcaaggccttccagcaggaaatttcactgaaccacaataagattgagcagataattgcccaaggagaacagctgatagaaaagagtgagcccttggatgcagcgatcatcgaggaggaactagatgagctccgacggtactgccaggaggtcttcgggcgtgtggaaagataccataagaaactgatccgcctgcctctcccagacgatgagcacgacctctcagacagggagctggagctggaagactctgcagctctgtcggacctgcactggcacgaccgctctgcagacagcctgctttctccacagccttcctccaatctctccctctcgctcgctcagcccctccggagcgagcggtcaggacgagacaccccggctagtgtggactccatccccctggagtgggatcacgactatgacctcagtcgggacctggagtctgcaatgtccagagctctgccctctgaggatgaagaaggtcaggatgacaaagatttctacctccggggagctgttggcttatcagatgtaatgatccccgaaagccctgaggcctatgtaaaactcacagaaaatgcaatcaaaaatacctccggggaccacagtgccctagagtcacagatccgacaactgggcaaagccctggatgatagccgttttcagatacagcaaaccgaaaatatcattcgcagcaaaactcccacggggccggagctagacaccagctacaaaggctacatgaaactgctgggcgaatgcagtagcagtatagactccgtgaagagactggagcacaaactgaaggaggaagaggagagccttcctggctttgttaacctgcatagtaccgaaacccaaacggctggtgtgattgaccgatgggagcttctccaggcccaggcattgagcaaggagttgaggatgaagcagaacctccagaagtggcagcagtttaactcagacttgaacagcatctgggcctggctgggggacacggaggaggagttggaacagctccagcgtctggaactcagcactgacatccagaccatcgagctccagatcaaaaagctcaaggagctccagaaagctgtggaccaccgcaaagccatcatcctctccatcaatctctgcagccctgagttcacccaggctgacagcaaggagagccgggacctgcaggatcgcttgtcgcagatgaatgggcgctgggaccgagtgtgctctctgctggaggagtggcggggcctgctgcaggatgccctgatgcagtgccagggtttccatgaaatgagccatggtttgcttcttatgctggagaacattgacagaaggaaaaatgaaattgtccctattgattctaaccttgatgcagagatacttcaggaccatcacaaacagcttatgcaaataaagcatgagctgttggaatcccaactcagagtagcctctttgcaagacatgtcttgccaactactggtgaatgctgaaggaacagactgtttagaagccaaagaaaaagtccatgttattggaaatcggctcaaacttctcttgaaggaggtcagtcgtcatatcaaggaactggagaagttattagacgtgtcaagtagtcagcaggatttgtcttcctggtcttctgctgatgaactggacacctcagggtctgtgagtcccacatcaggaaggagcaccccaaacagacagaaaacgccacgaggcaagtgtagtctctcacagcctggaccctctgtcagcagtccacatagcaggtccacaaaaggtggctccgattcctccctttctgagccagggccaggtcggtccggccgcggcttcctgttcagagtcctccgagcagctcttccccttcagcttctcctgctcctcctcatcgggcttgcctgccttgtaccaatgtcagaggaagactacagctgtgccctctccaacaactttgcccggtcattccaccccatgctcagatacacgaatggccctcctccactctgaactaagcagatgccatctgcagaagtgctggtagcataaggaggatcgggtcataagcaatcccaaactaccaacaagaggaccttgatcttggcgaaagccctcggtgtggcagctttagccctcctccagatcacatgtgtgcaaattatggcttcagaggtggaagataaacagtgacgggggaacaaacagacaacaagaaggtttggaagaaatctggtttgagactctgaaccttagcactaaggagattgagtaaggacctccaaagttccccggactcatgaattctgggcccttggcccattctgtgcacagccaaggacttcagtagaccatctgggcagctttcccatggtgctgctccaaccatcagataaatgaccctcccaagcaccatgtcagtgtcgtacaatctaccaaccaaccagtgctgaagagattttagaaccttgtaacatacaatttttaagagcttatatggcagcttcctttttaccttgttttcctttggggcatgatgttttaacctttgctttagaagcacaagctgtaaatctaaaaggcacttttttttagaggtataaagaaaaactagatgtaataaataagatcatggaaggctttatgtgaaaaaagttgaatgttatagtaaaaaaaaaaagatatttatgtatgtacagtttgctaaagccaagttttgtttgtattgatttctttgcatttattatagatattataaaata

SEQ ID NO: 289588 - protein, 3321 aa, Artificial Sequence
  derived and/or modified sequence
MELDAAVQKFLEQNGQLGKPLAKKIGKLTELHQQTIRQAENRLSKLNQAASHLEEYNEMLELILKWIEKAKVLAHGTIAWNSASQLREQYILHQTLLEESKEIDSELEAMTEKLQYLTSVYCTEKMSQQVAELGRETEELRQMIKIRLQNLQDAAKDMKKFEAELKKLQAALEQAQATLTSPEVGRLSLKEQLSHRQHLLSEMESLKPKVQAVQLCQSALRIPEDVVASLPLCHAALRLQEEASRLQHTAIQQCNIMQAAVVQYEQYEQEMKHLQQLIEGAHREIEDKPVATSNIQELQAQISRHEELAQKIKGYQEQIASLNSKCKMLTMKAKHATMLLTVTEVEGLAEGTEDLDGELLPTPSAHPSVVMMTAGRCHTLLSPVTEESGEEGTNSEISSPPACRSPSPVANTDASVNQDIAYYQALSAERLQTDAAKIHPSTSASQEFYEPGLEPSATAKLGDLQRSWETLKNVISEKQRTLYEALERQQKYQDSLQSISTKMEAIELKLSESPEPGRSPESQMAEHQALMDEILMLQDEINELQSSLAEELVSESCEADPAEQLALQSTLTVLAERMSTIRMKASGKRQLLEEKLNDQLEEQRQEQALQRYRCEADELDSWLLSTKATLDTALSPPKEPMDMEAQLMDCQNMLVEIEQKVVALSELSVHNENLLLEGKAHTKDEAEQLAGKLRRLKGSLLELQRALHDKQLNMQGTAQEKEESDVDLTATQSPGVQEWLAQARTTWTQQRQSSLQQQKELEQELAEQKSLLRSVASRGEEILIQHSAAETSGDAGEKPDVLSQELGMEGEKSSAEDQMRMKWESLHQEFSTKQKLLQNVLEQEQEQVLYSRPNRLLSGVPLYKGDVPTQDKSAVTSLLDGLNQAFEEVSSQSGGAKRQSIHLEQKLYDGVSATSTWLDDVEERLFVATALLPEETETCLFNQEILAKDIKEMSEEMDKNKNLFSQAFPENGDNRDVIEDTLGCLLGRLSLLDSVVNQRCHQMKERLQQILNFQNDLKVLFTSLADNKYIILQKLANVFEQPVAEQIEAIQQAEDGLKEFDAGIIELKRRGDKLQVEQPSMQELSKLQDMYDELMMIIGSRRSGLNQNLTLKSQYERALQDLADLLETGQEKMAGDQKIIVSSKEEIQQLLDKHKEYFQGLESHMILTETLFRKIISFAVQKETQFHTELMAQASAVLKRAHKRGVELEYILETWSHLDEDQQELSRQLEVVESSIPSVGLVEENEDRLIDRITLYQHLKSSLNEYQPKLYQVLDDGKRLLISISCSDLESQLNQLGECWLSNTNKMSKELHRLETILKHWTRYQSESADLIHWLQSAKDRLEFWTQQSVTVPQELEMVRDHLNAFLEFSKEVDAQSSLKSSVLSTGNQLLRLKKVDTATLRSELSRIDSQWTDLLTNIPAVQEKLHQLQMDKLPSRHAISEVMSWISLMENVIQKDEDNIKNSIGYKAIHEYLQKYKGFKIDINCKQLTVDFVNQSVLQISSQDVESKRSDKTDFAEQLGAMNKSWQILQGLVTEKIQLLEGLLESWSEYENNVQCLKTWFETQEKRLKQQHRIGDQASVQNALKDCQDLEDLIKAKEKEVEKIEQNGLALIQNKKEDVSSIVMSTLRELGQTWANLDHMVGQLKILLKSVLDQWSSHKVAFDKINSYLMEARYSLSRFRLLTGSLEAVQVQVDNLQNLQDDLEKQERSLQKFGSITNQLLKECHPPVTETLTNTLKEVNMRWNNLLEEIAEQLQSSKALLQLWQRYKDYSKQCASTVQQQEDRTNELLKAATNKDIADDEVATWIQDCNDLLKGLGTVKDSLFFLHELGEQLKQQVDASAASAIQSDQLSLSQHLCALEQALCKQQTSLQAGVLDYETFAKSLEALEAWIVEAEEILQGQDPSHSSDLSTIQERMEELKGQMLKFSSMAPDLDRLNELGYRLPLNDKEIKRMQNLNRHWSLISSQTTERFSKLQSFLLQHQTFLEKCETWMEFLVQTEQKLAVEISGNYQHLLEQQRAHELFQAEMFSRQQILHSIIIDGQRLLEQGQVDDRDEFNLKLTLLSNQWQGVIRRAQQRRGIIDSQIRQWQRYREMAEKLRKWLVEVSYLPMSGLGSVPIPLQQARTLFDEVQFKEKVFLRQQGSYILTVEAGKQLLLSADSGAEAALQAELAEIQEKWKSASMRLEEQKKKLAFLLKDWEKCEKGIADSLEKLRTFKKKLSQSLPDHHEELHAEQMRCKELENAVGSWTDDLTQLSLLKDTLSAYISADDISILNERVELLQRQWEELCHQLSLRRQQIGERLNEWAVFSEKNKELCEWLTQMESKVSQNGDILIEEMIEKLKKDYQEEIAIAQENKIQLQQMGERLAKASHESKASEIEYKLGKVNDRWQHLLDLIAARVKKLKETLVAVQQLDKNMSSLRTWLAHIESELAKPIVYDSCNSEEIQRKLNEQQELQRDIEKHSTGVASVLNLCEVLLHDCDACATDAECDSIQQATRNLDRRWRNICAMSMERRLKIEETWRLWQKFLDDYSRFEDWLKSSERTAAFPSSSGVIYTVAKEELKKFEAFQRQVHECLTQLELINKQYRRLARENRTDSACSLKQMVHEGNQRWDNLQKRVTSILRRLKHFIGQREEFETARDSILVWLTEMDLQLTNIEHFSECDVQAKIKQLKAFQQEISLNHNKIEQIIAQGEQLIEKSEPLDAAIIEEELDELRRYCQEVFGRVERYHKKLIRLPLPDDEHDLSDRELELEDSAALSDLHWHDRSADSLLSPQPSSNLSLSLAQPLRSERSGRDTPASVDSIPLEWDHDYDLSRDLESAMSRALPSEDEEGQDDKDFYLRGAVGLSGDHSALESQIRQLGKALDDSRFQIQQTENIIRSKTPTGPELDTSYKGYMKLLGECSSSIDSVKRLEHKLKEEEESLPGFVNLHSTETQTAGVIDRWELLQAQALSKELRMKQNLQKWQQFNSDLNSIWAWLGDTEEELEQLQRLELSTDIQTIELQIKKLKELQKAVDHRKAIILSINLCSPEFTQADSKESRDLQDRLSQMNGRWDRVCSLLEEWRGLLQDALMQCQGFHEMSHGLLLMLENIDRRKNEIVPIDSNLDAEILQDHHKQLMQIKHELLESQLRVASLQDMSCQLLVNAEGTDCLEAKEKVHVIGNRLKLLLKEVSRHIKELEKLLDVSSSQQDLSSWSSADELDTSGSVSPTSGRSTPNRQKTPRGKCSLSQPGPSVSSPHSRSTKGGSDSSLSEPGPGRSGRGFLFRVLRAALPLQLLLLLLIGLACLVPMSEEDYSCALSNNFARSFHPMLRYTNGPPPL

SEQ ID NO: 289589 - DNA, 9966 bp, Artificial Sequence
  derived and/or modified sequence
atggagctggacgccgccgtgcagaagttcctggagcagaacggccagctgggcaagcccctggccaagaagatcggcaagctgaccgagctgcaccagcagaccatcagacaggccgagaacagactgagcaagctgaaccaggccgccagccacctggaggagtacaacgagatgctggagctgatcctgaagtggatcgagaaggccaaggtgctggcccacggcaccatcgcctggaacagcgccagccagctgagagagcagtacatcctgcaccagaccctgctggaggagagcaaggagatcgacagcgagctggaggccatgaccgagaagctgcagtacctgaccagcgtgtactgcaccgagaagatgagccagcaggtggccgagctgggcagagagaccgaggagctgagacagatgatcaagatcagactgcagaacctgcaggacgccgccaaggacatgaagaagttcgaggccgagctgaagaagctgcaggccgccctggagcaggcccaggccaccctgaccagccccgaggtgggcagactgagcctgaaggagcagctgagccacagacagcacctgctgagcgagatggagagcctgaagcccaaggtgcaggccgtgcagctgtgccagagcgccctgagaatccccgaggacgtggtggccagcctgcccctgtgccacgccgccctgagactgcaggaggaggccagcagactgcagcacaccgccatccagcagtgcaacatcatgcaggccgccgtggtgcagtacgagcagtacgagcaggagatgaagcacctgcagcagctgatcgagggcgcccacagagagatcgaggacaagcccgtggccaccagcaacatccaggagctgcaggcccagatcagcagacacgaggagctggcccagaagatcaagggctaccaggagcagatcgccagcctgaacagcaagtgcaagatgctgaccatgaaggccaagcacgccaccatgctgctgaccgtgaccgaggtggagggcctggccgagggcaccgaggacctggacggcgagctgctgcccacccccagcgcccaccccagcgtggtgatgatgaccgccggcagatgccacaccctgctgagccccgtgaccgaggagagcggcgaggagggcaccaacagcgagatcagcagcccccccgcctgcagaagccccagccccgtggccaacaccgacgccagcgtgaaccaggacatcgcctactaccaggccctgagcgccgagagactgcagaccgacgccgccaagatccaccccagcaccagcgccagccaggagttctacgagcccggcctggagcccagcgccaccgccaagctgggcgacctgcagagaagctgggagaccctgaagaacgtgatcagcgagaagcagagaaccctgtacgaggccctggagagacagcagaagtaccaggacagcctgcagagcatcagcaccaagatggaggccatcgagctgaagctgagcgagagccccgagcccggcagaagccccgagagccagatggccgagcaccaggccctgatggacgagatcctgatgctgcaggacgagatcaacgagctgcagagcagcctggccgaggagctggtgagcgagagctgcgaggccgaccccgccgagcagctggccctgcagagcaccctgaccgtgctggccgagagaatgagcaccatcagaatgaaggccagcggcaagagacagctgctggaggagaagctgaacgaccagctggaggagcagagacaggagcaggccctgcagagatacagatgcgaggccgacgagctggacagctggctgctgagcaccaaggccaccctggacaccgccctgagcccccccaaggagcccatggacatggaggcccagctgatggactgccagaacatgctggtggagatcgagcagaaggtggtggccctgagcgagctgagcgtgcacaacgagaacctgctgctggagggcaaggcccacaccaaggacgaggccgagcagctggccggcaagctgagaagactgaagggcagcctgctggagctgcagagagccctgcacgacaagcagctgaacatgcagggcaccgcccaggagaaggaggagagcgacgtggacctgaccgccacccagagccccggcgtgcaggagtggctggcccaggccagaaccacctggacccagcagagacagagcagcctgcagcagcagaaggagctggagcaggagctggccgagcagaagagcctgctgagaagcgtggccagcagaggcgaggagatcctgatccagcacagcgccgccgagaccagcggcgacgccggcgagaagcccgacgtgctgagccaggagctgggcatggagggcgagaagagcagcgccgaggaccagatgagaatgaagtgggagagcctgcaccaggagttcagcaccaagcagaagctgctgcagaacgtgctggagcaggagcaggagcaggtgctgtacagcagacccaacagactgctgagcggcgtgcccctgtacaagggcgacgtgcccacccaggacaagagcgccgtgaccagcctgctggacggcctgaaccaggccttcgaggaggtgagcagccagagcggcggcgccaagagacagagcatccacctggagcagaagctgtacgacggcgtgagcgccaccagcacctggctggacgacgtggaggagagactgttcgtggccaccgccctgctgcccgaggagaccgagacctgcctgttcaaccaggagatcctggccaaggacatcaaggagatgagcgaggagatggacaagaacaagaacctgttcagccaggccttccccgagaacggcgacaacagagacgtgatcgaggacaccctgggctgcctgctgggcagactgagcctgctggacagcgtggtgaaccagagatgccaccagatgaaggagagactgcagcagatcctgaacttccagaacgacctgaaggtgctgttcaccagcctggccgacaacaagtacatcatcctgcagaagctggccaacgtgttcgagcagcccgtggccgagcagatcgaggccatccagcaggccgaggacggcctgaaggagttcgacgccggcatcatcgagctgaagagaagaggcgacaagctgcaggtggagcagcccagcatgcaggagctgagcaagctgcaggacatgtacgacgagctgatgatgatcatcggcagcagaagaagcggcctgaaccagaacctgaccctgaagagccagtacgagagagccctgcaggacctggccgacctgctggagaccggccaggagaagatggccggcgaccagaagatcatcgtgagcagcaaggaggagatccagcagctgctggacaagcacaaggagtacttccagggcctggagagccacatgatcctgaccgagaccctgttcagaaagatcatcagcttcgccgtgcagaaggagacccagttccacaccgagctgatggcccaggccagcgccgtgctgaagagagcccacaagagaggcgtggagctggagtacatcctggagacctggagccacctggacgaggaccagcaggagctgagcagacagctggaggtggtggagagcagcatccccagcgtgggcctggtggaggagaacgaggacagactgatcgacagaatcaccctgtaccagcacctgaagagcagcctgaacgagtaccagcccaagctgtaccaggtgctggacgacggcaagagactgctgatcagcatcagctgcagcgacctggagagccagctgaaccagctgggcgagtgctggctgagcaacaccaacaagatgagcaaggagctgcacagactggagaccatcctgaagcactggaccagataccagagcgagagcgccgacctgatccactggctgcagagcgccaaggacagactggagttctggacccagcagagcgtgaccgtgccccaggagctggagatggtgagagaccacctgaacgccttcctggagttcagcaaggaggtggacgcccagagcagcctgaagagcagcgtgctgagcaccggcaaccagctgctgagactgaagaaggtggacaccgccaccctgagaagcgagctgagcagaatcgacagccagtggaccgacctgctgaccaacatccccgccgtgcaggagaagctgcaccagctgcagatggacaagctgcccagcagacacgccatcagcgaggtgatgagctggatcagcctgatggagaacgtgatccagaaggacgaggacaacatcaagaacagcatcggctacaaggccatccacgagtacctgcagaagtacaagggcttcaagatcgacatcaactgcaagcagctgaccgtggacttcgtgaaccagagcgtgctgcagatcagcagccaggacgtggagagcaagagaagcgacaagaccgacttcgccgagcagctgggcgccatgaacaagagctggcagatcctgcagggcctggtgaccgagaagatccagctgctggagggcctgctggagagctggagcgagtacgagaacaacgtgcagtgcctgaagacctggttcgagacccaggagaagagactgaagcagcagcacagaatcggcgaccaggccagcgtgcagaacgccctgaaggactgccaggacctggaggacctgatcaaggccaaggagaaggaggtggagaagatcgagcagaacggcctggccctgatccagaacaagaaggaggacgtgagcagcatcgtgatgagcaccctgagagagctgggccagacctgggccaacctggaccacatggtgggccagctgaagatcctgctgaagagcgtgctggaccagtggagcagccacaaggtggccttcgacaagatcaacagctacctgatggaggccagatacagcctgagcagattcagactgctgaccggcagcctggaggccgtgcaggtgcaggtggacaacctgcagaacctgcaggacgacctggagaagcaggagagaagcctgcagaagttcggcagcatcaccaaccagctgctgaaggagtgccacccccccgtgaccgagaccctgaccaacaccctgaaggaggtgaacatgagatggaacaacctgctggaggagatcgccgagcagctgcagagcagcaaggccctgctgcagctgtggcagagatacaaggactacagcaagcagtgcgccagcaccgtgcagcagcaggaggacagaaccaacgagctgctgaaggccgccaccaacaaggacatcgccgacgacgaggtggccacctggatccaggactgcaacgacctgctgaagggcctgggcaccgtgaaggacagcctgttcttcctgcacgagctgggcgagcagctgaagcagcaggtggacgccagcgccgccagcgccatccagagcgaccagctgagcctgagccagcacctgtgcgccctggagcaggccctgtgcaagcagcagaccagcctgcaggccggcgtgctggactacgagaccttcgccaagagcctggaggccctggaggcctggatcgtggaggccgaggagatcctgcagggccaggaccccagccacagcagcgacctgagcaccatccaggagagaatggaggagctgaagggccagatgctgaagttcagcagcatggcccccgacctggacagactgaacgagctgggctacagactgcccctgaacgacaaggagatcaagagaatgcagaacctgaacagacactggagcctgatcagcagccagaccaccgagagattcagcaagctgcagagcttcctgctgcagcaccagaccttcctggagaagtgcgagacctggatggagttcctggtgcagaccgagcagaagctggccgtggagatcagcggcaactaccagcacctgctggagcagcagagagcccacgagctgttccaggccgagatgttcagcagacagcagatcctgcacagcatcatcatcgacggccagagactgctggagcagggccaggtggacgacagagacgagttcaacctgaagctgaccctgctgagcaaccagtggcagggcgtgatcagaagagcccagcagagaagaggcatcatcgacagccagatcagacagtggcagagatacagagagatggccgagaagctgagaaagtggctggtggaggtgagctacctgcccatgagcggcctgggcagcgtgcccatccccctgcagcaggccagaaccctgttcgacgaggtgcagttcaaggagaaggtgttcctgagacagcagggcagctacatcctgaccgtggaggccggcaagcagctgctgctgagcgccgacagcggcgccgaggccgccctgcaggccgagctggccgagatccaggagaagtggaagagcgccagcatgagactggaggagcagaagaagaagctggccttcctgctgaaggactgggagaagtgcgagaagggcatcgccgacagcctggagaagctgagaaccttcaagaagaagctgagccagagcctgcccgaccaccacgaggagctgcacgccgagcagatgagatgcaaggagctggagaacgccgtgggcagctggaccgacgacctgacccagctgagcctgctgaaggacaccctgagcgcctacatcagcgccgacgacatcagcatcctgaacgagagagtggagctgctgcagagacagtgggaggagctgtgccaccagctgagcctgagaagacagcagatcggcgagagactgaacgagtgggccgtgttcagcgagaagaacaaggagctgtgcgagtggctgacccagatggagagcaaggtgagccagaacggcgacatcctgatcgaggagatgatcgagaagctgaagaaggactaccaggaggagatcgccatcgcccaggagaacaagatccagctgcagcagatgggcgagagactggccaaggccagccacgagagcaaggccagcgagatcgagtacaagctgggcaaggtgaacgacagatggcagcacctgctggacctgatcgccgccagagtgaagaagctgaaggagaccctggtggccgtgcagcagctggacaagaacatgagcagcctgagaacctggctggcccacatcgagagcgagctggccaagcccatcgtgtacgacagctgcaacagcgaggagatccagagaaagctgaacgagcagcaggagctgcagagagacatcgagaagcacagcaccggcgtggccagcgtgctgaacctgtgcgaggtgctgctgcacgactgcgacgcctgcgccaccgacgccgagtgcgacagcatccagcaggccaccagaaacctggacagaagatggagaaacatctgcgccatgagcatggagagaagactgaagatcgaggagacctggagactgtggcagaagttcctggacgactacagcagattcgaggactggctgaagagcagcgagagaaccgccgccttccccagcagcagcggcgtgatctacaccgtggccaaggaggagctgaagaagttcgaggccttccagagacaggtgcacgagtgcctgacccagctggagctgatcaacaagcagtacagaagactggccagagagaacagaaccgacagcgcctgcagcctgaagcagatggtgcacgagggcaaccagagatgggacaacctgcagaagagagtgaccagcatcctgagaagactgaagcacttcatcggccagagagaggagttcgagaccgccagagacagcatcctggtgtggctgaccgagatggacctgcagctgaccaacatcgagcacttcagcgagtgcgacgtgcaggccaagatcaagcagctgaaggccttccagcaggagatcagcctgaaccacaacaagatcgagcagatcatcgcccagggcgagcagctgatcgagaagagcgagcccctggacgccgccatcatcgaggaggagctggacgagctgagaagatactgccaggaggtgttcggcagagtggagagataccacaagaagctgatcagactgcccctgcccgacgacgagcacgacctgagcgacagagagctggagctggaggacagcgccgccctgagcgacctgcactggcacgacagaagcgccgacagcctgctgagcccccagcccagcagcaacctgagcctgagcctggcccagcccctgagaagcgagagaagcggcagagacacccccgccagcgtggacagcatccccctggagtgggaccacgactacgacctgagcagagacctggagagcgccatgagcagagccctgcccagcgaggacgaggagggccaggacgacaaggacttctacctgagaggcgccgtgggcctgagcggcgaccacagcgccctggagagccagatcagacagctgggcaaggccctggacgacagcagattccagatccagcagaccgagaacatcatcagaagcaagacccccaccggccccgagctggacaccagctacaagggctacatgaagctgctgggcgagtgcagcagcagcatcgacagcgtgaagagactggagcacaagctgaaggaggaggaggagagcctgcccggcttcgtgaacctgcacagcaccgagacccagaccgccggcgtgatcgacagatgggagctgctgcaggcccaggccctgagcaaggagctgagaatgaagcagaacctgcagaagtggcagcagttcaacagcgacctgaacagcatctgggcctggctgggcgacaccgaggaggagctggagcagctgcagagactggagctgagcaccgacatccagaccatcgagctgcagatcaagaagctgaaggagctgcagaaggccgtggaccacagaaaggccatcatcctgagcatcaacctgtgcagccccgagttcacccaggccgacagcaaggagagcagagacctgcaggacagactgagccagatgaacggcagatgggacagagtgtgcagcctgctggaggagtggagaggcctgctgcaggacgccctgatgcagtgccagggcttccacgagatgagccacggcctgctgctgatgctggagaacatcgacagaagaaagaacgagatcgtgcccatcgacagcaacctggacgccgagatcctgcaggaccaccacaagcagctgatgcagatcaagcacgagctgctggagagccagctgagagtggccagcctgcaggacatgagctgccagctgctggtgaacgccgagggcaccgactgcctggaggccaaggagaaggtgcacgtgatcggcaacagactgaagctgctgctgaaggaggtgagcagacacatcaaggagctggagaagctgctggacgtgagcagcagccagcaggacctgagcagctggagcagcgccgacgagctggacaccagcggcagcgtgagccccaccagcggcagaagcacccccaacagacagaagacccccagaggcaagtgcagcctgagccagcccggccccagcgtgagcagcccccacagcagaagcaccaagggcggcagcgacagcagcctgagcgagcccggccccggcagaagcggcagaggcttcctgttcagagtgctgagagccgccctgcccctgcagctgctgctgctgctgctgatcggcctggcctgcctggtgcccatgagcgaggaggactacagctgcgccctgagcaacaacttcgccagaagcttccaccccatgctgagatacaccaacggccccccccccctgtag

SEQ ID NO: 289590 - DNA, 2859 bp, Artificial Sequence
  derived and/or modified sequence
atggtggtggccgaggacctgagcgccctgagaatggccgaggacagctgcgtggacgccgacctgcccgactgcaactgcgacgtgaccagagtgaagaagctgaaggagaccctggtggccgtgcagcagctggacaagaacatgagcagcctgagaacctggctggcccacatcgagagcgagctggccaagcccatcgtgtacgacagctgcaacagcgaggagatccagagaaagctgaacgagcagcaggagctgcagagagacatcgagaagcacagcaccggcgtggccagcgtgctgaacctgtgcgaggtgctgctgcacgactgcgacgcctgcgccaccgacgccgagtgcgacagcatccagcaggccaccagaaacctggacagaagatggagaaacatctgcgccatgagcatggagagaagactgaagatcgaggagacctggagactgtggcagaagttcctggacgactacagcagattcgaggactggctgaagagcagcgagagaaccgccgccttccccagcagcagcggcgtgatctacaccgtggccaaggaggagctgaagaagttcgaggccttccagagacaggtgcacgagtgcctgacccagctggagctgatcaacaagcagtacagaagactggccagagagaacagaaccgacagcgcctgcagcctgaagcagatggtgcacgagggcaaccagagatgggacaacctgcagaagagagtgaccagcatcctgagaagactgaagcacttcatcggccagagagaggagttcgagaccgccagagacagcatcctggtgtggctgaccgagatggacctgcagctgaccaacatcgagcacttcagcgagtgcgacgtgcaggccaagatcaagcagctgaaggccttccagcaggagatcagcctgaaccacaacaagatcgagcagatcatcgcccagggcgagcagctgatcgagaagagcgagcccctggacgccgccatcatcgaggaggagctggacgagctgagaagatactgccaggaggtgttcggcagagtggagagataccacaagaagctgatcagactgcccctgcccgacgacgagcacgacctgagcgacagagagctggagctggaggacagcgccgccctgagcgacctgcactggcacgacagaagcgccgacagcctgctgagcccccagcccagcagcaacctgagcctgagcctggcccagcccctgagaagcgagagaagcggcagagacacccccgccagcgtggacagcatccccctggagtgggaccacgactacgacctgagcagagacctggagagcgccatgagcagagccctgcccagcgaggacgaggagggccaggacgacaaggacttctacctgagaggcgccgtgggcctgagcggcgaccacagcgccctggagagccagatcagacagctgggcaaggccctggacgacagcagattccagatccagcagaccgagaacatcatcagaagcaagacccccaccggccccgagctggacaccagctacaagggctacatgaagctgctgggcgagtgcagcagcagcatcgacagcgtgaagagactggagcacaagctgaaggaggaggaggagagcctgcccggcttcgtgaacctgcacagcaccgagacccagaccgccggcgtgatcgacagatgggagctgctgcaggcccaggccctgagcaaggagctgagaatgaagcagaacctgcagaagtggcagcagttcaacagcgacctgaacagcatctgggcctggctgggcgacaccgaggaggagctggagcagctgcagagactggagctgagcaccgacatccagaccatcgagctgcagatcaagaagctgaaggagctgcagaaggccgtggaccacagaaaggccatcatcctgagcatcaacctgtgcagccccgagttcacccaggccgacagcaaggagagcagagacctgcaggacagactgagccagatgaacggcagatgggacagagtgtgcagcctgctggaggagtggagaggcctgctgcaggacgccctgatgcagtgccagggcttccacgagatgagccacggcctgctgctgatgctggagaacatcgacagaagaaagaacgagatcgtgcccatcgacagcaacctggacgccgagatcctgcaggaccaccacaagcagctgatgcagatcaagcacgagctgctggagagccagctgagagtggccagcctgcaggacatgagctgccagctgctggtgaacgccgagggcaccgactgcctggaggccaaggagaaggtgcacgtgatcggcaacagactgaagctgctgctgaaggaggtgagcagacacatcaaggagctggagaagctgctggacgtgagcagcagccagcaggacctgagcagctggagcagcgccgacgagctggacaccagcggcagcgtgagccccaccagcggcagaagcacccccaacagacagaagacccccagaggcaagtgcagcctgagccagcccggccccagcgtgagcagcccccacagcagaagcaccaagggcggcagcgacagcagcctgagcgagcccggccccggcagaagcggcagaggcttcctgttcagagtgctgagagccgccctgcccctgcagctgctgctgctgctgctgatcggcctggcctgcctggtgcccatgagcgaggaggactacagctgcgccctgagcaacaacttcgccagaagcttccaccccatgctgagatacaccaacggccccccccccctgtag

SEQ ID NO: 289591 - DNA, 9966 bp, Artificial Sequence
  derived and/or modified sequence
atggaattggatgccgccgtccaaaaatttctggagcagaacggtcagttaggcaaacccctggccaaaaagatcggcaagctgacagagctgcaccagcagactatccgacaggccgaaaacaggctcagcaagttaaatcaggcagctagtcatctggaggagtataatgagatgttagagctgatccttaagtggatcgaaaaggcaaaggtgctggctcacggcaccatcgcatggaactcggcatcacagctacgggagcagtacattcttcatcagactctcctggaagagtctaaagagattgactccgaattggaggctatgactgagaagctgcagtatttgacttcagtgtattgcaccgagaaaatgtcgcagcaggtggcagaattgggaagggagaccgaggaactccggcagatgatcaaaatcagactacagaacctccaggatgcagcaaaggatatgaagaagttcgaagccgagctgaaaaagttgcaagcggcgctggagcaggcccaggctactctcacctcccccgaggtcgggcggttatcacttaaggagcaactctctcatcgacagcacctgttgtctgagatggagagccttaaacccaaagttcaggccgtgcagctatgccagtcagccctgaggattcccgaggatgtggtcgccagcctcccactttgccacgctgccttaagactgcaggaagaggccagccggttacaacatacagctatccagcagtgcaacattatgcaggccgcggtcgtgcagtacgagcagtacgagcaggaaatgaaacatctgcaacagctgattgaaggtgcccatcgggaaatcgaggacaaaccagttgcaaccagcaacattcaggaactgcaagcccagatttcacgtcatgaggagcttgctcaaaagataaaggggtatcaagaacagatcgccagcctaaactccaagtgtaaaatgcttacaatgaaagccaaacacgcgaccatgctcttgaccgtcactgaggtggaaggactcgctgaagggaccgaggatctggacggcgagctgctgcctactccgtcagcccatcccagcgtggtgatgatgaccgctggccggtgtcacaccctgctctctcctgtgacagaggaaagtggcgaagagggcaccaacagtgaaattagctctccccctgcctgcaggtcgccatcccctgtggcaaataccgatgcgtctgtgaatcaagacatcgcatactaccaggcactgtcggctgagcggctccagactgatgccgctaaaattcacccctcaacgtctgcttcccaagaattctacgaacctggcctggaaccatctgctaccgccaagctcggggaccttcagcggagctgggaaaccctgaaaaatgtgatcagtgaaaagcagcggacactgtacgaagctcttgagcgtcaacagaagtaccaggattcgctccagagcatatcaacgaagatggaagccattgagcttaagttgagcgaaagccccgagccaggaaggtcccctgaatcacaaatggccgagcatcaggcactcatggacgagatcctgatgctacaggatgaaatcaatgaactgcagtcttctctggcagaggagctggtttccgaatcgtgcgaggccgaccccgctgaacaattggccctccagagcacgttaacggtgctcgctgagaggatgtcgacaattcgaatgaaggcttcgggtaagaggcaactcctggaagagaaattgaacgatcagcttgaagaacagcgccaagagcaggctctacagcggtaccgctgcgaggccgatgagttagattcatggctcctttcaactaaagctaccctcgataccgctttgtcccctccaaaagagcctatggatatggaagcccagctgatggactgtcagaacatgctagtggagatcgaacagaaagtggtcgctctctccgaactgagtgtccacaatgaaaacctcttactggagggcaaggcgcacacaaaagacgaggccgagcagctggccggaaagttaaggcgcctgaaaggcagcctattagagctgcagagagccctacacgacaagcagcttaatatgcagggtacagcccaggagaaagaagagagcgatgtagacctaactgcaactcaatctcccggggttcaagagtggctagctcaggctcgcacgacctggacccagcagcggcagagttcattgcagcagcaaaaggagctggaacaggagctcgccgagcagaagagcctcctgaggagtgtggcatctcggggtgaggaaatactcattcagcacagtgcggcagagacgtccggcgatgccggggagaaacctgatgtactctcccaggaactgggcatggagggggagaagagctccgctgaggaccagatgaggatgaaatgggagagtttgcaccaagaattttctacaaagcagaagctgctccagaatgtcctcgaacaagagcaagagcaagtgctgtattcaaggcccaaccgcctgttgtcaggggttccactatacaagggagatgttcccacccaggataagagtgccgttacatctctgctggacggacttaatcaagcattcgaggaagtctcgagccagtcaggcggagccaagcggcagagcattcatcttgagcaaaaattatacgacggcgtgagcgcaacctcaacttggctcgacgacgtggaagagaggcttttcgtcgcaactgccctcctcccagaggagaccgagacgtgcctcttcaaccaagaaatcctggccaaagacattaaagagatgagcgaggagatggacaagaacaaaaacctcttcagtcaggcatttcctgaaaatggcgacaatagggacgtgatcgaggataccctgggctgcctgctcggacggctgtccttgctggacagcgtggtgaaccagagatgtcaccagatgaaagagcggctgcagcagattctaaattttcagaatgatcttaaggtactgttcacgtccctcgccgacaataaatatataatcctccagaaactggccaacgtattcgagcagcctgtcgcggaacagatcgaagctattcagcaagccgaggatggcctgaaagaatttgatgccgggattattgaacttaaacgaagaggcgataaacttcaggtggagcagccttccatgcaggagttatctaaacttcaggacatgtatgacgaactcatgatgatcatcgggtcccgccgctcaggactcaaccagaacctgaccctcaaatcccagtatgagagggccttacaggatctggctgacttgctcgaaactggccaggagaagatggccggagaccaaaaaatcatagtctcatcaaaagaggagattcagcagctgttagacaagcacaaggaatatttccagggacttgaaagtcatatgatcttaacagagacactgtttcgcaagattatcagtttcgctgtgcagaaagaaacccagtttcatactgagctcatggcgcaggctagcgccgttctaaaacgggcccacaagcggggcgtcgagctggagtacatcctagagacatggtcacacctggacgaggaccagcaagagttaagcaggcagctggaagtggtggagagcagtatcccgtctgtggggctagtggaggaaaacgaggacagactcatagacaggattaccctgtaccagcatttgaagagctcattgaacgagtaccaacctaagttgtatcaggtgctggatgacggaaagcgcctgctcataagcatctcttgcagtgatctcgagagtcagcttaatcagttgggggaatgctggttaagtaatactaacaagatgagtaaagagttgcatagactggagaccattttaaagcattggaccagataccaaagcgagtcagccgatctgattcactggctccagagtgcaaaagaccggttggaattttggactcagcagagcgttacagtgccccaggaactggagatggtgcgtgaccacttaaatgcattcctcgaattttctaaagaggtagacgctcagtcctctcttaagagttctgtcttatccactggcaatcaactcttgaggctcaaaaaagtggacactgcgaccctccgatccgaattgtcccgaatcgactcccaatggaccgatctgcttactaatatccctgctgttcaggagaagcttcatcagttacagatggacaaactcccaagcaggcatgcgatcagtgaagtgatgtcatggatttcactgatggaaaacgtaattcagaaggacgaggacaacattaaaaatagtatcgggtacaaagcaattcacgagtacttgcagaagtacaagggattcaagattgacattaattgcaaacagctgacggtggacttcgtgaatcagtctgtcctgcagatatccagccaggacgtcgagagcaaaagaagtgacaagaccgatttcgccgagcaactgggcgcgatgaacaaaagctggcagatcctccaaggtctcgtcacggagaagatccagcttttggaaggtctgctcgagtcatggtcagaatacgagaataatgttcagtgcctgaaaacctggttcgagacccaggaaaaacgcctcaagcagcagcatagaatcggggatcaagcctcagttcagaacgctttgaaagattgccaagacctggaagacttaatcaaggcaaaagaaaaggaagtagaaaaaatcgaacagaatggcctcgcccttattcagaacaagaaggaagatgtctccagtatcgtgatgagcacactccgagaacttgggcaaacctgggcgaacttggatcacatggtcggccaattgaagattctcctgaaaagcgtgttagatcagtggtcaagtcataaggtggcctttgataaaattaacagttaccttatggaagctcggtactctctgagccggttccgacttctgacaggtagtctggaggctgtgcaggtccaggtagacaacttgcagaacctccaggacgatctggagaagcaggaacgctctctccagaagtttggctcaataacaaaccagctgctgaaagagtgtcatccccctgtcaccgaaacactcacaaacacactgaaagaggttaatatgagatggaataatttgctcgaggaaattgccgagcagttacagagttcgaaagctctgttgcagctctggcagcggtataaagattattcaaagcagtgcgcctcaacagttcagcagcaggaagacaggactaacgaactgctgaaagctgccaccaataaagatatcgccgacgacgaggtggccacctggatacaggactgcaacgatctgctaaagggtctcggaaccgtcaaggattcactctttttcctgcatgagctcggagagcagctgaagcagcaggtggatgcttccgctgcgtcagcaatccagtctgaccagctctctttgtcacaacacctgtgtgcactggaacaggcactgtgtaagcagcaaaccagtctgcaagccggagtccttgactacgagaccttcgctaagagcttagaggcgctagaggcttggatagttgaagctgaagagatcctgcagggacaagatccctctcattccagtgacctctccactatacaagagcggatggaggaactcaaaggtcaaatgctcaagtttagctccatggctcccgacttggatagattaaatgaattaggctataggctacccctcaacgacaaagagatcaaaagaatgcagaatctgaacagacattggtctctgataagctcccagactaccgaaaggttctccaagttacaatcattcctactgcagcaccagacctttctcgagaaatgtgaaacctggatggaatttctcgtccagacagaacagaagttggcggttgaaatatcgggcaactaccagcatttgcttgaacaacagagagcccatgagctctttcaggccgagatgtttagccgtcagcagatcctgcatagtataattatcgatggacagcggctgttggagcagggacaggtggatgatagagatgaattcaaccttaagctgaccctgctatcaaaccagtggcaaggcgttatcaggcgagcacaacagaggcggggaatcatagattcccagatcagacagtggcaacgctatagagaaatggccgagaagttgcggaagtggctggttgaagtgtcctacttacccatgagcggccttggctctgtgcccatcccgttgcagcaagcaaggacattgtttgatgaagtgcagtttaaagagaaagtctttctgcgacagcagggatcctatatcttgaccgtggaggcaggtaaacagctgctgctcagtgctgactcaggtgctgaggctgctttacaggccgagttggcagaaattcaagaaaaatggaagtccgcttccatgcgactggaggaacaaaagaaaaagctcgctttcctcctgaaagactgggagaagtgtgagaaggggatcgccgacagcctcgagaaactaaggacctttaaaaagaaacttagccagagcttgcctgatcaccacgaggagctgcacgcggagcagatgcgctgtaaggagttagagaacgcagtcggatcatggaccgatgatttgacgcagctttctctcctcaaagatactttatctgcctacatcagtgctgatgatatatcgattttaaacgaacgcgtggagctgctgcagaggcagtgggaggaactatgccaccagctgtccctcagaaggcagcagatcggagaacggctcaacgagtgggctgttttctccgaaaagaataaggagttgtgtgaatggttgacccagatggagtctaaggtgagccagaacggcgacatcttgattgaagagatgattgaaaagttgaaaaaggattatcaagaggagatcgcaatagcccaggagaataaaatccagctccagcaaatgggcgaaagattagccaaggcgagccatgaatctaaggcctcagaaattgaatacaaattgggcaaggttaacgacaggtggcagcacctgctggacctgattgctgcccgcgtgaaaaagctgaaagagacgctagtggctgtgcagcaactggacaagaacatgagctccctaagaacatggcttgcacacatagaaagtgagcttgccaaaccaatcgtttatgacagctgcaatagcgaggagatccagcgcaaattaaatgaacagcaggagctgcaacgcgatattgaaaagcattccactggagttgctagcgtgctcaatttgtgcgaggttctactccacgactgtgatgcctgcgcaaccgatgcagaatgtgactcgatccagcaggcgaccagaaacttggacaggcggtggcgtaacatctgcgctatgagcatggaaagacgcttgaagatagaggagacgtggcggttgtggcagaagttcctggatgattactcaaggtttgaagactggctgaaatcatctgaaagaactgctgcattcccctccagcagtggcgtgatttacacggttgctaaggaggagctcaaaaagtttgaggccttccaaagacaggtgcatgagtgtctgacccagctggagttgattaataagcagtatagaagactggcgcgagagaatcgaacggacagtgcctgttccttgaaacagatggtgcacgaagggaatcagcgctgggataacctgcagaaacgagtgactagcatcctgcggcgtctgaagcatttcattggacaaagagaagagtttgagacagcacgggactccatcctggtatggctcactgaaatggacctccagttaactaacatcgaacatttttcagaatgtgatgtgcaggctaagataaaacagctcaaggctttccagcaggagatcagtctgaaccacaataaaatagaacagattatcgcacagggggagcaattgattgaaaaaagcgagcccctcgatgccgctattatcgaagaggaattggatgagctcagacgctattgtcaagaagtgtttgggcgcgtggaaagataccataaaaaacttattcggttaccactgccagacgacgaacacgacctctcggaccgtgagctggagcttgaagacagtgccgccctgtccgacctgcattggcacgataggagcgccgattctttgctgtcccctcagccctccagtaatctgagcctgtccttagcgcagccactgaggtctgagcgatctggtagggatacccccgcatctgtggactccattccattggagtgggaccacgattacgacctgtcacgggacctggagtctgctatgagccgcgccttaccatcggaagatgaggagggtcaagacgacaaggacttctacctgcggggggccgttggactgtcgggagatcattccgccctcgaaagtcaaatacgccagctcggcaaggcgctggatgactcccgcttccagatacagcagacggagaatatcattcgatcaaaaactccaacgggcccagaactggatacgtcatacaagggatacatgaaactgttaggtgaatgctcatcctctattgattctgtaaaacggctcgaacataaactgaaagaagaagaggaaagcttaccagggttcgtgaacttgcacagcaccgaaacgcaaacagccggagtgatagaccggtgggagttgctccaagcacaggctctcagcaaggagctgcgcatgaaacaaaatctgcagaagtggcaacagttcaatagcgacctgaactctatctgggcttggctcggtgataccgaggaggagctggaacagctgcagcgattggagctgagcacggatatacagaccatcgagctccagataaagaaactaaaagagttacagaaggcggtcgaccatcgcaaagccatcatcttgtccataaatttgtgttcaccagagtttacgcaggccgactcgaaagagtcccgggacttgcaggataggctgtctcagatgaacgggagatgggacagagtgtgctctttgctcgaagagtggaggggacttctgcaggacgcccttatgcaatgccaaggatttcacgaaatgtcacacggactcctgctgatgcttgagaacatagatcgtagaaagaatgagatcgtgccgatcgactctaacctggatgcagaaatcctgcaggaccatcataagcagctgatgcaaataaagcatgagctgcttgagtctcaactgagagtggctagcctacaggatatgtcttgtcagctcctcgtgaatgcagaggggactgattgtctggaagctaaggagaaggtacacgtcatcggaaacaggctgaagctactcctgaaggaggtctctagacacatcaaggagttagaaaagctgctcgatgtcagcagttcccagcaagaccttagcagctggagtagcgccgatgaattggacacttcgggaagtgtaagtcccaccagcggccgtagtacccctaatcgacagaagacaccccgtggcaagtgcagtctgagtcaacctgggccttctgtttcatccccgcacagcagatctactaagggagggtccgactcaagcctgtcggagcctggcccgggcagatcagggaggggctttctgttccgcgtgttgcgcgctgccctccccctacaactgctgctgttgctgctcatcggtttagcgtgtctcgtgcctatgtccgaagaggactattcttgcgctctgtcaaataacttcgccaggagcttccatcccatgcttaggtacactaatgggccgcctcctctgtag

SEQ ID NO: 289592 - DNA, 2859 bp, Artificial Sequence
  derived and/or modified sequence
atggtcgtggccgaagacctgtcagcactgcgcatggcagaggactcctgcgtggatgccgacctgccagactgcaactgcgatgtaacccgcgttaaaaaactgaaggagaccctggtcgcagtacagcagctcgacaagaacatgtcatctttgagaacgtggttagctcatattgaatccgagctggccaagccaatcgtctatgacagttgcaactctgaagagatccagagaaagttaaatgagcagcaggaactccagcgcgatatcgagaagcactctacaggagttgccagtgttcttaatctctgtgaggtattgctgcatgattgcgatgcttgtgccactgatgccgagtgtgactcaattcaacaggcgacgcgcaatctggatcggcggtggcgaaacatctgtgccatgtcaatggagcggcgtctgaaaatcgaggaaacctggcgcctctggcagaaattccttgatgattactctcgattcgaagattggctcaaaagttctgagcggacggctgcctttccctcttctagtggtgtcatttacactgtggcaaaggaggagctgaaaaagtttgaagcttttcagaggcaagtgcatgaatgtcttacacagttggagcttattaacaagcagtaccggcggttagccagagagaaccgtactgacagtgcttgttcactgaagcaaatggtccacgagggaaatcagaggtgggataacctgcaaaagagagttacgagtattttgcggcggctgaaacactttatcggacagagagaagaattcgaaacagcacgggactctatcctggtctggttgactgagatggacctacaactcaccaacattgagcatttttcggaatgtgatgtgcaggcaaaaattaagcagttaaaggctttccagcaagagatcagcttgaatcacaataaaattgagcagatcatcgctcagggggagcagcttatcgaaaagagcgagcccctagacgcagccattattgaagaggagcttgatgaactgcggcgttactgtcaggaggtgttcggtcgtgttgaaaggtaccataagaaactgatcaggcttccgctaccagacgacgagcatgacctttctgaccgggagctcgagcttgaagacagcgccgccttatccgatttgcactggcatgatcggagcgctgattcccttctaagcccccagccgtcttccaatcttagcctgtctctggcccagccgttgcggtccgagagaagcggaagggacacaccagcaagcgtcgatagtatccccctggagtgggaccacgattacgatttgtcccgcgatctggagagtgcaatgtctagagccctccccagtgaggatgaggaggggcaggatgataaagacttttacctccgcggtgccgttggactgtccggagatcactctgcccttgagtctcagatccgccaactgggaaaagccctcgatgactcaaggtttcagatccaacagactgagaatattatccgttctaagactccgacgggacccgaactggacacctcttataagggctatatgaaattactcggggaatgctccagcagtatagacagtgttaaacgactagaacataagttgaaagaggaggaggaatccctcccggggtttgtcaacctgcattcgaccgaaacccagacagcaggagtgattgatcggtgggaattattgcaggcccaagcactgtcaaaggagctaaggatgaaacaaaacctgcagaaatggcagcaatttaattcagatttaaattcaatctgggcctggctgggcgatactgaggaagagctcgaacagctccagcgcctcgaattgtcaaccgatattcagactatagagctccaaatcaaaaaactgaaggaactgcagaaagccgtcgatcataggaaggccataatcctgtcaatcaacctttgctcaccagaattcacgcaggcagattcaaaagagagccgggatttacaggaccgcctcagtcagatgaacggccgttgggaccgcgtgtgctctctccttgaagagtggaggggtttattacaggacgcattgatgcagtgtcagggtttccacgaaatgagtcacggtctactgctgatgctggagaatatcgatagaagaaaaaatgaaatcgtgcctatcgatagcaaccttgatgctgagatcctgcaggaccaccacaagcagctgatgcagattaagcatgagctactggagtcacagctgcgtgtagccagcctgcaggatatgtcatgccagctgctggtcaatgcagagggaactgactgtcttgaggccaaagaaaaggtgcatgtaataggcaaccgactgaagctgcttctgaaagaggtgtctaggcatattaaggagctcgagaagctgttggacgtgagcagttcccagcaggatctgtcttcttggtcgagtgccgacgagttagacacatcaggaagtgtgtcccctacaagtggccgaagcacccctaaccgccagaaaactcccaggggtaagtgttccctcagccagcctggtcctagtgtttcatccccacactcacggagcacgaagggcggcagtgacagctccttgtcagagccaggacctggaaggtccggccggggctttctgtttcgagtcttgagggccgcactgcctctgcagttgctcctccttcttctaataggcctggcctgcctcgttcctatgtctgaggaggactatagctgcgccctgtccaataacttcgctcgcagctttcacccgatgctgaggtacacaaacggtccgccgccactgtag

SEQ ID NO: 289593 - DNA, 9966 bp, Artificial Sequence
  derived and/or modified sequence
atggagctggatgctgctgtgcagaagttcctggagcagaatggccagctgggcaagcccctggccaagaagattggcaagctgacagagctgcaccagcagaccatccggcaggccgagaaccggctgagcaagctgaaccaggccgccagccacctggaggagtacaatgagatgctggagctgatcctgaagtggattgagaaggccaaggtgctggcccacggcaccatcgcctggaacagcgccagccagctgcgggagcagtacatcctgcaccagaccctgctggaggagagcaaggagattgattctgagctggaggccatgacagagaagctgcagtacctgacctctgtgtactgcacagagaagatgagccagcaggtggccgagctgggccgggagacagaggagctgcggcagatgatcaagatccggctgcagaacctgcaggatgctgccaaggacatgaagaagtttgaagctgagctgaagaagctgcaggccgccctggagcaggcccaggccaccctgaccagccctgaggtgggccgcctgagcctgaaggagcagctgagccaccggcagcacctgctgtctgagatggagagcctgaagcccaaggtgcaggccgtgcagctgtgccagagcgccctgcgcatcccagaagatgtggtggccagcctgcccctgtgccacgccgccctgcggctgcaggaggaggccagccggctgcagcacacagccatccagcagtgcaacatcatgcaggccgctgtggtgcagtatgagcagtatgagcaggagatgaagcacctgcagcagctgattgagggcgcccaccgggagattgaggacaagcctgtggccaccagcaacatccaggagctgcaggcccagatcagcagacatgaggagctggcccagaagatcaagggctaccaggagcagatcgccagcctgaacagcaagtgcaagatgctgaccatgaaggccaagcacgccaccatgctgctgactgtgacagaggtggagggcctggccgagggcacagaggacctggatggagagctgctgcccacccccagcgcccaccccagcgtggtgatgatgacagctggccgctgccacaccctgctgagccctgtgacagaggagagcggggaggagggcaccaacagcgagatcagcagccccccagcctgccgcagccccagccctgtggccaacacagatgcctctgtgaaccaggacatcgcctactaccaggccctgtctgctgagcggctgcagacagatgctgccaagatccaccccagcaccagcgccagccaggagttctatgagcccggcctggagcccagcgccacagccaagctgggggacctgcagaggtcctgggagaccctgaagaatgtcatcagcgagaagcagaggaccctgtatgaggccctggagcggcagcagaagtaccaggacagcctgcagagcatcagcaccaagatggaggccatcgagctgaagctgtctgagagccctgagcccggccgcagccctgagagccagatggccgagcaccaggccctgatggatgagatcctgatgctgcaggatgagatcaatgagctgcagagcagcctggccgaggagctggtgtctgagagctgtgaggccgaccctgctgagcagctggccctgcagagcaccctgactgtgctggccgagaggatgagcaccatccgcatgaaggccagcggcaagaggcagctgctggaggagaagctgaatgaccagctggaggagcagaggcaggagcaggccctgcagcgctaccgctgtgaggctgatgagctggacagctggctgctgagcaccaaggccaccctggacacagccctgagcccccccaaggagcccatggacatggaggcccagctgatggactgccagaacatgctggtggagattgagcagaaggtggtggccctgtctgagctgtctgtgcacaatgaaaacctgctgctggagggcaaggcccacaccaaggatgaggccgagcagctggccggcaagctgcggcggctgaagggcagcctgctggagctgcagagggccctgcatgacaagcagctgaacatgcagggcacagcccaggagaaggaggagagtgatgtggacctgacagccacccagagccctggggtgcaggagtggctggcccaggcccggaccacctggacccagcagaggcagagcagcctgcagcagcagaaggagctggagcaggagctggccgagcagaagagcctgctgcggtctgtggccagcagaggagaggagatcctgatccagcacagcgctgctgagaccagcggagatgctggggagaagccagatgtgctgagccaggagctgggcatggagggggagaagagcagcgctgaggaccagatgaggatgaagtgggagagcctgcaccaggagttcagcaccaagcagaagctgctgcagaatgtgctggagcaggagcaggagcaggtgctgtacagccggcccaaccggctgctgagcggcgtgcccctgtacaagggagatgtgcccacccaggacaagtctgctgtgaccagcctgctggatggcctgaaccaggcctttgaggaggtgagcagccagagcggcggggccaagaggcagagcatccacctggagcagaagctgtatgatggagtgtctgccaccagcacctggctggatgatgtggaggagcggctgtttgtggccacagccctgctgcctgaggagacagagacctgcctcttcaaccaggagatcctggccaaggacatcaaggagatgtctgaggagatggacaagaacaagaacctcttcagccaggccttcccagaaaatggagacaacagagatgtgattgaggacaccctgggctgcctgctgggccgcctgagcctgctggacagcgtggtgaaccagcgctgccaccagatgaaggagcggctgcagcagatcctgaacttccagaatgacctgaaggtgctcttcaccagcctggccgacaacaagtacatcatcctgcagaagctggccaacgtgtttgagcagcctgtggccgagcagatcgaggccatccagcaggccgaggatggcctgaaggagtttgatgctggcatcatcgagctgaagagaagaggagacaagctgcaggtggagcagcccagcatgcaggagctgagcaagctgcaggacatgtatgatgagctgatgatgatcatcggcagcagaagaagtggcctgaaccagaacctgaccctgaagagccagtatgagcgggccctgcaggacctggccgacctgctggagaccggccaggagaagatggccggggaccagaagatcatcgtgagcagcaaggaggagatccagcagctgctggacaagcacaaggagtacttccagggcctggagagccacatgatcctgacagagaccctcttcaggaagatcatcagctttgctgtgcagaaggagacccagttccacacagagctgatggcccaggccagcgctgtgctgaagagggcccacaagaggggcgtggagctggagtacatcctggagacctggagccacctggatgaggaccagcaggagctgagccggcagctggaggtggtggagagcagcatccccagcgtgggcctggtggaggagaatgaagatcggctgattgaccgcatcaccctgtaccagcacctgaagagcagcctgaatgagtaccagcccaagctgtaccaggtgctggatgatggcaagaggctgctgatcagcatcagctgcagcgacctggagagccagctgaaccagctgggggagtgctggctgagcaacaccaacaagatgagcaaggagctgcaccggctggagaccatcctgaagcactggacccgctaccagagcgagagcgctgacctgatccactggctgcagagcgccaaggaccggctggagttctggacccagcagagcgtgacagtgccccaggagctggagatggtgcgggaccacctgaatgccttcctggagttcagcaaggaggtggatgcccagagcagcctgaagagctctgtgctgagcacaggcaaccagctgctgcggctgaagaaggtggacacagccaccctgcggtctgagctgagcagaattgacagccagtggacagacctgctgaccaacatcccagctgtgcaggagaagctgcaccagctgcagatggacaagctgcccagcagacatgccatcagcgaggtgatgtcctggatcagcctgatggagaatgtcatccagaaggatgaggacaacatcaagaacagcatcggctacaaggccatccacgagtacctgcagaagtacaagggcttcaagattgacatcaactgcaagcagctgactgtggactttgtgaaccagagcgtgctgcagatcagcagccaggatgtggagagcaagagaagtgacaagacagactttgctgagcagctgggcgccatgaacaagtcctggcagatcctgcagggcctggtgacagagaagatccagctgctggagggcctgctggagagctggagcgaatatgagaacaacgtgcagtgcctgaagacctggtttgagacccaggagaagaggctgaagcagcagcacagaattggagaccaggcctctgtgcagaatgccctgaaggactgccaggacctggaggacctgatcaaggccaaggagaaggaggtggagaagattgagcagaatggcctggccctgatccagaacaagaaggaggatgtgagcagcatcgtgatgagcaccctgcgggagctgggccagacctgggccaacctggaccacatggtgggccagctgaagatcctgctgaagtctgtgctggaccagtggagcagccacaaggtggcctttgacaagatcaacagctacctgatggaggcccgctacagcctgagccgcttccggctgctgaccggcagcctggaggccgtgcaggtgcaggtggacaacctgcagaacctgcaggatgacctggagaagcaggagaggagcctgcagaagtttggcagcatcaccaaccagctgctgaaggagtgccacccccctgtgacagagaccctgaccaacaccctgaaggaggtgaacatgcgctggaacaacctgctggaggagattgctgagcagctgcagagcagcaaggccctgctgcagctgtggcagcgctacaaggactacagcaagcagtgtgccagcacagtgcagcagcaggaggacaggaccaatgagctgctgaaggccgccaccaacaaggacattgctgatgatgaggtggccacctggatccaggactgcaatgacctgctgaagggcctgggcaccgtgaaggacagcctcttcttcctgcacgagctgggggagcagctgaagcagcaggtggatgccagcgctgccagcgccatccagagcgaccagctgagcctgagccagcacctgtgtgccctggagcaggccctgtgcaagcagcagaccagcctgcaggccggcgtgctggactatgagacctttgccaagagcctggaggccctggaggcctggatcgtggaggccgaggagatcctgcagggccaggaccccagccacagcagtgacctgagcaccatccaggagaggatggaggagctgaagggccagatgctgaagttcagctccatggccccagacctggaccggctgaatgagctgggctaccgcctgcccctgaatgacaaggagatcaagaggatgcagaacctgaacagacactggagcctcatcagcagccagaccacagagcgcttcagcaagctgcagagcttcctgctgcagcaccagaccttcctggagaagtgtgagacctggatggagttcctggtgcagacagagcagaagctggccgtggagatcagcggcaactaccagcacctgctggagcagcagagggcccacgagctgttccaggccgagatgttcagccggcagcagatcctgcacagcatcatcattgatggccagaggctgctggagcagggccaggtggatgacagagatgagttcaacctgaagctgaccctgctgagcaaccagtggcagggcgtcatcagaagagcccagcagaggcggggcatcatcgacagccagatccggcagtggcagcgctaccgggagatggccgagaagctgaggaagtggctggtggaggtgtcctacctgcccatgagcggcctgggctctgtgcccatccccctgcagcaggcccggaccctgtttgatgaggtgcagttcaaggagaaggtgttcctgcggcagcagggcagctacatcctgactgtggaggccggcaagcagctgctgctgtctgctgacagcggggctgaggccgccctgcaggccgagctggccgagatccaggagaagtggaagagcgcctccatgaggctggaggagcagaagaagaagctggccttcctgctgaaggactgggagaagtgtgagaagggcattgctgacagcctggagaagctgcggaccttcaagaagaagctgagccagagcctgcctgaccaccacgaggagctgcatgctgagcagatgcgctgcaaggagctggagaatgctgtgggctcctggacagatgacctgacccagctgagcctgctgaaggacaccctgagcgcctacatctctgcagatgacatcagcatcctgaatgaaagagtggagctgctgcagaggcagtgggaggagctgtgccaccagctgagcctgcggcggcagcagattggagagcggctgaatgagtgggccgtgttcagcgagaagaacaaggagctgtgtgagtggctgacccagatggagagcaaggtgtcccagaatggagacatcctgattgaggagatgattgagaagctgaagaaggactaccaggaggagatcgccatcgcccaggagaacaagatccagctgcagcagatgggagagcggctggccaaggccagccatgagagcaaggccagcgagattgagtacaagctgggcaaggtgaatgaccgctggcagcacctgctggacctgattgctgcccgggtgaagaagctgaaggagaccctggtggccgtgcagcagctggacaagaacatgagcagcctgcggacctggctggcccacatcgagagcgagctggccaagcccatcgtgtatgacagctgcaacagcgaggagatccagaggaagctgaatgagcagcaggagctgcagagggacatcgagaagcacagcactggagtggcctctgtgctgaacctgtgtgaggtgctgctgcatgactgtgatgcctgtgccacagatgctgaatgtgacagcatccagcaggccaccaggaacctggaccggcgctggaggaacatctgtgccatgtccatggagcggcggctgaagattgaggagacctggaggctgtggcagaagttcctggatgactacagcagatttgaggactggctgaagagcagcgagaggacagctgccttccccagcagcagcggggtcatctacacagtggccaaggaggagctgaagaagtttgaggccttccagaggcaggtgcatgaatgtctgacccagctggagctgatcaacaagcagtaccgccgcctggccagagaaaatagaacagacagcgcctgcagcctgaagcagatggtgcatgagggcaaccagcgctgggacaacctgcagaagagggtgaccagcatcctgcggcggctgaagcacttcatcggccagcgggaggagtttgaaacagcccgggacagcatcctggtgtggctgacagagatggacctgcagctgaccaacatcgagcacttctctgaatgtgatgtgcaggccaagatcaagcagctgaaggccttccagcaggagatcagcctgaaccacaacaagattgagcagatcatcgcccagggcgagcagctgattgagaagtctgagcccctggatgctgccatcatcgaggaggagctggatgagctgcggcgctactgccaggaggtgtttggccgggtggagcgctaccacaagaagctgatccggctgcccctgcctgatgatgaacatgacctgagtgaccgggagctggagctggaggacagcgctgccctgagtgacctgcactggcatgacagatctgctgacagcctgctgagcccccagcccagcagcaacctgagcctgagcctggcccagcccctgcggtctgagaggagcggccgggacaccccagcctctgtggacagcatccccctggagtgggaccatgactatgacctgagccgggacctggagagcgccatgagccgggccctgcccagtgaagatgaggagggccaggatgacaaggacttctacctgcggggagctgtgggcctgagcggggaccacagcgccctggagagccagatccggcagctgggcaaggccctggatgacagccgcttccagatccagcagacagagaacatcatccgcagcaagacccccaccggccctgagctggacaccagctacaagggctacatgaagctgctgggagaatgtagcagcagcattgacagcgtgaagaggctggagcacaagctgaaggaggaggaggagagcctgcccggctttgtgaacctgcacagcacagagacccagacagctggggtcatcgaccgctgggagctgctgcaggcccaggccctgagcaaggagctgaggatgaagcagaacctgcagaagtggcagcagttcaacagcgacctgaacagcatctgggcctggctgggggacacagaggaggagctggagcagctgcagaggctggagctgagcacagacatccagaccatcgagctgcagatcaagaagctgaaggagctgcagaaggctgtggaccacaggaaggccatcatcctgagcatcaacctgtgcagccctgagttcacccaggccgacagcaaggagagccgggacctgcaggaccggctgagccagatgaatggccgctgggacagagtgtgcagcctgctggaggagtggaggggcctgctgcaggatgccctgatgcagtgccagggcttccacgagatgagccacggcctgctgctgatgctggagaacatcgacaggaggaagaatgagatcgtgcccatcgacagcaacctggatgctgagatcctgcaggaccaccacaagcagctgatgcagatcaagcatgagctgctggagagccagctgcgggtggccagcctgcaggacatgagctgccagctgctggtgaatgctgagggcacagactgcctggaggccaaggagaaggtgcacgtgattggcaaccggctgaagctgctgctgaaggaggtgagccgccacatcaaggagctggagaagctgctggatgtgagcagcagccagcaggacctgagctcctggagcagcgcagatgagctggacaccagcggctctgtgagccccaccagcggccgcagcacccccaaccggcagaagaccccccggggcaagtgcagcctgagccagcccggccccagcgtgagcagcccccacagccgcagcaccaagggcggcagtgacagcagcctgtctgagcccggccctggccgcagcggccggggcttcctgttccgggtgctgcgggccgccctgcccctgcagctgctgctgctgctgctgattggcctggcctgcctggtgcccatgtctgaggaggactacagctgtgccctgagcaacaactttgcccgctccttccaccccatgctgcgctacaccaacggccccccacccctgtag

SEQ ID NO: 289594 - DNA, 2859 bp, Artificial Sequence
  derived and/or modified sequence
atggtggtggccgaggacctgagcgccctgaggatggccgaggacagctgtgtggatgctgacctgcctgactgcaactgtgatgtgaccagggtgaagaagctgaaggagaccctggtggccgtgcagcagctggacaagaacatgagcagcctgcggacctggctggcccacattgaaagtgagctggccaagcccatcgtgtatgacagctgcaacagcgaggagatccagaggaagctgaatgagcagcaggagctgcagagggacatcgagaagcacagcactggagtggcctctgtgctgaacctgtgtgaggtgctgctgcatgactgtgatgcctgtgccacagatgctgaatgtgacagcatccagcaggccaccaggaacctggaccggcgctggaggaacatctgtgccatgtccatggagcggcggctgaagattgaggagacctggaggctgtggcagaagttcctggatgactacagcagatttgaggactggctgaagagcagcgagaggacagctgccttccccagcagcagtggagtcatctacacagtggccaaggaggagctgaagaagtttgaggccttccagaggcaggtgcatgagtgcctgacccagctggagctgatcaacaagcagtacagaaggctggcccgggagaacagaacagattctgcctgcagcctgaagcagatggtgcatgagggcaaccagcgctgggacaacctgcagaagagggtgaccagcatcctgcggcggctgaagcacttcatcggccagcgggaggagtttgaaacagcccgggacagcatcctggtgtggctgacagagatggacctgcagctgaccaacatcgagcacttctctgaatgtgatgtgcaggccaagatcaagcagctgaaggccttccagcaggagatcagcctgaaccacaacaagattgagcagatcatcgcccagggcgagcagctgattgagaagtctgagcccctggatgctgccatcatcgaggaggagctggatgagctgcggcgctactgccaggaggtgtttggccgggtggagcgctaccacaagaagctgatccggctgcccctgcctgatgatgaacatgacctgagtgaccgggagctggagctggaggacagcgctgccctgagtgacctgcactggcatgacagatctgctgacagcctgctgagcccccagcccagcagcaacctgagcctgagcctggcccagcccctgcggtctgagaggagcggccgggacaccccagcctctgtggacagcatccccctggagtgggaccatgactatgacctgagccgggacctggagagcgccatgagccgggccctgcccagtgaagatgaggagggccaggatgacaaggacttctacctgcggggagctgtgggcctgagcggggaccacagcgccctggagagccagatccggcagctgggcaaggccctggatgacagccgcttccagatccagcagacagagaacatcatccgcagcaagacccccactggacctgagctggacaccagctacaagggctacatgaagctgctgggggagtgcagcagcagcattgattctgtgaagaggctggagcacaagctgaaggaggaggaggagagcctgcccggctttgtgaacctgcacagcacagagacccagacagctggggtgattgaccgctgggagctgctgcaggcccaggccctgagcaaggagctgaggatgaagcagaacctgcagaagtggcagcagttcaacagcgacctgaacagcatctgggcctggctgggggacacagaggaggagctggagcagctgcagaggctggagctgagcacagacatccagaccatcgagctgcagatcaagaagctgaaggagctgcagaaggctgtggaccacaggaaggccatcatcctgagcatcaacctgtgcagccctgagttcacccaggccgacagcaaggagagccgggacctgcaggaccggctgagccagatgaatggccgctgggacagagtgtgcagcctgctggaggagtggaggggcctgctgcaggatgccctgatgcagtgccagggcttccacgagatgagccacggcctgctgctgatgctggagaacatcgacaggaggaagaatgaaattgtgcccatcgacagcaacctggatgctgagatcctgcaggaccaccacaagcagctgatgcagatcaagcatgagctgctggagagccagctgcgggtggccagcctgcaggacatgagctgccagctgctggtgaatgctgagggcacagactgcctggaggccaaggagaaggtgcacgtgattggcaaccggctgaagctgctgctgaaggaggtgagccgccacatcaaggagctggagaagctgctggatgtgagcagcagccagcaggacctgagctcctggagcagcgcagatgagctggacaccagcggctctgtgagccccaccagcggccgcagcacccccaaccggcagaagaccccccggggcaagtgcagcctgagccagcccggccccagcgtgagcagcccccacagccgcagcaccaagggcggcagtgacagcagcctgtctgagcccggccctggccgcagcggccggggcttcctgttccgggtgctgcgggccgccctgcccctgcagctgctgctgctgctgctgattggcctggcctgcctggtgcccatgtctgaggaggactacagctgtgccctgagcaacaactttgcccggagcttccaccccatgctgcgctacaccaatggacctccacccctgtag

SEQ ID NO: 289595 - DNA, 9966 bp, Artificial Sequence
  derived and/or modified sequence
atggagctggacgccgccgtgcagaagttcctggagcagaacggccaattaggcaagcctctagctaagaagatagggaagcttacagagttacatcaacagacaatccgacaggcagagaatcggctttctaagctgaaccaagccgcttcccacctggaggaatacaacgagatgctcgaactcatactgaagtggattgaaaaagctaaagtgctagcgcatggcacaatcgcttggaacagcgcctcccagctgagggaacagtatatcctccatcagacactacttgaagagtctaaggaaatagacagcgaactcgaagccatgactgagaagcttcagtaccttacctctgtgtactgcaccgagaagatgagtcagcaggtggccgagctgggtcgcgagaccgaggaactccgccagatgatcaaaatccggctgcagaatctccaggacgcagctaaggatatgaaaaaattcgaggccgaacttaagaagctgcaggccgccctcgaacaggcccaggcgactttgacatcccccgaggtagggcggctgtcgctgaaggaacagctatctcaccgccaacacctcctgtccgagatggagtccctgaagccaaaagtgcaggcagtgcagctctgccagtccgcactgcgtattcccgaagatgttgtagcttccctgccgctttgccatgccgcactcaggctccaggaggaggcgtctcggctacagcatactgccatccagcaatgtaacattatgcaagccgcggtcgtgcagtatgagcagtacgagcaggaaatgaaacatctgcaacaattaattgaaggagcccaccgggaaattgaggataaacccgtcgccactagtaatatacaggaactgcaggctcaaatctctcgccatgaggaattggcacagaagatcaagggctaccaagaacaaattgcttctctcaattctaagtgtaaaatgttaacaatgaaggcaaagcatgcgacgatgctgttgacagtgaccgaagtggagggtctggcggagggaaccgaagatctggatggagagctgcttcccacgccctccgcgcatccgtccgtggtgatgatgaccgccggtcgatgccacaccttgctgagccccgtgacagaagaaagcggggaggaggggaccaattccgagatctccagcccaccagcttgccggagcccctccccggtggcaaacacagatgccagtgtaaaccaggacatcgcatattaccaggctttatccgccgaaagattacaaacggatgccgccaagattcaccccagtacgagcgcatctcaggaattctacgaacccggactggaaccaagtgctacagccaagctgggagacctccagaggtcttgggagaccctgaagaacgtgatctctgagaaacagagaactctgtacgaagcccttgaacgacagcaaaagtaccaggatagtcttcagtccatcagcacaaaaatggaggctattgaactgaagctttcagagtccccagaacccggaaggtcacccgagtcacagatggctgaacatcaagccctgatggacgaaatccttatgctacaggacgaaatcaacgaacttcagtcctcactcgccgaggaacttgtgtcggagagctgcgaagctgaccccgcggaacagctcgccctccaatccacccttacagtgctcgccgagcgcatgtctacaatccggatgaaagctagcgggaaacgacaactgctcgaagagaagcttaatgaccagctcgaagagcaacgccaagagcaagctctgcagcggtatcgatgtgaggccgatgagctggatagttggctgctctcaacgaaggcgaccctggacacagcactgtctccccccaaggagccaatggatatggaggcccaattgatggattgccagaacatgctggtcgaaattgaacaaaaggtggtggctcttagcgagttatccgtgcacaatgagaatttgttgctggaggggaaagcccatacaaaagatgaggccgagcagttagctggcaagctgagacgattgaagggaagtctgctggagcttcagcgggctctacatgataagcagctaaacatgcagggtactgcccaggaaaaggaggaatctgatgtggatttgacagccacccaatcccctggcgtgcaggaatggctggcgcaggcacgcaccacttggacgcagcagagacagagcagcctccagcaacagaaggagctcgaacaggagctcgccgagcagaagagcctgctgcggagtgtggctagccggggagaagagatccttattcagcacagcgcagccgagaccagcggcgatgccggtgaaaagccggacgttctcagtcaggagctaggcatggagggtgagaaaagctcagccgaggatcaaatgcggatgaagtgggaatctttgcatcaggaattcagtactaagcaaaagctgctccagaatgtcttagagcaggagcaggaacaggtgctatacagcaggccaaacagattgctgagcggcgtgccactctataaaggtgacgtccccacacaagataaatcggccgtcactagccttctggatgggctgaatcaagcattcgaagaagtttcctcacagagcggaggggcaaaaaggcagtccatacatttggaacagaagctgtatgatggcgttagcgccaccagtacctggctggatgacgtggaagagcgattattcgtggcaacagccctcctgccagaggagaccgaaacttgtctcttcaaccaggagatcttggcgaaagacataaaggagatgtctgaggaaatggacaaaaacaaaaatctgttttcacaggctttcccagaaaatggggacaaccgagatgtgatcgaggacactttgggatgtctgctgggaaggctgagcttgctggacagcgtagtgaaccagagatgccaccaaatgaaagagaggcttcagcaaattttgaactttcaaaatgatcttaaagtcctcttcacatctcttgctgacaataaatacatcatcctgcagaagttggccaatgtgttcgagcaacccgtcgccgagcagatcgaagccatccagcaggcggaggatggactcaaggagtttgacgccgggatcatcgagctcaagcggcgaggagacaagctgcaggtggagcagccatccatgcaggagttaagcaaactgcaggacatgtatgacgagctgatgatgattataggctctcgcagaagtggattaaaccagaatctgacattgaaatcccagtatgaacgcgcactccaggaccttgctgacctactcgagaccgggcaggaaaagatggctggtgatcaaaagatcatcgtgagctccaaagaggagattcagcagctgttggacaaacacaaggaatatttccaaggactggagagccatatgatccttaccgaaaccctattccggaagattatctctttcgctgttcagaaagaaacgcagtttcacaccgaactgatggcccaggcctcggccgtactcaaaagagctcacaagcggggcgtggagctcgagtatatccttgaaacttggtcccacctggatgaggaccagcaggagctgtcgcgacagctagaggtggtggagtcatccataccctccgtgggcctggtggaagaaaacgaggatcgcttaatcgacagaatcacactgtatcagcatttgaagtcctcattaaacgagtaccagcccaagctgtaccaggtcctggatgacggcaagagattactgatttctatctcctgttctgatttggagtctcagttaaaccaactgggagagtgctggctctccaatactaataaaatgagcaaggaactgcataggttggagacaatcctgaagcactggacccgctaccaaagcgaaagcgccgacctcattcactggttgcagagtgcgaaggatcggctggagttctggacacagcaaagtgtaacagttccccaggaactggaaatggttcgcgaccatcttaacgcttttctcgaattctctaaggaggtggatgcacaatcttccctaaaatcttctgtcctcagcactggaaaccagctcctacgtctaaagaaagtggacaccgcgaccctacggtcagagctgagtagaattgattcgcagtggacagatctcctcacaaacattccagcagtccaagaaaaattgcaccagctccagatggacaaactgccgtcgagacacgcaatttcagaggtgatgtcctggatctctttgatggagaatgttattcagaaagacgaagacaatatcaagaatagcatcggctacaaggcgattcatgagtatctgcagaaatacaagggcttcaaaattgatatcaactgtaagcagctcactgtggactttgtcaaccagtccgtcctccagatttcctcccaagacgtggaaagcaagagaagcgataagaccgattttgccgagcagctgggcgcgatgaacaagagctggcaaatcctgcaaggtctggtcacagaaaagattcaactcctggagggactcctcgagagctggtccgagtacgaaaacaacgtacagtgcctgaagacttggtttgaaacacaagagaaaagactcaaacagcaacatcgaataggtgaccaggcctctgtgcagaatgctttgaaagactgtcaagatttggaggatctcatcaaagccaaagagaaagaagtggagaaaatagagcagaatggtttggccctgattcagaataagaaagaagacgtgtctagcatcgtaatgagtactctgagggagttgggccagacttgggcgaacctcgatcatatggtgggccaattaaaaattctgctaaaatctgttctggatcagtggtccagccacaaggtggcttttgataaaattaactcctacttgatggaggcccgatactcactcagccgctttcggttgctgactgggtccctggaggccgtccaggttcaggtcgataacctgcagaacctgcaggacgacctcgagaagcaagagcgcagccttcagaaattcggcagtataaccaatcagcttctgaaagagtgtcatccccctgtgactgagactctgacgaatacccttaaagaggtgaacatgcgctggaataacctgctggaagaaatcgccgaacagttgcagtcctctaaggctctgctccaattatggcagagatacaaggactattccaagcaatgcgcctcgacagtgcaacagcaggaagaccggaccaacgagctactcaaggccgctaccaacaaagatattgccgatgatgaggtggccacttggattcaggactgtaatgacttactcaaaggattgggcaccgttaaagatagtctatttttcctgcacgaactgggggaacagctaaagcaacaggtcgatgcatcggcagctagtgccatccagtccgaccagctctccctctctcagcacctatgcgctctggagcaggccctgtgcaaacagcaaactagcctgcaggccggagtccttgattacgagacttttgctaaatccttagaggccctggaggcgtggatcgtcgaagccgaagagattctacagggccaggacccatcccactccagcgacctctccactatccaagaacgtatggaggagttgaagggacagatgctaaagttttcaagcatggctccggatctcgaccgtctaaacgaattgggctaccgcttaccgctgaacgacaaagagatcaaacgcatgcagaatctgaacaggcattggtccctcatatctagccagacaaccgaacggttctccaagctgcagagctttctgctacagcatcagaccttcttagagaagtgtgaaacttggatggagttcctggtgcagaccgagcagaaactggctgtggagattagtgggaactatcagcacttgctggaacagcagagagcacacgaactgttccaggccgaaatgttttcgcggcaacagatcctgcactccatcatcattgacggccagcgactgctggagcaaggccaggtggacgaccgagatgagtttaaccttaagcttacactgctttcaaaccagtggcagggagtgatcaggagagcccaacagagaagaggtatcatcgatagccaaatacgacagtggcaacggtatagggaaatggctgagaaactgaggaagtggttggtggaggtgagctacctacccatgagcgggctgggcagcgttcccattccactacagcaggcaaggacactgtttgatgaagtgcagtttaaggaaaaggtgtttctgagacagcaggggtcatacatcctgactgttgaagcaggaaaacagctgctgctgtccgcagattccggcgcagaggctgcgcttcaggccgaactggccgagatccaggaaaagtggaaatctgcttcaatgagattggaggagcaaaagaaaaaactggcatttctcctgaaggactgggagaagtgtgaaaaaggcatagccgattccttggaaaaacttaggacctttaagaagaagcttagtcaaagtcttccagatcatcatgaggagctccacgctgaacaaatgaggtgcaaggagcttgaaaatgcagtgggctcatggaccgacgacttgacacaactgtctctgctaaaggacacgctatctgcatacatcagcgccgacgacatatccattctcaacgaacgggttgaattactacagagacagtgggaggaactgtgtcaccagctttcactgcgccgacagcagatcggagagcggctaaatgaatgggccgtctttagcgaaaagaacaaagaactttgcgagtggctgactcagatggaatctaaagtgtcccagaatggagacatcctaatagaagagatgatcgagaagttgaaaaaggattatcaggaggaaatcgcaattgcccaagaaaacaagatacagctccagcagatgggggagcgcctcgccaaggcttcccatgagagcaaggcctcagaaattgagtataaacttggcaaagtcaacgatcgttggcagcacctccttgatctgatcgccgcccgagttaagaaattgaaggagaccttggtggctgtgcagcagcttgataaaaatatgtcaagcttacgaacttggctggctcatatcgaatctgaactggccaagccaatagtgtacgactcatgtaatagtgaagaaattcagcgcaagttgaacgagcagcaggagctgcaacgggacattgaaaaacactctaccggcgtggcttcggtgttaaatttgtgtgaggtattactgcatgactgtgacgcctgcgcgaccgacgcggagtgtgattctattcagcaggcgactcgcaacctcgatcggagatggcggaatatttgcgccatgtccatggaacggagactgaagatcgaggaaacatggaggttgtggcaaaagttcctggatgattacagtagatttgaggactggctgaaatcctctgagcgcacggcggccttcccctctagctccggagttatctatactgtcgctaaagaagagttaaaaaaattcgaagcatttcagcgacaggttcacgaatgtcttacccagctcgagcttattaacaaacagtaccggaggctggctcgggagaaccgcaccgacagcgcctgcagtctgaaacagatggttcacgaaggcaaccaaagatgggacaatcttcagaagagagtgacatctatactacggagactgaaacactttatcggtcagcgggaggaatttgaaaccgctcgcgatagtattttggtgtggctaaccgagatggacctacagctgacgaacattgagcactttagcgaatgtgacgtgcaggccaagattaagcagctcaaggcgtttcagcaggagattagcttgaaccacaacaagatcgagcagatcatcgctcaaggagaacagctcatagagaagtcagagccgttggatgccgctatcatcgaggaggaactcgacgagcttagaaggtactgtcaggaggtgttcggacgggtcgagcggtaccataaaaagctaatcaggctgcccttgccagatgacgagcatgacctgagtgacagagaattggagctagaagattcagctgccctgtctgacctgcactggcatgaccgaagtgcagactcacttctgagccctcaaccttcctcaaacttgagcctttcattggcacaaccactccggtccgagcgctccggaagagacactcctgcgtccgttgactccatcccacttgagtgggaccatgactatgatctcagccgtgacctggagagcgccatgtccagagccctgccgtctgaagatgaagagggccaggatgacaaggacttctacctccggggcgccgttggactgagcggcgatcacagtgccctcgagagtcagatcaggcagctcggcaaggctctcgacgattcaaggtttcagatccaacaaacagaaaatatcatccggagcaaaaccccaaccggccccgagcttgacactagctataaaggctacatgaaactgttgggagaatgctcttcatcaattgattctgtgaaacgcctagagcataaactgaaagaagaggaagagtctctgccagggttcgtcaatctgcactctacggagacacagacagccggcgtaatagaccgctgggagctgctgcaagcccaagccctgtcaaaggagttacgaatgaagcagaacctgcagaaatggcagcaatttaactccgatcttaactctatttgggcctggcttggagataccgaggaagagctcgagcagctacagcggcttgagctgagcaccgacatccagacaatcgaactgcagatcaagaagctgaaagagctgcagaaggccgtggatcaccgcaaagcgataatcctgtccatcaacctttgtagccctgagttcacacaggctgatagtaaagaatcaagagatctgcaggaccggctgtctcagatgaatggccgttgggaccgggtctgcagtctgctggaggaatggagaggactcctgcaggatgcactcatgcagtgtcagggcttccatgagatgtctcatgggctgctgttgatgttggaaaacatcgacaggcggaagaacgagattgttcctattgatagtaatctggatgcagaaatacttcaggatcaccacaaacagctaatgcagataaaacacgagctactggagagtcagctgagggtcgcgagtctccaggacatgtcttgccaactgctggtcaatgcagagggaactgactgccttgaagcaaaagaaaaagtgcacgtaatcggcaatcgcctgaagctgctgctaaaggaggtttcgcggcatattaaagagcttgagaagctcctcgacgtctcgagcagccagcaggacttatccagttggagctccgccgacgaactcgatacctccgggtcggtgtcgccgacttctggcagatcaacccctaacagacaaaagaccccacgtgggaagtgctctttgagccaaccaggccccagtgtatcatcccctcacagccgatcaactaaaggcggctctgactcatccctgtctgagcccgggcccggcagaagcggccggggtttcctgtttagagtgttgagagcagccctgcccctacagcttctgctgctgctactcatcggactcgcttgtctagtaccgatgagtgaggaagattatagttgtgctctttctaacaacttcgcacgatctttccacccaatgttgaggtacactaacggccctcctccattatag

SEQ ID NO: 289596 - DNA, 2859 bp, Artificial Sequence
  derived and/or modified sequence
atggtggtggccgaggacctgagcgccctgcggatggccgaggacagttgcgtggacgcagatctgccagactgtaactgcgacgtgactcgggtaaagaagctgaaggaaactctggttgcggtccagcagttagacaaaaacatgtcctccctgcgcacttggctggcacacatcgagtctgagctagccaagccaatcgtgtacgattcctgcaacagcgaagagatacagcgcaaactgaacgagcagcaagagcttcagagggacatcgaaaaacattcaactggagtggcatctgtccttaacctgtgtgaggtgttgctgcacgactgcgacgcctgtgccactgacgctgaatgcgacagcatacagcaagccactaggaatcttgaccgcaggtggaggaacatctgcgccatgagcatggagcggcgattgaaaatcgaagagacttggaggttatggcaaaagtttttggacgactacagtagatttgaagactggctgaagtcctcagagcgcaccgctgccttccccagttctagcggggtgatctatactgtcgccaaggaagagcttaagaaattcgaggccttccagcggcaggtgcacgagtgcctgacacagctggagctgatcaataagcagtaccgtagactggctcgagagaacaggacagattccgcttgctctctgaagcagatggtgcacgaagggaatcaacggtgggataacctgcaaaagagggtcactagtattctaagaaggcttaaacactttatcgggcagcgagaggaatttgaaactgctagggactccatcctcgtctggctcacggagatggatttacaattgaccaacattgaacatttcagtgagtgcgatgttcaggcgaagatcaaacaactgaaggctttccaacaggagatttccctcaatcacaacaagattgagcagatcatcgctcagggagaacagttaattgaaaagagtgagcccctggatgccgctattatcgaggaggagctcgacgagctgaggagatactgccaggaagtctttggtcgtgtagagaggtatcacaagaagcttatacgtctccccttgccagacgatgaacacgacttgagcgatcgcgagctcgagctcgaagatagtgcagccctttccgacctacattggcatgatcgatcagcggactctctcctgagcccacaaccaagtagtaatctgtccctctctttagcacagccactccgaagtgaacggagcggtagagacacccccgcctcagtcgacagtattcctctcgaatgggatcacgattatgatcttagtagagaccttgaatctgcgatgtctcgagcactgcccagtgaagatgaggagggacaagatgacaaagatttctacctgagaggagcagttgggctctccggcgaccacagcgccctagagtcacaaataaggcaactaggaaaggcattagatgatagccgattccaaattcagcaaacagagaatatcatccgctcgaagacccccactggccccgagctggatacaagctataaaggttacatgaagctcttaggtgaatgtagctcatccatcgatagtgtaaagcgtctggaacacaagttaaaagaggaggaggaaagcctgcctggcttcgttaacctccatagcactgagacacaaaccgccggagtcattgatcgctgggagttacttcaggcacaggcactcagtaaggaactgagaatgaagcagaatctgcagaagtggcagcagtttaactccgatctcaactccatctgggcatggctgggggacacggaggaggaactggaacagctacagcgcttggaactgtctaccgatattcaaaccatcgagcttcagattaaaaagctcaaggagcttcaaaaggctgtggaccaccgcaaagccatcattctctccatcaacctatgttcacccgaattcactcaagccgactccaaagagagtcgcgacttacaagatcggctctcacagatgaacgggcgatgggatcgtgtgtgctcactactggaggaatggagaggcctgctgcaggatgccctgatgcagtgtcaggggttccatgaaatgagccatgggttacttctcatgctggagaatatcgatagaagaaagaatgaaatcgtgccaatcgacagtaatctggacgcggaaatcttgcaggatcaccacaaacagcttatgcagattaaacacgagctgcttgagagtcaattacgggtggctagcctacaagacatgtcatgtcagctactggtgaacgccgaggggaccgactgcctggaggcaaaggaaaaagtccacgtaatcggaaaccgcctcaagctactgttaaaggaagtgagccgtcacatcaaggagctagagaagttactagatgttagcagctctcagcaggacctcagcagctggtctagcgccgatgagttggacactagtggaagtgtgtcacctacatccgggagatctactcctaataggcaaaaaactcctagaggaaaatgtagcttgtctcagccggggccctcggtatcaagcccccacagtcggtcaacaaagggcggctccgattcatcactgtccgaacccggaccaggtcggtctggcagggggttcctcttcagggtcttacgtgcagcactgccattacagttgctccttctgctcctcattggactagcgtgtctggtgcccatgtctgaggaggactattcctgtgccctatcgaacaatttcgcgcggagttttcaccctatgttaaggtataccaacgggcccccaccactgtag

SEQ ID NO: 289597 - DNA, 9965 bp, Artificial Sequence
  derived and/or modified sequence
atggaactggacgccgctgttcagaaatttcttgagcagaacggtcagttagggaaacccctcgcaaagaagatcggcaaactcacggagctccaccagcaaactatacgacaggcagaaaaccgcctgtccaaattgaatcaggcggcttctcacctggaggaatataacgaaatgctggagctaatactcaaatggattgagaaggctaaagtgctagcacacggcacaattgcctggaattccgcctcccagttacgggagcaatacattcttcatcagacattattggaagagagcaaggagattgacagtgagctcgaagctatgaccgaaaagctccagtacctgaccagcgtttactgtactgagaagatgtcccagcaggttgccgagctggggagggagaccgaagagctccgacagatgattaagatcagactgcaaaatctgcaagacgctgcaaaggacatgaagaaattcgaggccgagctaaagaagctccaggcagctctcgagcaggctcaggcaacattgacatcacctgaggtgggaagactcagtcttaaagaacagctcagccaccgccagcacctcttgtcggagatggagtccttaaaaccgaaagtccaggccgtgcaactgtgccagtcagccctcaggattccagaggatgtcgtggcctcgctcccactttgccatgctgcacttagactccaagaggaggccagcaggcttcaacatactgctattcaacaatgcaacattatgcaggccgctgttgtccagtatgagcagtacgaacaagagatgaagcacctgcagcagctcattgaaggagcccatagagaaatagaggacaaacccgtcgcaacctccaatattcaggaacttcaggcgcagatatctcgacatgaggagctcgcccagaaaatcaaaggctaccaggagcagatcgcatcactgaattcaaaatgcaagatgttaactatgaaggccaaacatgcaacaatgctgctgactgtgaccgaggtggaagggctggccgaagggaccgaagacttagatggcgagctgctgcctacacctagcgcccatccctccgttgtaatgatgaccgccggtaggtgccacactttactgtcgcccgtaactgaggaatctggcgaagaaggtacaaatagtgagatcagcagtccaccagcttgcaggagcccatccccagttgccaacactgacgcctcagtgaatcaggatatagcctattatcaggccctatcagcagaaagactccagactgacgcggcaaaaattcatccatcgaccagcgctagtcaagagttttacgaacctgggctggaaccaagcgctaccgccaaattgggagatctccaacgatcttgggaaactctgaagaacgtcattagtgagaaacagcgcactctgtacgaagcgctcgagaggcaacagaagtatcaggactcactccagtcaattagtaccaagatggaggcgattgaactgaagttgtctgaaagcccagagcccggaaggtcccccgagtctcaaatggcagagcatcaggctctgatggatgaaatactaatgctccaggacgaaattaatgaactccagtcctcactagctgaagaactcgtgtccgagtcttgtgaggccgaccctgcagagcagctggcattgcagagcacactgacggtgctcgcggagcgaatgagcaccattcgcatgaaggccagcgggaaacgccaactgctggaggaaaaattgaacgatcagctcgaggaacagcgccaggagcaggcacttcagagataccggtgtgaggctgatgagctggatagttggctactgtctaccaaagctacactggacaccgctttatctccaccaaaggagcccatggacatggaagctcagctgatggactgtcagaatatgctcgtcgagattgaacagaaggtggttgcgctcagcgagttgagcgtgcacaacgagaacctcctcctggaaggaaaggcacacaccaaagatgaggccgagcagctggcagggaagctacgtagactcaaggggagtctgctggaactgcagcgtgccttgcacgataaacaattaaacatgcagggcacagcacaagaaaaggaggagagcgatgttgatctgaccgccacacagagcccaggagtccaggagtggctcgcccaagcaagaaccacctggacccaacaacggcagagctccctgcagcagcagaaagagctcgagcaggagctggctgaacagaagtccctgctccgctccgtagcttcaagaggcgaagaaatcttgatccagcatagcgctgcagaaactagcggcgacgctggggagaagcccgacgtgctaagtcaagaactcgggatggaaggagagaagtcatctgcggaagaccagatgcgtatgaaatgggagtcactgcaccaggagtttagtacgaagcagaaactgttgcaaaacgtgcttgaacaggaacaggaacaggtgctgtatagcagacctaaccgcctactcagcggagtaccattgtacaaaggcgacgtccctacacaggacaaatccgccgtcacgtctttgctggatggtctgaaccaagcctttgaggaggtgtccagccagtcaggaggagcaaaaagacagagtatacacttggaacaaaagctgtacgacggagtgtcggcaacttccacatggctggatgacgtcgaagagcggcttttcgtggctacagcgctgctcccagaggagacggagacatgcctgtttaaccaggaaatcctagccaaggacatcaaggaaatgtcagaggaaatggacaaaaataaaaacctgttctcacaggcattccccgagaacggcgataaccgagatgtaatcgaggataccctagggtgtcttctcggcagattgtccttactggacagtgtcgttaatcagagatgccatcagatgaaggagcgcctgcagcagatcctgaactttcaaaacgacctgaaggtactattcacctctctcgccgacaacaaatatatcatcctccagaagcttgccaatgtgttcgagcagccggtggcggagcagatcgaagccatccaacaagccgaggacggactgaaagagtttgatgcaggtatcatcgagctgaaacgacggggtgataaattacaggttgagcagccgagcatgcaggagttaagtaagttacaggatatgtacgacgaactcatgatgataatcggatccaggcgaagtgggttgaaccagaacttgaccctcaaaagccagtacgagagagccctgcaggacctggcagatttattagagactggccaggaaaaaatggccggagatcagaagatcatcgtgagtagcaaggaggagattcagcagctactggataagcacaaggaatatttccagggcctggaatcccatatgattctcactgagaccctgttcagaaaaattatcagctttgctgtacaaaaagaaactcagttccataccgaactgatggcccaggcttccgcagtgctgaaacgagcacacaaacggggtgtagaactcgagtatattctggaaacatggtcacatctggacgaagaccagcaggaattgagtagacagctagaggtagtggagtctagtattccttcagtgggcctagtggaggagaacgaggacaggttgatcgaccggatcactctgtaccagcatctgaagtcctctctgaacgaataccagccgaagctgtaccaggtgttagatgatgggaagagactgttgataagtatcagttgctccgacttggagtcccagctgaatcagcttggggaatgttggctgagcaacaccaataaaatgtccaaagaactgcatcggctggaaaccatccttaaacattggactagatatcagtccgagagcgccgacttaatccactggctgcagtcggctaaggaccgcttagagttctggacccagcagagcgtgaccgtaccccaggagttggagatggtgcgagaccaccttaacgcatttctggagttttcgaaagaagtagacgctcagtcttccctgaagtccagtgtgctttccaccgggaaccagcttctgagactaaagaaagtcgacacagcaacacttagatcagagctgagtcggatcgacagtcaatggacagatctgctgacaaacattcccgcagtgcaggaaaagcttcaccagctgcagatggataagcttccaagtaggcacgccattagcgaggtcatgtcatggatctccctgatggagaatgtcatccagaaggacgaggacaacattaagaatagcatcggatataaagccatccatgagtacctgcagaaatataaggggttcaaaatcgacattaactgcaagcagctgactgtggacttcgtgaatcagtctgtgttgcagatatcctctcaggatgtggaaagtaaaaggagcgacaagaccgactttgctgagcagctgggggctatgaacaagtcatggcaaattctgcaagggctggtaaccgagaaaatccagctgttggagggcctactggagagttggtctgaatacgagaataatgttcagtgcctgaagacctggttcgaaactcaggagaaacgcttgaaacagcagcaccggattggcgaccaggccagtgtccagaacgccctgaaggactgtcaggatctggaggatcttattaaagccaaagagaaggaggtggagaagatcgaacagaatggccttgccctaatacagaacaaaaaggaagacgtgtcatccatcgttatgtccaccctgagagagcttggccagacctgggcaaatctcgatcatatggtcggccaactcaagatcttgcttaagagcgttctggatcagtggtccagccataaggttgctttcgacaagatcaattcgtatcttatggaggcccgttactctctgagccgctttaggctcctgacaggaagtcttgaagcggtgcaggtgcaggtggacaacctgcaaaatctccaagatgacctcgagaaacaggagcgatctttgcagaagttcggttccataactaaccaattgttgaaggagtgtcatccacccgttacagaaacactcaccaacacactgaaagaagtgaacatgagatggaacaacctactggaagaaatcgcagaacagctgcaatccagtaaggccttattacagctgtggcagcgctacaaggattatagtaagcagtgcgctagcactgtgcaacagcaggaggatagaaccaatgagctcctgaaagcagctacgaacaaggacattgccgacgatgaagttgccacctggatccaggattgcaatgatctgctaaaaggactgggcactgtgaaggattcactcttctttcttcacgaactgggtgagcagctcaagcaacaggttgatgcctctgcagcatccgcgatccagtctgatcagctcagcctgtcacagcatctgtgtgccctcgagcaggcattatgcaagcagcagacaagcctccaggccggagtcctcgactatgagacattcgcaaagtccctcgaagcgcttgaagcctggattgtggaggctgaggaaattctccagggccaggacccgtcccactcttctgatttgtcaacaatccaggagcggatggaagagctgaagggccagatgctcaaattctccagtatggctcccgacctggatcgcttgaatgagctgggctaccgcctcccactgaacgacaaagaaatcaaaaggatgcagaatctgaacagacactggagcctgatttcaagccagactaccgaaaggttcagcaagctccagtcatttttgttgcagcatcagactttccttgaaaaatgtgaaacatggatggaattcttagtgcagactgaacagaagctggccgtggagatatctggaaactatcagcacttattggaacagcagagagcccatgagctgttccaagccgagatgttcagtagacaacaaatccttcactctataatcatcgacggccagaggctccttgaacaggggcaggtggacgacagggatgaatttaacctgaaactcactttgctatctaatcagtggcagggggtgattcgcagagcccagcagcggcgaggcattattgattctcaaattaggcagtggcagcggtaccgcgagatggccgagaagcttcgtaagtggctggtggaagtgtcatacctgcctatgtccggcctgggcagtgtgcctatccccctgcagcaggccagaacactctttgacgaggtgcagttcaaggagaaggtgtttctcagacagcaaggttcttacatcctgacagtggaggccggaaaacagctgctgctctccgctgactccggcgctgaggctgctctgcaggctgaactggcagagattcaggagaaatggaaatctgcctcaatgaggctagaggagcagaagaagaaactcgcttttttgctgaaggactgggagaagtgcgagaagggcatcgcggattcccttgagaagctgaggaccttcaaaaaaaaattgagccagtctttacccgaccaccacgaggaactccatgcagagcagatgagatgcaaggagctcgaaaatgctgtggggtcctggacagacgacctgacacagctgtccctgctgaaggatacactctctgcatatatatctgcggacgatatctccatcttgaacgagcgggtggaactcctgcagcggcagtgggaggaactgtgccaccaactcagcctgcgcagacagcagatcggtgaacgactaaacgagtgggccgtgttttccgagaagaacaaggagctttgcgaatggttaactcagatggaaagcaaagtttcacaaaatggtgatatactgattgaagaaatgatcgagaaattaaaaaaggactaccaagaggaaatagcgattgcacaggaaaataagatccagttgcagcagatgggggagagactggcgaaggcatcccacgaatcaaaggcaagcgaaattgagtataaactgggaaaggtcaatgatcggtggcagcacctgcttgatctgatcgctgcgcgagtgaaaaagttgaaagaaactctcgtggcggtgcaacagttggataaaaatatgtccagcctgcgtacctggctggcccacattgagtcagaacttgcgaagcctatagtttatgatagctgcaactccgaggagatccagaggaaactcaatgagcagcaagaactgcagagggatatcgagaagcacagcaccggagtcgcctctgtcttaaacctgtgtgaggtcctcctgcacgattgcgacgcttgcgcgaccgacgctgagtgcgattctattcagcaggctacacgcaatctggacagaaggtggcgaaatatttgtgccatgagcatggagcgcagactaaagatcgaggagacatggaggctctggcaaaagtttctcgatgattattcccgatttgaggattggcttaagtcttccgagagaacagccgctttccccagttcatctggcgtaatttacacagtcgctaaagaagaactgaagaaatttgaagccttccagaggcaggtgcatgagtgtctgacacaattggagttgatcaacaaacaataccgaaggctcgcacgagagaaccggacagacagcgcttgcagcttaaaacagatggtgcatgaaggcaatcagcggtgggacaacctgcagaaacgcgtgacaagtatcctgagaagactgaaacattttataggacagcgtgaagagttcgagaccgctagggattctattctggtttggctgacggaaatggatctgcaactgacgaacatcgaacacttttccgaatgtgacgtgcaggcaaaaatcaagcagctgaaggccttccagcaggaaataagcttgaaccataacaaaattgagcagatcatcgcccagggcgagcagctcattgaaaagtctgagccattagatgctgccataatcgaagaggaactcgacgagcttagaaggtactgccaggaagtatttggcagagtggaacggtaccataaaaaactcattaggttacctctaccagacgatgaacacgaccttagcgatcgggaactggaactggaagatagtgcagccttatccgatttacattggcacgatcgctcagccgattctctgttgagcccccaacctagtagcaacctgagcttatccctggcccagccactccgttcagagaggtctggaagagatacaccagcaagcgttgactccatccctctggaatgggatcacgattacgacttgagccgagatttggaatcggctatgtctagagcccttccgtccgaagatgaggaaggccaggatgataaggatttctatctccggggagctgtcggactgtctggcgatcatagtgccctcgaatcacagatccggcagctgggtaaggcactggacgacagccgtttccagattcagcagactgagaacattatccggtctaagacacctacaggcccagagttggataccagctacaaaggatacatgaagctgcttggagagtgctcgtcttccattgatagtgtgaagcgactcgaacacaagctcaaggaagaggaggagtcattacccggtttcgtgaatctccactccactgagactcaaacagctggggtcatcgataggtgggagctgttgcaggcacaggcactcagtaaggaactgaggatgaagcagaacctgcagaagtggcagcagtttaactctgatttgaattctatctgggcctggctcggggacaccgaggaggaactggagcaattgcaacggctggagctcagcactgacatccagactatagagttgcagatcaaaaagctgaaggaacttcagaaggcagtggaccaccggaaggcaatcattctttccattaacctgtgctcacccgaattcactcaggcagactccaaagagtcaagggatctgcaggacagacttagccagatgaacggaagatgggaccgtgtgtgctctcttttggaggaatggagggggctgctccaagacgcactgatgcagtgccagggctttcatgagatgtctcacggcctgctgttgatgctagagaacattgaccgcaggaagaatgaaatcgtgccaattgactcaaacctcgacgctgagatactgcaggaccaccataaacagctgatgcaaattaaacatgaattgctggagagccaactgcgggtggcgtctcttcaagatatgagctgtcagcttctcgtgaatgccgagggcacagactgcctggaagccaaggagaaggtccacgtgatcgggaacagattgaaactgcttctgaaagaagtgagtagacacatcaaagaacttgagaaattgctggatgtctcctcatcccagcaggacctctcatcgtggagcagcgctgacgaattagatactagcggtagtgttagccccacatccggcagaagtacccccaaccgccaaaagacacccaggggtaaatgcagtctctcacagccaggtccaagcgtttccagcccgcattctagaagcaccaaaggtggcagcgactcttccctgagtgaacccggtcccggaaggtccggcagaggctttcttttccgagtgttgagagctgcattgccgctccaactgctgctcctcctgctgatcggcctggcctgtctggtgcctatgtccgaggaggactactcttgtgcactgagcaataattttgcccgtagttttcatcctatgctcaggtacaccaatggtccgccacccctgta

SEQ ID NO: 289598 - DNA, 2859 bp, Artificial Sequence
  derived and/or modified sequence
atggtggtcgctgaggatctgtcggcactcaggatggccgaagattcctgtgtcgacgccgacctccccgactgcaattgcgatgttaccagagtgaagaagctgaaagagacactggtcgctgtccagcagctggataagaacatgtcctccctgcgaacctggttagctcatatcgaatccgagctagctaaaccaatagtttatgactcctgtaactcagaggagatacagcggaagctgaatgagcagcaggaactgcaacgggacatagagaagcattctacaggggtggcatctgtgctgaacctgtgtgaagtgctgctgcatgactgcgacgcttgtgcgaccgatgctgagtgtgacagcatccagcaggcaacccgaaatctcgacaggcggtggcgcaatatttgcgctatgtcaatggaacggaggctcaagattgaagaaacctggcgactttggcagaagttcctggatgattactcgcggtttgaagattggctaaagagcagtgaaagaaccgctgccttcccctcctccagcggagttatatacactgtggccaaagaagagctgaagaaattcgaagcctttcaacgacaggtgcatgaatgtcttactcagctggagctgatcaacaaacaataccgccgactggctagagaaaatcgcacagattccgcctgtagtttgaagcagatggtacacgaaggcaatcagcgttgggacaatctgcagaaaagggtgacatcgatactcagacgcctgaaacattttatcgggcagagagaggaattcgagacagcaagagactcaattctggtgtggctgaccgagatggatctgcagctcactaatattgaacatttctcagagtgtgatgtgcaggcaaaaatcaagcaactcaaggcatttcagcaagagatcagcctaaatcataataagattgaacagattatagcgcagggcgaacagctgatcgagaaaagcgaaccgctagacgcggctatcatcgaagaggaactggatgaactgcggagatactgtcaagaggtttttgggagagttgagcgctatcacaagaagctgatcagactcccactcccagatgatgagcatgatctcagcgatagggagcttgagctcgaagactcggccgcactctcagatcttcattggcacgatcggagtgctgattccctcctaagcccccaaccctcttctaatctgtcgctgtccctggcccagccacttcgctccgaacgatctggacgagatacccccgctagtgtcgacagcattcccttggaatgggatcacgattatgacctgagccgtgatcttgaaagtgccatgagtcgcgctctaccatctgaggacgaggaaggccaggacgataaggatttctacctgaggggagctgtggggctatctggtgatcactccgcgttggagtcacagattcggcagctcggtaaggctctggatgatagccgattccagatccagcagacagagaatataatccggagcaagacaccaacgggtccagaactggatacctcctataagggttatatgaaattactgggtgagtgttcatcctcaatagattccgtaaaaagacttgagcataaattaaaggaggaggaggaatctctgccaggattcgtgaatctccacagcaccgaaacacaaaccgccggtgttatagatcgctgggagctgctccaggctcaggctctgagcaaggaactgagaatgaaacagaatctccagaaatggcagcagtttaacagtgatctgaacagtatctgggcatggttaggcgacaccgaggaagaactcgagcagcttcagcgccttgagttatctaccgatattcaaaccatagagctacagataaagaaattaaaagagctccagaaagccgttgatcaccgcaaggcaataatcttgtctattaacctttgctctccagaatttacccaagcggacagcaaagagtcacgagacttacaggatagactttctcagatgaacgggcgatgggacagagtgtgctctttgcttgaggagtggagaggcctattacaagacgcactaatgcagtgccagggtttccacgaaatgtcacacggtttgctgctcatgttggagaacatcgatcggcgtaaaaatgaaatcgtcccaattgacagcaacttggatgcagaaattctacaagatcatcacaaacagctcatgcagataaagcacgagttgctggagtcacagttgagggtagctagtttgcaagacatgtcttgtcaactactggtcaatgctgagggaacagactgcctcgaagcaaaagaaaaggtgcacgtgataggcaacagactgaaactgctgctgaaagaggtgtcccggcatatcaaagagttagagaaacttctggatgtaagttcctcccagcaggacttatcatcctggtcttcagcggatgaactcgatacctcaggctccgttagtcccacatccggcagaagcactcccaatcgacaaaaaacaccaaggggcaagtgctctctgagccagcctggtccctcagttagtagcccgcactcacgcagcacaaaaggtggcagcgactcttccttatcagaaccaggccctggtagaagcggtcgtggattcttgttccgggtattgcgcgctgcactccctctgcagctcctactcctgctcttaattggattggcctgccttgttccaatgagcgaagaggattacagctgcgctttatctaacaattttgccaggagcttccatccaatgcttagatacaccaacggacctccccctctgtag

SEQ ID NO: 289599 - DNA, 10835 bp, Artificial Sequence
  derived and/or modified sequence
caaaaatcagtctgatctcgggaaacctggagaaatttattttctgtactctaatgttctttcattttggtgaccatcaaggtgctgggagaggaattagatggctgtaattcaaagttaatggaattagatgcagcagtacagaaattcttggaacagaatggccaactgggtaagccactggccaagaagataggaaaactgactgaacttcaccagcagaccattagacaagctgagaatcggctctccaagctcaatcaggcagcatcacatttagaagaatacaatgaaatgcttgaattaattttgaagtggattgaaaaagctaaagtcttggctcatggaactattgcatggaattctgcaagccagcttcgggaacaatatattttgcatcagaccctgctagaagaatccaaagaaattgacagtgagctggaagcaatgactgagaaattacagtacctcactagcgtgtactgtacagaaaaaatgtctcagcaagtggcagaactgggacgggagactgaggagttgcgacagatgatcaaaattcgtttgcagaacctccaagatgcagctaaggatatgaaaaaatttgaagcagagttgaaaaagttacaagctgccttggagcaagcccaggcaacactgacttctccagaagttggacgtctcagtctcaaggagcagctctctcatcggcagcatttgttgtctgagatggagtcactgaagccgaaggtgcaagcagtgcagctctgccagagtgccctccggatccccgaggatgtggttgccagcttacctctctgtcatgctgctctgcggctgcaggaagaggccagccggctgcagcacaccgccatccagcagtgtaacatcatgcaggcagctgtggtacaatatgaacaatatgagcaagaaatgaaacatctccagcaactgatagaaggagctcacagagagattgaggataaacctgttgccaccagtaacatacaggagctgcaggctcagatttctcggcatgaggagctggcgcagaaaattaagggctaccaggagcagatcgcttctttgaattccaagtgcaagatgctgacgatgaaagccaagcacgccaccatgctgctgacggtgaccgaggtcgaggggctggcggaagggacagaggacctggatggggagctcctccccacgccttcggcccacccctctgtggtcatgatgactgcaggtcgctgtcacactttgctgtcaccggtcactgaggagtctggggaggagggaaccaacagtgagatttcctctccacctgcctgtcgctccccttcacctgtggctaatacagatgcttctgttaaccaggacattgcatattaccaagccttgtctgctgagaggttgcagacagatgctgcaaaaattcaccccagcacatccgcatcccaggagttctatgaaccgggattggagccatccgctactgccaaactgggtgatttgcagcgttcttgggaaaccttaaagaatgtgatcagtgagaagcagcgcacactctatgaagctttggaacgccagcagaagtaccaggactccctccagtccatctctacgaagatggaggccattgagctgaaactcagtgagagcccagagcctggcaggagtccagaaagccagatggctgaacatcaggcattgatggatgagattctcatgctccaggatgaaatcaatgagctccagtcctctctcgcagaggagctggtatccgagtcttgtgaggccgaccctgcggagcagctggccttgcagtccacgctcactgtcttagccgagcgaatgtccaccatcaggatgaaagcctcggggaaacggcagcttttggaggagaagttgaatgatcagctggaggaacaaaggcaggaacaggccctgcagaggtatcgctgtgaagccgatgagctggacagctggctcttgagtaccaaggccactctggacactgcgctgagtccacccaaggagcccatggacatggaggcccagcttatggactgccagaatatgctggtggaaatagagcagaaggtggtggctttatcagaactgtcagtccacaatgagaacctgctgctggagggcaaagctcacaccaaggacgaggccgagcagctggctggaaagctgagaaggctcaaggggagcctgctggagctgcagagagccctgcatgataagcagctcaacatgcagggaacagcacaggagaaggaggagagcgatgttgacctaacagccacgcagagccccggcgtccaggaatggctggcccaagctcgcaccacatggacccagcagcggcagagcagtctccagcaacaaaaagagttagaacaggaattagccgagcagaagagtctccttcgctcagtagccagtcgtggagaggagattctaattcaacattcggcggcagagacctctggtgatgctggcgaaaaacctgatgtgttatcccaggagttggggatggaaggggagaaatcatccgctgaagaccagatgagaatgaaatgggaaagcctacatcaagaatttagtaccaagcagaaactactacagaatgttctggaacaggaacaagagcaagtgctttatagcaggccaaatcgactcttgtctggtgtgccactgtacaaaggggacgtgccaacccaagataaatctgcagttacatctttgctggatggactgaaccaagccttcgaggaggtttcatcccagagtggaggggcaaagaggcagagtatacacttggagcagaagttgtatgatggagtctcagccacctctacttggttggatgacgttgaagaacgtttatttgttgccacagcacttttaccagaagaaacagagacttgtctcttcaaccaagagattcttgccaaagacattaaggaaatgtctgaagaaatggataagaacaaaaacttgttttcccaagcttttccagagaatggtgataatcgagatgttattgaagatactttgggttgtcttttgggcaggttatccttgctagactcagtagtgaatcaacgatgtcatcagatgaaagaaagacttcagcaaatactaaatttccagaatgatctgaaagtgctgtttacatcactggctgacaacaaatacatcattctgcaaaaactggcaaatgtgtttgaacagcccgtagcagaacaaatagaggcaatacaacaggctgaagatggactcaaagaatttgatgcaggaatcattgaattaaagaggcgtggtgacaagctacaggtcgagcagccgtccatgcaagaactctccaagctccaggacatgtatgatgagctgatgatgatcattggctcccggaggagtggtctgaatcagaaccttacactcaagagtcagtatgagagggccctacaagatctggctgacctgctagaaactggtcaggagaagatggcaggagaccagaaaatcatcgtgtcttccaaagaggaaatccagcaactacttgacaaacataaggaatactttcagggcctggaatctcatatgatcttgactgaaacactcttcagaaagataatcagctttgcagtccaaaaggaaacccagttccatacagagctgatggctcaggcttctgctgtactgaaacgggctcacaagaggggtgtggagctggagtacattctagagacgtggtcccatctggatgaggaccagcaggagctcagcagacagctggaggtggtggaaagcagcatcccaagcgtgggtctggtggaggagaacgaggacaggcttattgaccgcataacactctaccagcatttaaaatctagccttaatgaataccagcccaaattatatcaagtattagatgatgggaaacgacttctgatatccatcagctgctcagatctagaaagccaactaaatcaacttggagagtgctggctaagtaacaccaataaaatgtctaaggaacttcacagactggaaacaatattgaaacactggaccagatatcaaagtgaatctgcagatctaattcactggttacaatctgcaaaagaccggctagaattttggactcagcaatctgtgacagtcccacaagagctggaaatggtccgtgatcatctaaatgctttcctggagttttctaaagaagtggatgcccaatcttccctgaaatcatctgttctgagtactggaaatcagctccttcgactaaaaaaggtggacacagccacgctgcgctctgagctgtcgcgcattgatagccagtggactgacctgctaaccaatatcccagccgtccaggagaagctccaccagctccagatggataaactgccttcccgccatgccatttctgaagtcatgagttggatttctctaatggaaaatgttattcagaaggatgaagataatattaaaaattccataggttacaaggcaattcatgaataccttcagaaatataagggttttaagatagacattaactgtaaacagctgacagtggattttgtgaaccagtccgtgctacaaatcagcagtcaggatgtggaaagtaagcgtagtgataagactgattttgctgagcaacttggagcaatgaataaaagttggcaaattctgcaaggtctagtaactgagaagatccagctgttggaaggcttattggaatcttggtcagaatatgaaaataatgtacaatgtctgaaaacatggtttgaaacccaggaaaagagactaaaacaacagcatcgaattggagatcaggcttctgttcaaaatgcactgaaagactgtcaggatctggaagatttgattaaagcaaaagaaaaagaagtagagaaaattgagcagaatggacttgctttgattcagaacaagaaagaagacgtctctagcattgtcatgagcacactgcgagagctcggccaaacctgggcaaatttagatcacatggttggacaattaaagatactgctgaaatcagtgcttgaccaatggagtagtcacaaagtggcctttgacaagataaacagttacctcatggaggccagatactctctttcccgattccgtctgctgactggctccttagaagctgtgcaagttcaggtggacaatcttcagaatctccaagatgatctggaaaaacaggaaaggagcttacagaaatttggctctatcaccaaccaattattaaaagagtgtcacccacccgtgacagaaactcttaccaatacactgaaagaagtcaacatgagatggaataacttgctggaagagattgctgagcagctacagtccagcaaggccctacttcagctttggcaaagatacaaggactactccaaacagtgtgcttcgacagttcagcagcaggaggatcgaaccaatgagctgttgaaggcagccacaaacaaggacattgccgatgatgaggttgccacatggattcaagattgcaacgacctcctcaaaggactgggcacagttaaagattccctcttttttctccatgagctgggagagcaactgaagcaacaagtggatgcttccgcagcatcagctattcaatcggatcaactctctttgagtcaacacttgtgtgccctggagcaagctctctgcaaacagcagacttcattacaggctggagttcttgattatgaaacctttgccaagagtttagaagctttggaggcctggatagtggaagctgaagaaatactacaagggcaggaccctagccactcatctgacctctccacaatccaggaaaggatggaagaacttaagggacagatgttaaaattcagcagcatggctccagatttagaccgtctaaatgagcttggatataggttacccttgaatgataaggaaatcaaaagaatgcagaatctgaaccgccattggtctctgatctcctctcagactacagaaagattcagcaagttgcagtcatttttgctacaacatcagactttcttggaaaaatgtgaaacatggatggaattcctagttcagacagaacaaaagttagcagtagagatttcaggaaattatcagcaccttttggaacagcagagagcacacgagttgtttcaagccgagatgttcagtcgtcagcagattttgcactcaatcattattgatgggcaacgtcttctagaacaaggtcaagttgatgacagggatgaattcaacctgaaattgacactcctcagtaatcaatggcagggagtgattcgcagggcccagcagaggcgggggatcattgacagccagattcgccagtggcagcgctatagggagatggcagaaaagcttcgtaaatggttggttgaagtgtcctacctccccatgagtggtctcggaagtgttcctataccactgcaacaagcaaggaccctctttgatgaagtgcagttcaaagaaaaagtgtttctgcggcaacaaggcagctacatcctgactgtggaggctggcaagcaactccttctctcggcggacagtggcgctgaggccgccttgcaggccgaactcgctgaaatccaagagaaatggaaatcagccagcatgcggctggaagaacagaagaaaaaactagccttcttgttgaaagactgggaaaaatgtgagaaaggaatagcagattccctggagaaactacgaactttcaaaaagaagctttcgcagtctctcccggatcaccatgaagagctccatgcagaacaaatgcgttgcaaggaattagaaaatgcagttgggagctggacagatgacttgacccagttgagcctgctgaaggacaccctctctgcctatatcagtgctgatgatatctccattcttaatgaacgcgtagagcttctgcaaaggcagtgggaagaactatgccaccagctctccttaaggcggcagcaaataggtgaaagattgaatgaatgggcagtcttcagtgaaaagaacaaggaactctgtgagtggttgactcaaatggaaagcaaagtttctcagaatggagacattctcattgaagaaatgatagagaagctcaagaaggattatcaagaggaaattgctattgctcaagagaacaaaatacagctccaacaaatgggagaacgacttgctaaagccagccatgaaagcaaagcatctgagattgaatacaagctgggaaaggtcaacgaccggtggcagcatctcctggacctcattgcagccagggtgaagaagctgaaggagaccctggtagccgtgcagcagcttgataagaacatgagcagcctgaggacctggctcgctcacatcgagtcagagctggccaagccaatagtctacgattcctgtaactcggaagaaatacagagaaagcttaatgagcagcaggagcttcagagagacatagagaagcacagtacaggtgttgcatctgtcctcaacctgtgtgaagtcctgctgcacgactgtgacgcctgtgccactgatgccgagtgtgactctatacagcaggctacgagaaacctggaccggcggtggagaaacatttgtgctatgtccatggaaaggaggctgaaaatcgaagagacgtggcgattgtggcagaaatttctggatgactattcacgttttgaagattggctgaagtcttcagaaaggacagctgcttttcccagctcttctggggtgatctatacagttgccaaggaagaactaaagaaatttgaggctttccagcgacaggtccacgagtgcctgacgcagctggaactgatcaacaagcagtaccgccgcctggccagggagaaccgcactgattcagcatgtagcctcaaacagatggttcacgaaggcaaccagagatgggacaacctgcaaaagcgtgtcacctccatcttgcgcagactcaagcattttattggccagcgtgaggagtttgagactgcgcgggacagcattctggtctggctcacagagatggatctgcagctcactaatattgaacatttttctgagtgtgatgttcaagctaaaataaagcaactcaaggccttccagcaggaaatttcactgaaccacaataagattgagcagataattgcccaaggagaacagctgatagaaaagagtgagcccttggatgcagcgatcatcgaggaggaactagatgagctccgacggtactgccaggaggtcttcgggcgtgtggaaagataccataagaaactgatccgcctgcctctcccagacgatgagcacgacctctcagacagggagctggagctggaagactctgcagctctgtcggacctgcactggcacgaccgctctgcagacagcctgctttctccacagccttcctccaatctctccctctcgctcgctcagcccctccggagcgagcggtcaggacgagacaccccggctagtgtggactccatccccctggagtgggatcacgactatgacctcagtcgggacctggagtctgcaatgtccagagctctgccctctgaggatgaagaaggtcaggatgacaaagatttctacctccggggagctgttggcttatcaggggaccacagtgccctagagtcacagatccgacaactgggcaaagccctggatgatagccgttttcagatacagcaaaccgaaaatatcattcgcagcaaaactcccacggggccggagctagacaccagctacaaaggctacatgaaactgctgggcgaatgcagtagcagtatagactccgtgaagagactggagcacaaactgaaggaggaagaggagagccttcctggctttgttaacctgcatagtaccgaaacccaaacggctggtgtgattgaccgatgggagcttctccaggcccaggcattgagcaaggagttgaggatgaagcagaacctccagaagtggcagcagtttaactcagacttgaacagcatctgggcctggctgggggacacggaggaggagttggaacagctccagcgtctggaactcagcactgacatccagaccatcgagctccagatcaaaaagctcaaggagctccagaaagctgtggaccaccgcaaagccatcatcctctccatcaatctctgcagccctgagttcacccaggctgacagcaaggagagccgggacctgcaggatcgcttgtcgcagatgaatgggcgctgggaccgagtgtgctctctgctggaggagtggcggggcctgctgcaggatgccctgatgcagtgccagggtttccatgaaatgagccatggtttgcttcttatgctggagaacattgacagaaggaaaaatgaaattgtccctattgattctaaccttgatgcagagatacttcaggaccatcacaaacagcttatgcaaataaagcatgagctgttggaatcccaactcagagtagcctctttgcaagacatgtcttgccaactactggtgaatgctgaaggaacagactgtttagaagccaaagaaaaagtccatgttattggaaatcggctcaaacttctcttgaaggaggtcagtcgtcatatcaaggaactggagaagttattagacgtgtcaagtagtcagcaggatttgtcttcctggtcttctgctgatgaactggacacctcagggtctgtgagtcccacatcaggaaggagcaccccaaacagacagaaaacgccacgaggcaagtgtagtctctcacagcctggaccctctgtcagcagtccacatagcaggtccacaaaaggtggctccgattcctccctttctgagccagggccaggtcggtccggccgcggcttcctgttcagagtcctccgagcagctcttccccttcagcttctcctgctcctcctcatcgggcttgcctgccttgtaccaatgtcagaggaagactacagctgtgccctctccaacaactttgcccggtcattccaccccatgctcagatacacgaatggccctcctccactctgaactaagcagatgccatctgcagaagtgctggtagcataaggaggatcgggtcataagcaatcccaaactaccaacaagaggaccttgatcttggcgaaagccctcggtgtggcagctttagccctcctccagatcacatgtgtgcaaattatggcttcagaggtggaagataaacagtgacgggggaacaaacagacaacaagaaggtttggaagaaatctggtttgagactctgaaccttagcactaaggagattgagtaaggacctccaaagttccccggactcatgaattctgggcccttggcccattctgtgcacagccaaggacttcagtagaccatctgggcagctttcccatggtgctgctccaaccatcagataaatgaccctcccaagcaccatgtcagtgtcgtacaatctaccaaccaaccagtgctgaagagattttagaaccttgtaacatacaatttttaagagcttatatggcagcttcctttttaccttgttttcctttggggcatgatgttttaacctttgctttagaagcacaagctgtaaatctaaaaggcacttttttttagaggtataaagaaaaactagatgtaataaataagatcatggaaggctttatgtgaaaaaagttgaatgttatagtaaaaaaaaaaagatatttatgtatgtacagtttgctaaagccaagttttgtttgtattgatttctttgcatttattatagatattataaaata

SEQ ID NO: 289600 - DNA, 3768 bp, Artificial Sequence
  derived and/or modified sequence
cttgtcactgcccagtgtcatgttatcgggcagagactaccaacatttgtctacagtgagcattttcatacttctatacacagacaaggggaaactttcatccccacgcaggatatagctttttgctctgcagagtctaacttttgcaagtggaagcttcatggtggtggcggaggacctgagtgccctgaggatggcagaggacagctgtgtggatgcagatctcccagattgtaactgcgatgtcacaagggtgaagaagctgaaggagaccctggtagccgtgcagcagcttgataagaacatgagcagcctgaggacctggctcgctcacatcgagtcagagctggccaagccaatagtctacgattcctgtaactcggaagaaatacagagaaagcttaatgagcagcaggagcttcagagagacatagagaagcacagtacaggtgttgcatctgtcctcaacctgtgtgaagtcctgctgcacgactgtgacgcctgtgccactgatgccgagtgtgactctatacagcaggctacgagaaacctggaccggcggtggagaaacatttgtgctatgtccatggaaaggaggctgaaaatcgaagagacgtggcgattgtggcagaaatttctggatgactattcacgttttgaagattggctgaagtcttcagaaaggacagctgcttttcccagctcttctggggtgatctatacagttgccaaggaagaactaaagaaatttgaggctttccagcgacaggtccacgagtgcctgacgcagctggaactgatcaacaagcagtaccgccgcctggccagggagaaccgcactgattcagcatgtagcctcaaacagatggttcacgaaggcaaccagagatgggacaacctgcaaaagcgtgtcacctccatcttgcgcagactcaagcattttattggccagcgtgaggagtttgagactgcgcgggacagcattctggtctggctcacagagatggatctgcagctcactaatattgaacatttttctgagtgtgatgttcaagctaaaataaagcaactcaaggccttccagcaggaaatttcactgaaccacaataagattgagcagataattgcccaaggagaacagctgatagaaaagagtgagcccttggatgcagcgatcatcgaggaggaactagatgagctccgacggtactgccaggaggtcttcgggcgtgtggaaagataccataagaaactgatccgcctgcctctcccagacgatgagcacgacctctcagacagggagctggagctggaagactctgcagctctgtcggacctgcactggcacgaccgctctgcagacagcctgctttctccacagccttcctccaatctctccctctcgctcgctcagcccctccggagcgagcggtcaggacgagacaccccggctagtgtggactccatccccctggagtgggatcacgactatgacctcagtcgggacctggagtctgcaatgtccagagctctgccctctgaggatgaagaaggtcaggatgacaaagatttctacctccggggagctgttggcttatcaggggaccacagtgccctagagtcacagatccgacaactgggcaaagccctggatgatagccgttttcagatacagcaaaccgaaaatatcattcgcagcaaaactcccacggggccggagctagacaccagctacaaaggctacatgaaactgctgggcgaatgcagtagcagtatagactccgtgaagagactggagcacaaactgaaggaggaagaggagagccttcctggctttgttaacctgcatagtaccgaaacccaaacggctggtgtgattgaccgatgggagcttctccaggcccaggcattgagcaaggagttgaggatgaagcagaacctccagaagtggcagcagtttaactcagacttgaacagcatctgggcctggctgggggacacggaggaggagttggaacagctccagcgtctggaactcagcactgacatccagaccatcgagctccagatcaaaaagctcaaggagctccagaaagctgtggaccaccgcaaagccatcatcctctccatcaatctctgcagccctgagttcacccaggctgacagcaaggagagccgggacctgcaggatcgcttgtcgcagatgaatgggcgctgggaccgagtgtgctctctgctggaggagtggcggggcctgctgcaggatgccctgatgcagtgccagggtttccatgaaatgagccatggtttgcttcttatgctggagaacattgacagaaggaaaaatgaaattgtccctattgattctaaccttgatgcagagatacttcaggaccatcacaaacagcttatgcaaataaagcatgagctgttggaatcccaactcagagtagcctctttgcaagacatgtcttgccaactactggtgaatgctgaaggaacagactgtttagaagccaaagaaaaagtccatgttattggaaatcggctcaaacttctcttgaaggaggtcagtcgtcatatcaaggaactggagaagttattagacgtgtcaagtagtcagcaggatttgtcttcctggtcttctgctgatgaactggacacctcagggtctgtgagtcccacatcaggaaggagcaccccaaacagacagaaaacgccacgaggcaagtgtagtctctcacagcctggaccctctgtcagcagtccacatagcaggtccacaaaaggtggctccgattcctccctttctgagccagggccaggtcggtccggccgcggcttcctgttcagagtcctccgagcagctcttccccttcagcttctcctgctcctcctcatcgggcttgcctgccttgtaccaatgtcagaggaagactacagctgtgccctctccaacaactttgcccggtcattccaccccatgctcagatacacgaatggccctcctccactctgaactaagcagatgccatctgcagaagtgctggtagcataaggaggatcgggtcataagcaatcccaaactaccaacaagaggaccttgatcttggcgaaagccctcggtgtggcagctttagccctcctccagatcacatgtgtgcaaattatggcttcagaggtggaagataaacagtgacgggggaacaaacagacaacaagaaggtttggaagaaatctggtttgagactctgaaccttagcactaaggagattgagtaaggacctccaaagttccccggactcatgaattctgggcccttggcccattctgtgcacagccaaggacttcagtagaccatctgggcagctttcccatggtgctgctccaaccatcagataaatgaccctcccaagcaccatgtcagtgtcgtacaatctaccaaccaaccagtgctgaagagattttagaaccttgtaacatacaatttttaagagcttatatggcagcttcctttttaccttgttttcctttggggcatgatgttttaacctttgctttagaagcacaagctgtaaatctaaaaggcacttttttttagaggtataaagaaaaactagatgtaataaataagatcatggaaggctttatgtgaaaaaagttgaatgttatagtaaaaaaaaaaagatatttatgtatgtacagtttgctaaagccaagttttgtttgtattgatttctttgcatttattatagatattataaaata

SEQ ID NO: 289601 - DNA, 1766 bp, Artificial Sequence
  derived and/or modified sequence
cagatatttttgatctgcacttggttgaatctacagatgtaaaacccacggatgcagagggctgactgtggctagaaaatgtgctgcagggagcacgtggaaacagctgatgagcacctgcagcccctgtttgggagcagctggggtgtgctgcctgccgttcacccatcagtcaaatcgaggcttcatgaaggcaaaggcagtggcatctcagaatttgacaaacctcctttcatcagtgactggttccatttcaggctggcccaaagtcaaataggccccaaagacaaagacgagaagtacatgaagatgcccacaagcaagtcagcccaattctgagacgaagtcctgacatcaccaaatcgcctctgacaaagtcagaacagcttctgaggatagatgaccatgatttcagcatgaggcctggctttggaggccctgccattcctgttggtgtggatgtgcaggtggagagtttggatagcatctcagaggttgacatggactttacgatgaccctctacctgaggcactactggaaggacgagaggctgtcttttccaagcaccaacaacctcagcatgacgtttgacggccggctggtcaagaagatctgggtccctgacatgtttttcgtgcactccaaacgctccttcatccacgacaccaccacagacaacgtcatgttgcgggtccagcctgatgggaaagtgctctatagtctcagggttacagtaactgcaatgtgcaacatggacttcagccgatttcccttggacacacaaacgtgctctcttgaaattgaaagctatgcctatacagaagatgacctcatgctgtactggaaaaagggcaatgactccttaaagacagatgaacggatctcactctcccagttcctcattcaggaattccacaccaccaccaaactggctttctacagcagcacaggctggtacaaccgtctctacattaatttcacgttgcgtcgccacatcttcttcttcttgctccaaacttatttccccgctaccctgatggtcatgctgtcctgggtgtccttctggatcgaccgcagagccgtgcctgccagagtccccttaggtatcacaacggtgctgaccatgtccaccatcatcacgggcgtgaatgcctccatgccgcgcgtctcctacatcaaggccgtggacatctacctctgggtcagctttgtgttcgtgttcctctcggtgctggagtatgcggccgtcaactacctgaccactgtgcaggagaggaaggaacagaagctgcgggagaagcttccctgcaccagcggattacctccgccccgcactgcgatgctggacggcaactacagtgatggggaggtgaatgacctggacaactacatgccagagaatggagagaagcccgacaggatgatggtgcagctgaccctggcctcagagaggagctccccacagaggaaaagtcagagaagcagctatgtgagcatgagaatcgacacccacgccattgataaatactccaggatcatctttccagcagcatacattttattcaatttaatatactggtctattttctcctagatgcttgtaattctacaaatttcacatttccatggcatgcactacagaaataactgtataatgaaaaagtatttaaggatatggttaaaaaaaaatcccaggacccacccatgttttcactatcccttctgcagctttccaaagctacattgacgagacacttactggttt

SEQ ID NO: 289602 - protein, 155 aa, Artificial Sequence
  derived and/or modified sequence
MEFAQISRVKTFQENLSAFKRDPQINILLLPLHTGSNGLTIIEATHVLLVEPILNPAHELQAIGRVHRIGQTKPTIVHRFLIKATIEERMQAMLKTAERRFFEEQALFCFHDITPFSHPWSLTTAILQLRDLVICELFFIYFKNFLICFLSSFSI

SEQ ID NO: 289603 - protein, 595 aa, Artificial Sequence
  derived and/or modified sequence
MFYFRGCGRWVAVSFTKQQFPLARLSSDSAAPRTPHFDVIVIGGGHAGTEAATAAARCGSRTLLLTHRVDTIGQMSCNPSFGGIGKGHLMREVDALDGLCSRICDQSGVHYKVLNRRKGPAVWGLRAQIDRKLYKQNMQKEILNTPLLTVQEGAVEDLILTEPEPEHTGKCRVSGVVLPEDQLPCYLTHTNPRVDEIVLKNLHLNSHVKETTRGPRYCPSIESKVLRFPNRLHQVWLEPEGMDSDLIYPQGLSMTLPAELQEKMITCIRGLEKAKVIQPGYGVQYDYLDPRQITPSLETHLVQRLFFAGQINGTTGYEEAAAQGVIAGINASLRVSRKPPFVVSRTEGYIGVLIDDLTTLGTSEPYRMFTSRVEFRLSLRPDNADSRLTLRGYKDAGCVSQQRYERACWMKSSLEEGISVLKSIEFLSSKWKKLIPEASISTSRSLPVRALDVLKYEEVDMDSLAKAVPEPLKKYTKCRELAERLKIEATYESVLFHQLQEIKGVQQDEALQLPKDLDYLTIRDVSLSHEVREKLHFSRPQTIGAASRIPGVTPAAIINLLRFVKTTQRRQSAMNESSKTDQYLCDADRLQEREL

SEQ ID NO: 289604 - DNA, 4986 bp, Artificial Sequence
  derived and/or modified sequence
atgtctgccgggggtagagatgaagaaaggagaaagctagccgatattattcaccattggaatgccaatcgcctggacctatttgagataagccagcccaccgaggatcttgagtttcacggcgtgatgcggttctatttccaggataaggccgctgggaatttcgccacaaaatgcatccgtgtcagcagcacagccacaacacaagatgtgatcgagactctggccgagaagtttcgtccggatatgagaatgctgtcctcacccaagtacagcttgtacgaggtccatgtctccggggagcgaaggctggatatagacgagaaacccctggtggtccaactgaattggaataaggacgaccgagagggtcggtttgtgctgaagaatgaaaacgacgccattcctccgaagaaggcacagagcaacgggcctgagaaacaagagaaagaaggcgtaatccaaaacttcaagagaaccttatccaagaaagaaaaaaaggagaagaaaaaacgtgagaaagaggccctgcggcaggccagcgacaaggatgaccgcccctttcagggcgaggacgtggaaaattcaagattggccgccgaggtgtacaaggatatgccagagacgtctttcaccagaactatctcaaatccagaagtcgtaatgaagaggcgccggcaacagaagttggagaaacggatgcaagaattccggtcctctgatggccgacccgactccggtggcacactgaggatttacgccgattctcttaagccaaacataccttacaagaccattctgctgagcacaactgatcccgccgatttcgctgtcgcagaggctttagagaaatacggactggagaaagagaatccgaaagattattgtatcgccagagtgatgctgccccccggggcacagcacagcgatgagaagggtgcaaaagaaatcatcctcgacgacgacgaatgccctctgcagatcttccgcgagtggccctctgataaaggcattcttgtgtttcagttgaagcggaggccccccgaccatatccctaagaagaccaaaaaacatctcgaggggaagacccccaaggggaaggagcgcgcagacggatcaggatacggtagtacattgccacctgagaaactgccttatctcgtcgaactatctccgggtcgccgcaatcacttcgcatactacaattatcacacctatgaagatgggtctgatagcagagataaaccaaagctctacaggctccaactgagcgttactgaggtggggacggaaaaactggatgataactcaatccaactcttcgggccaggtatccaaccacaccactgcgacctgaccaacatggacggtgttgtgacggtgacaccaagatccatggatgctgagacctatgtggagggacagcggattagcgaaaccaccatgctgcagagcggtatgaaagtccagttcggcgcaagccacgtctttaaatttgtagacccttctcaggatcacgctctcgctaagaggtcagttgatggaggtcttatggttaagggcccccgacacaagccaggaatcgtgcaggaaacgacctttgacctgggaggcgacatccatagcggaactgcccttcctacctctaaatccacaacccgtctcgattccgaccgagtctcatcagcgagtagtacagcagaaaggggtatggttaagcctatgattcgagtcgagcagcagccagactatcggcgtcaggaatcccgaactcaagacgcctcaggcccggagctgattcttcctgcatctattgaatttcgcgagagctccgaggactctttcctgtccgcaattataaactataccaattcatcaacagtgcatttcaagctgtcccctacctatgttctatatatggcctgccgatatgtgctgtccaatcaatataggcctgatatcagccccacagagagaactcacaaagtgatcgcagtggtaaacaaaatggtgtctatgatggaaggagtaatacaaaagcagaagaatattgcaggggctttggcattttggatggcgaacgcaagtgaactgctgaatttcatcaagcaggaccgtgatctttcccggattaccttggacgcccaggatgtcctcgcccacctggtccagatggcctttaagtacctggtgcactgtttgcagtcagaactgaacaattatatgccagccttcctggacgaccccgaggagaattcactgcagcggccgaagattgacgacgtgctccacacactgacaggcgcgatgagtttactgcgtcggtgcagggtgaatgccgcactaactatccaactgttctcacaactattccactttatcaacatgtggctatttaaccggcttgtgaccgacccagacagcggtttgtgctctcactattggggcgcaatcatcagacagcagctaggacatattgaagcttgggccgaaaaacaggggttggaactggcagctgactgccatctctctcggattgtgcaggcaaccactcttctcacaatggacaaatatgccccagatgatattcccaacattaattccacttgtttcaaactcaattctcttcagctgcaggcactcctgcagaactatcattgcgctcccgatgagccatttatccctacagacctcatcgagaatgtggtgaccgtggccgagaacaccgctgacgaattggcacggagtgacgggagagaggtacagctagaggaggatccggaccttcagttgccgttcttactgcctgaagacggctattcctgtgatgtggttagaaatatcccaaatggtttgcaggaattccttgaccccctgtgccagaggggcttctgccgcctcattccacacacacgctcgccgggcacatggaccatatacttcgagggcgcagactatgaaagccatctcctcagagagaacactgaactggccatcccacttcggaaggaaccggaaattattaccgtgacactcaagaaacagaatgggatgggactgtctattgtcgccgcaaagggagctggacaagacaagttgggaatctacgtgaagagtgtcgtcaagggcggggccgcggacgtcgacggtagactcgcggctggcgaccagctgctgtccgtggatgggaggtctctggtcggcttatcccaggagcgggccgcagagctgatgacacgaacctcaagcgtcgttacactggaggtcgctaaacagggtgctatatatcacggactggcaactcttctcaatcagccctcccctatgatgcagaggatttccgaccgccgcggcagcggaaaacccagacctaagtctgaagggtttgagctctacaacaactctacccagaacgggagcccagagagcccacaactcccatgggccgagtattccgaacccaaaaaattacctggggacgatcgcttgatgaagaaccgcgccgaccatagatctagccccaacgtcgctaatcagccacctagtccggggggaaagtcggcctacgcatccggtacgacagccaaaatcaccagcgtctcaaccggcaacctctgcactgaggagcagacacctcctcctcggcccgaagcatatcccatccccacgcagacttacacgagggaatactttacctttcccgccagtaaatcacaggatcgcatggcccccccacaaaaccagtggcccaactatgaggaaaagcctcacatgcatacggatagtaaccacagtagcatcgccatccaacgcgtgaccaggagccaagaagagctgcgggaggacaaagcataccagcttgagcgacaccgcattgaagccgccatggaccggaagtctgacagtgacatgtggatcaaccagtccagttcactggattcatcaacctcctcacaggagcacctgaaccactcgagtaaatctgtgactccagcatccacacttaccaagtcaggacccggccggtggaaaaccccagcggcaatccccgccaccccagtggcagtgagtcaacctatccgtactgaccttcccccacctcctcccccgccaccggtccattacgcgggtgacttcgatggcatgtctatggacctccccctgcctccgcctccatcagccaaccagattggacttccgagcgcgcaagtcgcggcggcagagaggcggaaaagagaggagcaccagagatggtacgaaaaagaaaaggcccggctggaggaggagcgagaaagaaagcgcagggagcaagaacgcaagctcgggcaaatgaggacccagagcttgaaccctgctccattcagccctttgaccgctcagcagatgaagccagaaaagccttcaacgctgcaaagaccccaggaaacggtgatacgagagctgcagcctcagcagcaacctcgcactattgagaggcgggatctgcagtatatcacagtgagtaaggaggagctatcctcaggcgattcattgtccccagatccctggaaaagggatgctaaggagaagttggaaaagcagcagcaaatgcatattgttgatatgctctccaaggaaattcaggaactgcagagcaagcctgatcggtcagcagaagaaagcgataggctgagaaagctgatgctggagtggcagttccagaagcgcctacaggaaagcaagcagaaggacgaagatgatgaggaagaggaggatgatgacgtagacaccatgttgatcatgcagagactcgaggcagaaaggagggccaggcagacagcaatgccagcgatctccgtgctggaccttctgcaagatgaagagcggagaaggcagcagcaactggaagagatgcgaaagagagaggcagaagaccgcgctcggcaggaggaggagcggagaagacaggaggaggaacgcactaagagggacgcagaagaaaaatag

SEQ ID NO: 289605 - DNA, 4998 bp, Artificial Sequence
  derived and/or modified sequence
atgtctgccggcggaagagatgaggaaagaaggaagctggcagatatcattcaccactggaatgccaacaggcttgacctttttgagatcagtcagccaaccgaggatttagagtttcacggcgtgatgcggttttatttccaagacaaggccgcaggtaatttcgctaccaagtgtatacgcgtgtcttccaccgcaaccacgcaagacgtcattgagaccctggcggagaaattccgacctgacatgaggatgctatccagtcccaagtactccctctacgaggtgcatgtctctggcgagcgcaggctagatatagacgagaaaccacttgtagtccagcttaattggaacaaggacgaccgggagggaagatttgtgctgaaaaacgagaatgatgccattcccccaaaaaaggctcaaagcaatggcccggagaagcaggaaaaggagggggttattcagaattttaaaagaacactgtcaaagaaggagaagaaggaaaaaaaaaaacgtgaaaaggaggcactccggcaggctagtgacaaagacgataggcctttccagggggaggatgtggaaaattcccggttggctgcggaggtctacaaagatatgccagaaacttccttcactaggaccatctccaatcccgaagtggtaatgaagaggaggcgacaacaaaaacttgagaagcgtatgcaggaattcaggagtagcgatggccgcccggactctggcggaactctgcgtatttatgctgactccttgaaaccaaacataccatataaaacaatactactctctaccacagaccctgcagattttgccgtggcagaggctcttgagaaatacggcctcgaaaaggagaatcctaaagattattgtattgcacgagtcatgctgccacccggggctcaacatagcgatgaaaaaggcgccaaggaaattatcctagatgatgacgagtgtccgctccaaatcttcagagagtggccaagtgataaggggatactcgtcttccagctcaagcgccgtcctcctgatcacattcctaagaagaccaagaaacacctggagggcaaaacccccaagggtaaggaaagggccgacggatctggctacggcagtactctgcctccggaaaagctgccctaccttgtagagctctctcccggtaggagaaatcactttgcatactacaattatcacacgtatgaggacgggagtgacagccgggacaagcctaaactgtataggcttcagttgtccgtcactgaggtaggtaccgaaaaactggacgataattccatacaactgtttggcccaggtattcaaccacatcactgcgatctgacaaatatggatggagttgtcaccgtgacccccaggtccatggatgcagaaacctatgtggagggtcagagaatttctgaaacaaccatgttacagtccgggatgaaggtacagtttggcgcttctcatgttttcaaatttgtcgacccctcccaggatcatgcactggccaagcgctctgtggacggagggctgatggtaaagggaccgaggcacaaaccaggcatcgttcaagagaccacctttgatctcggcggtgatattcatagcggcactgccttgccgaccagtaaatccaccaccaggctcgactcagaccgagttagcagcgcttctagtacagctgaacgcggcatggttaagcctatgatacgagttgagcaacaaccagattacaggcggcaagaaagccgaacccaggacgctagcggccctgagttaatcctgccagcctcaatcgagtttcgtgaatctagtgaggactctttcctgagtgcgatcatcaactataccaatagcagcactgtgcatttcaagcttagtcctacctacgtgttgtacatggcttgtcggtatgtgctctccaaccagtatagacccgacatcagcccaactgaacgaacccacaaagttattgcagtggtcaacaagatggtaagtatgatggaaggtgtcatacagaaacaaaaaaacatcgctggagcccttgcgttttggatggccaacgcaagtgagctgttgaacttcatcaagcaggatcgagatctgagcaggattacattggacgcccaggatgtgctcgcacacctggtccagatggcttttaaatacctcgttcattgcttacaatccgagctgaacaattatatgcctgcatttcttgatgatcccgaagagaactcactgcaaagacctaaaatagacgatgttttacatacattgaccggcgctatgagcctcctgcgacgctgccgagttaatgctgctctgacgatacagctcttctctcagctgttccacttcatcaatatgtggctgttcaataggcttgtgaccgatcccgactctgggctttgctcccactactggggtgctatcatccgccaacagcttggccatattgaggcctgggccgaaaagcaggggttggaactcgctgctgattgccacctcagtaggatcgttcaagccactactttgctgaccatggataagtatgccccagacgacatccctaacatcaatagtacttgtttcaagctgaactctctccagctgcaggctttactgcaaaactaccactgtgcaccggacgagccctttatcccgacagacttgatagagaatgtcgtgactgtggctgaaaatactgccgatgaactggcacggagcgatggccgggaggtccagctcgaagaggacccggacctgcagctacccttccttttacccgaggatggctactcgtgcgatgtagtccggaacatccctaacggtctccaggaatttctggatcccctctgccagcgtggcttttgtcgtctgattccccatactcgatccccaggcacttggactatttacttcgagggagcagattatgagtctcacctgctcagagagaataccgagctcgcccagccactgcgaaaggaacccgagattataactgtgaccctgaagaaacagaatggtatgggcctgtccatcgtggccgctaagggcgccggccaagacaaactgggtatctatgttaagtccgtggtcaaagggggcgccgccgatgttgacggccggctcgcagccggggatcaactgttgagtgtcgatgggcgttccctcgtaggtctctcccaggagcgggctgctgagctgatgaccaggacgtcctcagtggtcacgctggaggtggctaaacagggcgcgatctaccatggactggcaactttacttaaccagccaagtcccatgatgcagagaatctccgaccgccggggatccggaaagcctcggccaaaatccgaaggcttcgagctgtataataactcaacacagaacgggagtcctgagtcaccgcagttaccttgggctgagtattcagagccaaagaagctgcctggcgatgaccggctcatgaagaatcgggcagaccatagatcttctcctaacgtggcaaatcaacccccatcacctggaggcaagagcgcttatgcaagcggcacaaccgcgaaaattacctccgtctcaaccggaaatctctgcaccgaagagcagaccccccctccgcgccccgaagcctatcccataccaacccagacctatacccgcgagtactttacgttccccgcctccaagtctcaagaccgcatggctcccccgcagaaccagtggccaaactacgaagagaagccgcacatgcatacagatagcaatcacagttctatcgcaatccagagagtaacaaggtcacaggaggaactacgggaggataaggcctaccagctagagcgccacaggattgaggcggccatggaccgtaagagcgactccgacatgtggatcaaccaaagtagctctctggatagctccacgtcaagccaggaacatctgaaccattctagcaagtctgtgacacccgcctccaccctcaccaaaagtggtccaggcaggtggaagacaccagctgcaatcccggccacacccgtagccgtatctcagcctatccgtaccgacctgccacctccaccaccaccaccacctgttcactacgccggcgactttgacggaatgtcaatggacttgccacttccaccacctccatctgccaatcagatcggtctcccttccgcacaggtagctgcagctgagcgtcggaagcgcgaggaacatcaacggtggtacgagaaagaaaaagcccgtctagaagaagaacgggagcgaaaacgacgagaacaggagagaaaactggggcagatgcgaacacagtcccttaatcctgcccccttcagtcccttgactgcccagcaaatgaagccagaaaagccctccacactgcagagacctcaggagaccgtgatacgggagcttcagccccagcagcaaccaaggactattgagagacgggacctccagtacataacagtcagcaaggaggaactgtcatctggcgatagtctgagtccagatccttggaagcgtgacgctaaggagaagctggaaaagcagcagcagatgcacatcgtggatatgctttccaaagaaatccaggagcttcagagcaaaccagatagatcagccgaagagtcagaccgcctgcgaaagctaatgctggagtggcagttccagaagcggctgcaggagagcaagcagaaagacgaagatgatgaagaagaggaagacgacgatgtggacaccatgctgattatgcagcgtctggaggcggaaaggcgggccaggcaaactgctatgccggccatcagtgttctggatctcctacaggacgaggaacgccgccggcagcagcagctcgaggaaatgcggaaacgcgaagccgaagaccgggctaggcaggaggaggaaaggcgccgccaggaagaggagcgcaccaagagggatgccgaggagaaggtaatggtactgtag

SEQ ID NO: 289606 - DNA, 4986 bp, Artificial Sequence
  derived and/or modified sequence
atgtctgctgggggcagagatgaggagaggaggaagctggccgacatcatccaccactggaatgccaaccggctggacctgtttgagatcagccagcccacagaggacctggagttccacggcgtgatgaggttctacttccaggacaaggccgccggcaactttgccaccaagtgcatccgggtgagcagcacagccaccacccaggacgtcatcgagaccctggccgagaagttccggccagacatgaggatgctgagcagccccaagtacagcctgtatgaggtgcacgtgtctggagagcggcggctggacattgatgagaagcccctggtggtgcagctgaactggaacaaggatgaccgggagggccgctttgtgctgaagaatgaaaatgatgccatcccccccaagaaggcccagagcaatggacctgagaagcaggagaaggagggcgtcatccagaacttcaagaggaccctgagcaagaaggagaagaaggagaagaagaagcgggagaaggaggccctgcggcaggccagtgacaaggatgaccggcccttccagggagaagatgtggagaacagccggctggccgctgaggtgtacaaggacatgcctgagaccagcttcaccaggaccatcagcaaccctgaggtggtgatgaagagaagacggcagcagaagctggagaagaggatgcaggagttccgcagcagtgatggccgcccagacagcggcggcaccctgcgcatctatgctgacagcctgaagcccaacatcccctacaagaccatcctgctgagcaccacagatcctgctgactttgctgtggccgaggccctggagaagtatggcctggagaaggagaaccccaaggactactgcatcgcccgggtgatgctgcccccaggggcccagcacagtgatgagaagggggccaaggagatcatcctggatgatgatgaatgtcccctgcagatcttccgggagtggcccagcgacaagggcatcctggtgttccagctgaagagaagacctccagaccacatccccaagaagaccaagaagcacctggagggcaagacccccaagggcaaggagcgggcagatggcagcggctacggcagcaccctgcccccagagaagctgccctacctggtggagctgagccctggaagaagaaaccactttgcctactacaactaccacacctatgaagatggcagtgacagccgggacaagcccaagctgtaccgcctgcagctgtctgtgacagaggtgggcacagagaagctggatgacaacagcatccagctgtttggacctggcatccagccccaccactgtgacctgaccaacatggatggagtggtgacagtgacccccaggtccatggatgctgagacctacgtggagggccagaggatcagcgagaccaccatgctgcagagcggcatgaaggtgcagtttggagccagccacgtgttcaagtttgtggaccccagccaggaccacgccctggccaagaggtctgtggatggcggcctgatggtgaagggccccaggcacaagccaggcatcgtgcaggagaccacctttgacctgggcggggacatccacagcggcacagccctgcccaccagcaagagcaccacccggctggacagcgacagagtgagcagcgccagcagcacagctgagcggggcatggtgaagcccatgatccgggtggagcagcagcctgactaccgccggcaggagagcaggacccaggatgccagcggccctgagctgatcctgcctgccagcattgagttccgggagagcagcgaggacagcttcctgagcgccatcatcaactacaccaacagcagcacagtgcacttcaagctgagccccacctacgtgctgtacatggcctgccgctacgtgctgagcaaccagtacagaccagacatcagccccacagagaggacccacaaggtgattgctgtggtgaacaagatggtgtccatgatggagggcgtcatccagaagcagaagaacattgctggggccctggccttctggatggccaatgccagcgagctgctgaacttcatcaagcaggaccgggacctgagccgcatcaccctggatgcccaggatgtgctggcccacctggtgcagatggccttcaagtacctggtgcactgcctgcagagcgagctgaacaactacatgcctgccttcctggatgatcctgaggagaacagcctgcagaggcccaagattgatgatgtgctgcacaccctgactggagccatgagcctgctgcggcgctgccgggtgaatgctgccctgaccatccagctgttcagccagctgttccacttcatcaacatgtggctgttcaaccggctggtgacagatcctgacagcggcctgtgcagccactactggggcgccatcatccggcagcagctgggccacatcgaggcctgggccgagaagcagggcctggagctggccgctgactgccacctgagccgcatcgtgcaggccaccaccctgctgaccatggacaagtatgccccagatgacatccccaacatcaacagcacctgcttcaagctgaacagcctgcagctgcaggccctgctgcagaactaccactgtgccccagatgagcccttcatccccacagacctgattgaaaatgtggtgacagtggctgaaaatacagcagatgagctggcccggagtgatggccgggaggtgcagctggaggaggaccctgacctgcagctgcccttcctgctgcctgaagatggctacagctgtgatgtggtgaggaacatccccaacggcctgcaggagttcctggaccccctgtgccagaggggcttctgccgcctcatcccccacaccaggagccctggcacctggaccatctactttgaaggagctgactatgagagccacctgctgagagaaaatacagagctggccatccccctgaggaaggagcctgagatcatcaccgtgaccctgaagaagcagaatggcatgggcctgagcatcgtggccgccaagggggccggccaggacaagctgggcatctacgtgaagtctgtggtgaagggcggcgctgctgatgtggatggccgcctggccgccggggaccagctgctgtctgtggatggccgcagcctggtgggcctgagccaggagagagctgctgagctgatgaccaggaccagctctgtggtgaccctggaggtggccaagcagggcgccatctaccacggcctggccaccctgctgaaccagcccagccccatgatgcagaggatcagtgaccggcggggcagcggcaagccccggcccaagtctgagggctttgagctgtacaacaacagcacccagaatggcagccctgagagcccccagctgccctgggccgagtacagcgagcccaagaagctgcctggagatgaccggctgatgaagaacagagctgaccacaggagcagccccaacgtggccaaccagccccccagccctgggggcaagagcgcctatgccagcggcaccacagccaagatcacctctgtgtccacaggcaacctgtgcacagaggagcagaccccaccacccaggcctgaggcctaccccatccccacccagacctacacccgggagtacttcaccttccctgccagcaagagccaggacaggatggccccaccccagaaccagtggcccaactatgaggagaagccccacatgcacacagacagcaaccacagcagcatcgccatccagagggtgaccaggagccaggaggagctgcgggaggacaaggcctaccagctggagcggcaccgcatcgaggccgccatggacaggaagagtgacagcgacatgtggatcaaccagagcagcagcctggacagcagcaccagcagccaggagcacctgaaccacagcagcaagtctgtgaccccagccagcaccctgaccaagagcggccctggccgctggaagaccccagctgccatcccagccacccctgtggccgtgtcccagcccatcagaacagacctgcccccacctcctcctcctcctcctgtgcactacgccggggactttgatggcatgtccatggacctgcccctgcccccacctccttctgccaaccagatcggcctgcccagcgcccaggtggccgctgctgagaggaggaagcgggaggagcaccagcgctggtatgagaaggagaaggcccggctggaggaggagcgggagaggaagaggcgggagcaggagaggaagctgggccagatgaggacccagagcctgaacccagcccccttcagccccctgacagcccagcagatgaagccagagaagcccagcaccctgcagaggccccaggagaccgtcatccgggagctgcagccccagcagcagcccaggaccatcgagcggcgggacctgcagtacatcaccgtgtccaaggaggagctgagcagcggggacagcctgagcccagacccctggaagagagatgccaaggagaagctggagaagcagcagcagatgcacatcgtggacatgctgagcaaggagatccaggagctgcagagcaagccagacagatctgctgaggagagtgaccggctgaggaagctgatgctggagtggcagttccagaagaggctgcaggagagcaagcagaaggatgaagatgatgaggaggaggaggatgatgatgtggacaccatgctgatcatgcagaggctggaggccgagcggcgggcccggcagacagccatgcctgccatctctgtgctggacctgctgcaggatgaggagcggcggcggcagcagcagctggaggagatgaggaagcgggaggctgaagatcgggcccggcaggaggaggagcggcggcggcaggaggaggagaggaccaagagagatgctgaggagaagtag

SEQ ID NO: 289607 - DNA, 4998 bp, Artificial Sequence
  derived and/or modified sequence
atgtctgctgggggcagagatgaggagaggaggaagctggccgacatcatccaccactggaatgccaaccggctggacctgtttgagatcagccagcccacagaggacctggagttccacggcgtgatgaggttctacttccaggacaaggccgccggcaactttgccaccaagtgcatccgggtgagcagcacagccaccacccaggacgtcatcgagaccctggccgagaagttccggccagacatgaggatgctgagcagccccaagtacagcctgtatgaggtgcacgtgtctggagagcggcggctggacattgatgagaagcccctggtggtgcagctgaactggaacaaggatgaccgggagggccgctttgtgctgaagaatgaaaatgatgccatcccccccaagaaggcccagagcaatggacctgagaagcaggagaaggagggcgtcatccagaacttcaagaggaccctgagcaagaaggagaagaaggagaagaagaagcgggagaaggaggccctgcggcaggccagtgacaaggatgaccggcccttccagggagaagatgtggagaacagccggctggccgctgaggtgtacaaggacatgcctgagaccagcttcaccaggaccatcagcaaccctgaggtggtgatgaagagaagacggcagcagaagctggagaagaggatgcaggagttccgcagcagtgatggccgcccagacagcggcggcaccctgcgcatctatgctgacagcctgaagcccaacatcccctacaagaccatcctgctgagcaccacagatcctgctgactttgctgtggccgaggccctggagaagtatggcctggagaaggagaaccccaaggactactgcatcgcccgggtgatgctgcccccaggggcccagcacagtgatgagaagggggccaaggagatcatcctggatgatgatgaatgtcccctgcagatcttccgggagtggcccagcgacaagggcatcctggtgttccagctgaagagaagacctccagaccacatccccaagaagaccaagaagcacctggagggcaagacccccaagggcaaggagcgggcagatggcagcggctacggcagcaccctgcccccagagaagctgccctacctggtggagctgagccctggaagaagaaaccactttgcctactacaactaccacacctatgaagatggcagtgacagccgggacaagcccaagctgtaccgcctgcagctgtctgtgacagaggtgggcacagagaagctggatgacaacagcatccagctgtttggacctggcatccagccccaccactgtgacctgaccaacatggatggagtggtgacagtgacccccaggtccatggatgctgagacctacgtggagggccagaggatcagcgagaccaccatgctgcagagcggcatgaaggtgcagtttggagccagccacgtgttcaagtttgtggaccccagccaggaccacgccctggccaagaggtctgtggatggcggcctgatggtgaagggccccaggcacaagccaggcatcgtgcaggagaccacctttgacctgggcggggacatccacagcggcacagccctgcccaccagcaagagcaccacccggctggacagcgacagagtgagcagcgccagcagcacagctgagcggggcatggtgaagcccatgatccgggtggagcagcagcctgactaccgccggcaggagagcaggacccaggatgccagcggccctgagctgatcctgcctgccagcattgagttccgggagagcagcgaggacagcttcctgagcgccatcatcaactacaccaacagcagcacagtgcacttcaagctgagccccacctacgtgctgtacatggcctgccgctacgtgctgagcaaccagtacagaccagacatcagccccacagagaggacccacaaggtgattgctgtggtgaacaagatggtgtccatgatggagggcgtcatccagaagcagaagaacattgctggggccctggccttctggatggccaatgccagcgagctgctgaacttcatcaagcaggaccgggacctgagccgcatcaccctggatgcccaggatgtgctggcccacctggtgcagatggccttcaagtacctggtgcactgcctgcagagcgagctgaacaactacatgcctgccttcctggatgatcctgaggagaacagcctgcagaggcccaagattgatgatgtgctgcacaccctgactggagccatgagcctgctgcggcgctgccgggtgaatgctgccctgaccatccagctgttcagccagctgttccacttcatcaacatgtggctgttcaaccggctggtgacagatcctgacagcggcctgtgcagccactactggggcgccatcatccggcagcagctgggccacatcgaggcctgggccgagaagcagggcctggagctggccgctgactgccacctgagccgcatcgtgcaggccaccaccctgctgaccatggacaagtatgccccagatgacatccccaacatcaacagcacctgcttcaagctgaacagcctgcagctgcaggccctgctgcagaactaccactgtgccccagatgagcccttcatccccacagacctgattgaaaatgtggtgacagtggctgaaaatacagcagatgagctggcccggagtgatggccgggaggtgcagctggaggaggaccctgacctgcagctgcccttcctgctgcctgaagatggctacagctgtgatgtggtgaggaacatccccaacggcctgcaggagttcctggaccccctgtgccagaggggcttctgccgcctcatcccccacaccaggagccctggcacctggaccatctactttgaaggagctgactatgagagccacctgctgagagaaaatacagagctggcccagcccctgaggaaggagcctgagatcatcaccgtgaccctgaagaagcagaatggcatgggcctgagcatcgtggccgccaagggggccggccaggacaagctgggcatctacgtgaagtctgtggtgaagggcggcgctgctgatgtggatggccgcctggccgccggggaccagctgctgtctgtggatggccgcagcctggtgggcctgagccaggagagagctgctgagctgatgaccaggaccagctctgtggtgaccctggaggtggccaagcagggcgccatctaccacggcctggccaccctgctgaaccagcccagccccatgatgcagaggatcagtgaccggcggggcagcggcaagccccggcccaagtctgagggctttgagctgtacaacaacagcacccagaatggcagccctgagagcccccagctgccctgggccgagtacagcgagcccaagaagctgcctggagatgaccggctgatgaagaacagagctgaccacaggagcagccccaacgtggccaaccagccccccagccctgggggcaagagcgcctatgccagcggcaccacagccaagatcacctctgtgtccacaggcaacctgtgcacagaggagcagaccccaccacccaggcctgaggcctaccccatccccacccagacctacacccgggagtacttcaccttccctgccagcaagagccaggacaggatggccccaccccagaaccagtggcccaactatgaggagaagccccacatgcacacagacagcaaccacagcagcatcgccatccagagggtgaccaggagccaggaggagctgcgggaggacaaggcctaccagctggagcggcaccgcatcgaggccgccatggacaggaagagtgacagcgacatgtggatcaaccagagcagcagcctggacagcagcaccagcagccaggagcacctgaaccacagcagcaagtctgtgaccccagccagcaccctgaccaagagcggccctggccgctggaagaccccagctgccatcccagccacccctgtggccgtgtcccagcccatcagaacagacctgcccccacctcctcctcctcctcctgtgcactacgccggggactttgatggcatgtccatggacctgcccctgcccccacctccttctgccaaccagatcggcctgcccagcgcccaggtggccgctgctgagaggaggaagcgggaggagcaccagcgctggtatgagaaggagaaggcccggctggaggaggagcgggagaggaagaggcgggagcaggagaggaagctgggccagatgaggacccagagcctgaacccagcccccttcagccccctgacagcccagcagatgaagccagagaagcccagcaccctgcagaggccccaggagaccgtcatccgggagctgcagccccagcagcagcccaggaccatcgagcggcgggacctgcagtacatcaccgtgtccaaggaggagctgagcagcggggacagcctgagcccagacccctggaagagagatgccaaggagaagctggagaagcagcagcagatgcacatcgtggacatgctgagcaaggagatccaggagctgcagagcaagccagacagatctgctgaggagagtgaccggctgaggaagctgatgctggagtggcagttccagaagaggctgcaggagagcaagcagaaggatgaagatgatgaggaggaggaggatgatgatgtggacaccatgctgatcatgcagaggctggaggccgagcggcgggcccggcagacagccatgcctgccatctctgtgctggacctgctgcaggatgaggagcggcggcggcagcagcagctggaggagatgaggaagcgggaggctgaagatcgggcccggcaggaggaggagcggcggcggcaggaggaggagaggaccaagagagatgctgaggagaaggtgatggtgctgtag

SEQ ID NO: 289608 - DNA, 5249 bp, Artificial Sequence
  derived and/or modified sequence
ccaggcggaggccaagtcggaggacgcggcgcggccgcggaggcggaggcagccgcggaggcggaggcggccggcggggggtggcgaggggcgccgggcccccgcggacctgtcgtcctcggcccgtcctccggccccggccccgcgcggctgaggaggcgcggccaggaccatgtcggcgggcggccgtgacgaggagcggcggaagctggccgacatcatccaccactggaacgccaaccggctggacctgttcgagatcagccagccgaccgaggatttggagttccatggagtgatgagattttattttcaagataaagctgctggaaactttgcaacaaaatgtattcgggtctctagtactgccaccactcaagatgtaatcgaaacgctcgcggagaaatttcgacctgatatgcgaatgctgtcctctcccaagtattcactctatgaagtgcatgtcagcggagaaagaagattggatatagatgagaaacctctagttgtacaactgaattggaacaaagatgatcgggaaggcagatttgttcttaagaatgagaatgacgccattcctcctaagaaggctcaaagtaatggacctgaaaagcaggaaaaagaaggggttatccagaacttcaagagaactctctcaaagaaagaaaagaaggaaaaaaagaagagagaaaaagaggcattgcgacaggcatctgataaagatgatagacctttccaaggggaggatgttgaaaattctcgactggctgctgaggtttacaaagacatgccggaaaccagctttactcgaaccatttctaatcctgaggtggttatgaaacgacggaggcagcaaaaattggaaaagagaatgcaggaatttcggagctcagatgggcggcctgattcaggtggaacattgagaatttatgcagatagtttaaaaccaaatattccctacaagacaatcctgctgtctactacagatcctgcagactttgctgtggctgaagctttagagaagtatggtctggaaaaagaaaaccctaaggattactgcatcgcccgggttatgcttcctcctggagcccagcattctgatgaaaagggtgctaaagaaattattcttgatgatgatgagtgtcctttacaaatcttcagggaatggccaagtgacaaagggattttagtctttcagttgaagaggaggccaccagaccacatcccaaagaaaaccaagaaacacttggaaggcaagacacccaagggaaaggagagagctgacgggtctggctatggctccacccttcctccggagaagctgccctatttagtagagttaagcccagggagaaggaatcactttgcctactacaactatcacacttacgaagatggttctgactctagagataagccaaagctttaccgccttcagttaagtgttactgaagttgggacagaaaagttggatgacaactctatccagttgtttggcccaggaattcagccccatcactgtgaccttaccaacatggatggagtggtcactgtgacgcccagaagtatggacgcagaaacctacgtggaaggccagcgcatctcagaaaccaccatgctgcagagtggcatgaaagtgcagtttggggcgtcccatgtatttaagtttgtggaccccagtcaggatcatgctcttgcaaaaagatctgtggatggaggcctgatggttaagggcccaagacataaacctggaattgttcaggagacaacttttgatttgggaggagatattcatagtgggacagcattaccgacaagcaagagcaccactaggctggacagcgacagagtgtcgtctgcctctagcacagccgagcggggaatggtgaagccgatgatcagagtagaacagcagccagattatcgcaggcaagaaagcagaacacaggatgcttctgggcctgagctgatactacctgcaagcattgaattcagggaaagttctgaagattcatttttgtctgccattataaattatactaatagctctacagtccactttaagttgtcccctacatatgtattatatatggcatgccggtatgtattgtccaaccagtacagacctgacatcagccctacagagcgcacacataaagtcattgcagtcgtcaacaagatggtgagcatgatggagggtgtcatccagaaacagaagaatattgcaggggcacttgccttctggatggcaaatgcatctgaacttctcaacttcattaagcaagaccgagaccttagtcggatcacactggatgctcaagatgttttagcacatttggttcaaatggcatttaaatacttggttcactgtcttcaatcagaacttaataattacatgccagcctttctagatgaccctgaagagaacagtctgcaacgaccaaaaatagatgatgtgctgcacacgctcacaggagccatgtccttgctacgacgctgcagagtcaatgccgccctgaccatccagctcttctctcagctcttccacttcatcaatatgtggctgttcaatagattggtgaccgacccagattcggggctgtgctcccattactggggtgcgattatccgtcagcagttgggccatattgaagcctgggctgagaagcaggggctggaactggctgcggactgtcatctgagcaggatcgtgcaggcaacgactttgcttaccatggataagtatgcacctgatgacattccaaatataaacagcacctgctttaagttaaattcattacaacttcaagccttattacagaactatcactgtgcacctgatgagccttttatcccaacggatcttatagaaaatgtagtgactgtggctgaaaacactgccgatgagctggcccgcagtgatggaagggaagtgcagttggaggaggatcctgatctgcagctgccgtttcttttgccagaagatggttattcttgtgatgttgtcagaaacattccaaatggtttacaagaatttttagaccctctgtgccagagaggattttgcaggttaattcctcacacacgttcaccaggtacttggacaatatattttgaaggtgcagattatgaaagtcaccttctgcgtgagaacacagagctggctcagcctctgaggaaagaacctgaaataatcactgtgaccctaaaaaagcagaatggaatgggccttagcattgttgcagcaaagggtgctggtcaagataaactaggaatctatgtgaagtcggttgtgaaaggaggtgctgcagatgtggatggacgtctagctgcaggtgatcagctcctcagtgtggatggacgaagtctggttggactctctcaggaaagggcggcagaactcatgacaagaacaagctctgtggtgacactggaagtagcaaagcagggtgccatctaccacggtctggccacccttctcaatcagccatcccccatgatgcagagaatttcagatcgtcgtggctcaggtaaaccccgaccaaagagtgaaggctttgagctctataataattcaactcaaaatgggtctcctgagagtcctcagctgccttgggcagaatatagtgaaccaaagaaattgcctggtgatgacagactgatgaaaaatagagctgatcaccgttccagccccaacgtagcaaatcagcctcctagtcctggagggaaaagtgcatatgcctctggaacaacagcgaagataacatctgtctctactggaaacctctgcactgaggagcagacgcctccgcctagacctgaagcctaccccatccccactcagacgtacaccagagagtattttaccttcccagcttccaaatcccaggatcggatggctcctcctcagaaccagtggccaaattatgaggaaaagccacatatgcacacagatagtaatcattccagtattgcaattcagcgtgttacacgttcccaagaagaacttcgagaagataaagcttaccaacttgagcggcatcgaatagaggcagctatggaccgaaagtctgatagtgatatgtggataaatcagagctcctcactggactccagtacctctagccaggagcatctgaaccattcctctaagtcggtcacccctgcttccacactgaccaaaagtggccctggccgttggaaaacaccagcagccataccggccacccctgtggccgtctcccagccaatccgaacagacctgcctccgccacccccgccacctccagtccactatgccggtgatttcgatggaatgtccatggatttgcctctcccaccacccccttccgccaaccagatagggctgccgtctgcgcaggtggctgctgctgaacggagaaagagagaagaacatcagcgttggtatgagaaggagaaggcccgcctggaggaggagcgggagaggaagcggagagagcaggagaggaagttgggccagatgcgcactcagtccttaaaccctgctccgttttctcccctgactgcacagcagatgaagcccgaaaagccttccacactccagcggccacaggaaacagtcattcgggagctgcagcctcagcagcagccccgcacgatcgagcgcagagacttgcagtacattacagtcagcaaagaggagctttcctcgggggacagtctgtcccccgacccgtggaagcgggacgccaaggagaagctggagaagcagcagcagatgcacatcgtggacatgctgagcaaggagatccaggagctccagagcaaaccggaccgcagcgccgaggagagcgaccggctgcgcaagctcatgctggagtggcagttccagaagagactccaggagtcgaagcagaaggacgaagatgacgaggaggaggaggacgatgatgtggacaccatgctgatcatgcagcgcctggaggctgaacgaagagcgaggcagactgctatgccagcaatctctgttctagatttgttgcaggacgaggagcggaggcggcagcagcagttagaagagatgcgcaagcgggaagcggaagaccgagcgaggcaagaggaagagcgccggcggcaggaggaggagcgaacaaaacgagacgctgaagaaaaggttatggtcctttaagggcagctagaattttaccaagttagcctgaacgtaatcgattggctggggcagagcgggctggaagttctgtgtttct

SEQ ID NO: 289609 - DNA, 4986 bp, Artificial Sequence
  derived and/or modified sequence
atgagcgccggcggccgggacgaggagcggcggaagctggccgacataattcatcactggaatgcaaacaggctcgacctgtttgaaatatcacagcccactgaggaccttgagttccacggcgtaatgcgcttttattttcaagacaaggcggctggcaattttgcaaccaaatgtatcagagtgtcctcaactgctacaacccaagacgtgattgagacactcgctgaaaagtttaggcctgatatgagaatgctcagctcaccgaagtatagcctgtatgaggtccatgttagcggagagcgtaggctggacatcgacgagaaaccgttggtagtgcagctcaattggaacaaagacgacagggaaggtagattcgtgttaaaaaacgagaatgatgcaattcctcctaagaaagcgcagagtaatggacctgagaaacaggagaaggaaggtgtgattcagaacttcaagcgcaccctgagcaaaaaggaaaaaaaagagaaaaagaagagagaaaaggaggccctcaggcaggcttctgataaggatgaccgacccttccagggagaggacgtggagaattccagactggcggcggaggtttacaaggatatgccagagacctccttcacccgcaccatttcaaatcctgaagttgttatgaaacggagacgacaacaaaaactcgaaaaacggatgcaggaatttagaagctctgatggcaggccagatagcggaggtacactgaggatctacgctgactcccttaaaccaaacattccctataagaccattctcctctctactactgacccagcggactttgccgtcgccgaagccctggagaagtacggtctcgagaaggaaaaccccaaagattactgcatcgcccgggttatgcttcctcctggagcccagcacagcgacgaaaagggtgcaaaggagatcattcttgacgacgatgagtgccctctgcagatttttagagaatggccctcagacaagggaatcctggttttccagctcaagcggcggcctccggatcacatccccaaaaagacaaagaaacatctggaggggaagacgccaaaaggcaaagagcgggcagacggctctgggtacggaagtactttacctcctgaaaagctcccgtaccttgtggagctgtcccctggtaggagaaaccacttcgcctattacaactatcacacctatgaagacggcagcgattcacgggacaaacctaaattgtatcggctccagctttctgttacagaggtgggtacggagaagttagacgataacagtatccagctgttcggaccaggtattcagccacaccattgcgacctaaccaacatggacggagtcgtgacagtcacaccacgcagcatggacgccgagacatatgtcgaggggcagcggatttcggagacaaccatgctgcagagtgggatgaaggtacagttcggcgcctcacacgtctttaagtttgtggacccctcccaggaccacgcattagccaagaggagcgttgatggggggttaatggtaaaaggaccccgtcacaagcctggtattgttcaggaaacaacctttgatctcgggggggatatccacagcgggaccgccctgcccaccagcaagagtacaaccagacttgatagcgaccgggtttccagcgcatcatcaacagctgagcgcggcatggtcaaaccgatgattagggtagagcagcaacccgactatcgaaggcaggagtcccgaacacaggacgcatcaggcccagaactgattctaccagcctctatcgagtttcgcgaatcgtccgaagacagtttcttgtcagctattatcaactacacgaacagctctacagttcacttcaagctgtcgcctacatatgtcctgtacatggcttgccggtatgttctgtccaaccagtatagacccgatatctcccctaccgaaaggacacacaaagtgatcgctgtggtgaataagatggtgagtatgatggagggcgtaatacagaaacagaaaaacatcgcaggagccctggcgttctggatggccaatgccagcgaactgctcaatttcattaagcaggacagagatttaagcaggatcacgcttgatgcccaggatgtgttagctcacctggtacagatggctttcaaatacctagtgcactgcctgcagagcgagctgaataactatatgcctgcctttctggacgaccctgaggagaactctctacaaaggcccaaaatcgacgatgtacttcacaccctgacaggcgctatgtccctcctcagacgctgccgcgttaacgccgccctcaccatacaacttttttctcagctcttccactttattaacatgtggctgttcaacaggctggtcacagatccagatagcgggctgtgtagtcattattggggcgccattatcagacaacagctgggtcacattgaagcttgggctgagaaacagggattggagctggcagccgattgtcacctgagcagaatcgtgcaggccaccaccctgcttaccatggacaagtatgcccctgacgatataccgaacatcaacagcacttgcttcaagctaaacagcctccagcttcaggcgttactgcagaactaccattgtgctccagatgaaccattcattcctactgacctcatagagaatgtggtcacagtggcagagaatactgccgacgaactggcacggagtgacggtcgcgaggtgcaactagaagaggaccctgatctgcagctgcccttcctgttgcccgaggacggctacagttgcgacgtagtgagaaacatcccaaacggtctgcaagagtttctcgaccctttgtgccagagagggttttgtagactgatccctcatacacgctcaccaggcacatggacaatctacttcgaaggcgcagattatgagtcacatctgctgcgggagaataccgaactggccattccacttcgcaaggagccggagattattactgtaactctgaaaaaacagaatggtatgggcctctcaatcgtcgccgctaagggagctggacaggataaactgggcatctatgtgaaatccgtggtgaagggaggagccgcggacgtggacggtcggctggcggccggtgatcagcttctgtctgtggacggccgttcactggttggactttcacaggaaagggccgcagagctgatgaccagaaccagcagtgtagtgacgttggaggtggccaagcaaggagctatttaccacggcctagctacacttctgaatcaaccttccccaatgatgcagaggatttccgacagacgagggtcgggcaagcctcggcctaagtccgagggctttgagttatataataatagcacccaaaatgggagccctgaaagcccccagctgccctgggctgaatacagcgagcccaagaaattgcccggtgacgaccggctgatgaaaaaccgagcagaccacaggtccagccccaatgttgctaatcagcccccttccccaggtggaaaatctgcatatgccagcgggacaaccgcgaagatcacatccgtgtcaacgggcaatctgtgtactgaagagcagacaccccccccccggcccgaggcctatcccattcctacacaaacctacaccagagagtactttaccttcccagcttccaaatcccaggatcgcatggctccaccacaaaaccagtggcctaactatgaagagaagcctcacatgcacacagatagcaatcatagtagcattgctatccagcgtgtgactagatcccaggaagagctgcgcgaagataaagcctatcagcttgagcggcataggatcgaggctgcaatggatcggaagtctgactctgacatgtggatcaatcaatctagttcactggactctagtacttcctcccaggagcatctgaaccatagcagtaaatccgttacgccagcaagtacgcttacaaaaagtggccccggacgttggaagacccctgctgccattcccgctacccctgtggcagtgtcacagcctattaggaccgacctaccaccaccaccacctcctcctcctgtgcattacgccggagatttcgacggtatgtctatggatttaccactgccccctccaccatccgcaaatcagattgggctgcccagtgcacaggtggctgcagccgagaggagaaagcgggaggagcaccaaagatggtacgagaaagagaaagcccgactggaagaggagcgtgagcgtaaaagacgcgagcaggagagaaaacttggccagatgcggacccagagtctcaacccagccccctttagccccctgacggctcagcagatgaagcccgaaaagccctctacgctccaaagaccgcaggagactgtgatacgggaacttcagccccaacagcagccaagaacaatcgagaggagggatcttcaatacattacagtgtcaaaggaagagcttagctccggcgatagtctctccccagatccgtggaaacgcgatgcgaaagagaaactagagaagcaacaacagatgcacatagtggacatgctcagcaaggagatccaggagctgcagtctaagcctgacagatccgcggaggaaagcgatcgcctgcggaagctaatgctggaatggcagttccagaagagactccaagagagcaagcagaaggatgaggatgacgaagaagaggaagacgacgacgtggacaccatgctgatcatgcagcggctcgaagccgagcgcagggcccgccagacggctatgccggcgattagtgtcctggacctccttcaggacgaagagcggagacggcagcaacagctggaggaaatgagaaagcgcgaggccgaggatcgcgcacggcaggaagaggaacgcaggagacaggaggaagaacggactaagcgtgatgctgaggagaagtag

SEQ ID NO: 289610 - DNA, 4998 bp, Artificial Sequence
  derived and/or modified sequence
atgagcgccggcggccgggacgaggagcggcggaagctggccgacattattcaccactggaatgcaaacaggttggatttgtttgagatttcccaacccactgaagatttggaattccatggcgtgatgaggttctatttccaggataaggctgccggcaatttcgcaactaaatgtattagggtttcaagtaccgcaaccacccaggatgtcatcgagaccttggctgaaaaatttcgacctgatatgagaatgttgtctagccctaaatatagcttgtatgaagttcatgtgagcggtgagcggaggttagatatagatgaaaagcctctggtcgtgcagctcaattggaataaggatgatagagaggggcgcttcgtgttgaaaaacgaaaatgacgctattccccctaaaaaggcccaaagtaatggcccagaaaaacaggaaaaggagggtgtgatccagaacttcaagcggacactttccaagaaagagaagaaggaaaagaagaaacgcgagaaggaggccctgcgccaagctagcgataaggatgatcggccatttcagggggaggacgtcgaaaattcccggcttgctgctgaggtgtacaaagacatgcccgagacaagcttcaccaggaccattagcaatccagaggtagtgatgaaacggcgccggcaacaaaaactggagaagagaatgcaggaatttcggagcagcgacgggagacctgactcaggaggcacactgaggatatatgctgatagcctgaaaccaaacattccctacaaaactatcctgctttctactaccgaccctgccgacttcgctgtggctgaagcactggagaaatacggcctggagaaagagaaccccaaggactattgcatagcccgggtcatgctgccacccggcgcacaacactcagacgagaagggcgcgaaagagatcatcctggacgatgatgagtgcccccttcagatctttcgggaatggccgtccgataaagggattcttgtctttcagcttaagagacgccccccggaccacattcctaaaaagacgaagaagcaccttgagggtaagaccccaaaggggaaggaacgagccgatgggagcggctacgggagcaccctgccaccagagaagctcccctatctcgttgaactgtcgcctgggcgcagaaaccactttgcttactacaactaccacacttatgaggacggttctgactccagagacaagcccaagctctatcgcctgcaactgtccgtaaccgaggttggcaccgagaaacttgacgataactcgattcagctgtttggccccgggattcagcctcaccactgcgacctaacaaatatggatggagtggtaactgtaacccctaggtccatggacgccgagacatacgtagagggtcaaagaattagcgagacaaccatgttgcagagcggaatgaaagttcagttcggtgcatcccatgtcttcaagtttgtggacccctctcaagatcacgccctggccaagcgatccgtcgatggcggattgatggtgaaagggccccggcataagcctgggattgttcaggaaaccacatttgatcttgggggcgacattcattcaggcactgccctgcccacctcaaagtctaccacccgcctggatagtgaccgcgtctctagtgcctcatccactgctgagcgtggaatggtgaaacctatgattcgcgtcgaacagcaacccgattaccggaggcaggaaagccgaacccaggatgcgtcgggccctgaactgattctcccagcttcaatcgaatttcgagagtcatctgaggatagtttcctatccgcgatcattaactacacaaactctagtaccgtacacttcaaactcagtccaacatacgtcctctatatggcttgccgctatgtgctgtcaaaccaataccgccccgatatcagtcccactgagcgaactcataaggttatcgccgtagtcaacaagatggttagcatgatggagggggttatccagaagcaaaagaacatagccggtgccctggctttttggatggcaaatgcgtcagagctgctgaatttcattaaacaggaccgcgacctcagccgcatcaccctggacgcgcaggatgtgttagcccatttagtgcagatggcctttaagtatctggtccactgtctgcaatcagagctcaacaattacatgccagcatttctggatgaccctgaggaaaacagcctgcaacgaccaaaaatcgacgatgtcctgcataccctcaccggggcaatgtcgctgctgcggcggtgccgagttaacgccgcccttactatccagttgttcagtcagctgtttcacttcataaacatgtggttgtttaacagactggtgacagatcctgactccggactgtgcagtcattactggggagccattatccgccagcagctcggccacatcgaagcctgggccgaaaaacaaggcctggaactagccgcagattgccacctgtccagaattgtgcaggctactaccctcctgacaatggacaagtatgcccccgatgacattcctaacataaacagtacatgttttaaacttaatagtttacagctccaggccctgctgcaaaactaccattgcgccccagatgaaccattcattcccactgacctcattgagaatgtggtgactgtggcagaaaatacagctgacgagcttgccagatctgatgggcgcgaggttcagctggaggaggaccctgatctacagctaccattcttgctgcccgaggatggctacagctgcgacgtagtgcgtaacattccgaatgggttgcaggaattccttgatccactgtgccaaagaggtttttgccgcctgatcccacacacaagatcccctggtacgtggactatttattttgaaggcgccgactacgagtctcatctgttgcgggaaaataccgagcttgcacagccattaagaaaggagccggaaatcatcactgtgaccctcaaaaaacagaatggcatgggattgtccatcgtggccgctaaaggtgctgggcaggacaagctggggatatatgtaaaatcagttgtgaagggcggcgccgctgatgtggacggccgactcgccgccggagaccagctgctgtctgtggatggccggtcactggtagggctcagccaagagcgggctgctgagctaatgacccgaaccagcagcgtggtgacactcgaggtagccaaacagggagctatctaccatggcttggcaactctgctgaatcagccatcacctatgatgcagcggatttccgatcggcggggttccggtaaacccaggcccaaatccgaaggctttgagctatataacaactccacccagaacggaagcccagagagtcctcagctgccctgggcagaatattcagagcccaaaaaactccccggcgacgacaggttgatgaagaatcgggccgaccaccgttcatcccccaatgtggcgaaccaacctcctagtccaggaggtaagtctgcctacgcctcggggaccacagcgaaaatcacttccgtgagtaccggtaatctgtgtacagaggagcagacaccccctcctagacccgaggcttaccctattcccactcaaacctacaccagagagtacttcacatttccagcttcaaagagtcaggaccgtatggctcccccccaaaaccagtggcccaactacgaagagaaaccccacatgcatacagattccaatcattcttctattgcaatccagagagtcaccaggagtcaggaggaactgcgcgaagacaaggcctaccaacttgaacgccatcgtatagaggcagccatggaccgcaagagcgattccgatatgtggatcaaccagagttcctctttggatagctcaacgagcagccaggaacatctgaatcattcttcaaagtccgtgacccccgcatcaacattaacaaaatcaggccctgggaggtggaaaaccccggccgccataccagctacaccagtggcagtgtcacagcctatacgcaccgatttacctccacccccccctccgccccccgtgcactatgccggagactttgacgggatgtccatggacttgccactgccacccccccctagcgccaaccaaattggacttcccagcgctcaagtggctgctgcagagagaagaaagcgcgaggagcatcaaagatggtatgaaaaggaaaaagcccggctggaggaggaacgggaacgcaagagacgggagcaagaacgcaagctcggccagatgagaacccagtctctgaatcctgcacccttttcacctctgaccgcacaacagatgaagccagagaagccttctactctgcagagaccccaggagactgttattcgggagctacagcctcagcaacagcctcgtactatcgagaggagggatctgcagtatattaccgtcagtaaggaggagctatcgtcaggggacagcctcagcccggacccatggaaacgcgatgccaaggaaaagcttgaaaaacagcaacaaatgcacattgtcgatatgctctctaaagagattcaggagctgcaatccaagcccgacaggagtgcagaagaatctgatagactgcgcaaactcatgctggagtggcagttccagaaaagactgcaagagagcaaacaaaaggacgaggacgacgaggaggaggaggatgacgatgttgacactatgttgattatgcagcggctggaggccgaacgcagggcaagacaaacagctatgccagcaatctccgttctggacctattgcaggacgaggagaggcgacgacagcagcagttggaggagatgcggaaaagggaggccgaggaccgtgcgcggcaggaagaagagcgccggcggcaggaggaggagcgtacaaaaagggacgccgaggaaaaagtcatggtactatag

SEQ ID NO: 289611 - DNA, 4985 bp, Artificial Sequence
  derived and/or modified sequence
atgtcagccggtggcagggatgaggaacgccgaaagctggccgacattatacaccattggaatgccaatagactcgaccttttcgagattagccagcctactgaagacctcgaatttcacggtgtgatgcgcttctactttcaggataaggccgcagggaactttgcaaccaagtgcatcagggtatcgtccacggccacaacccaggacgtgattgagacactcgccgagaaattcaggccagacatgaggatgctgagtagtcccaaatactccctgtatgaagtacacgtctctggtgagcgaagactggacatcgacgagaagccgttggtagtccagctgaattggaacaaggacgaccgggaagggcgatttgtgcttaagaatgaaaacgacgccatcccccctaaaaaggcccaatctaacggacctgagaagcaagagaaggagggcgttatccagaacttcaagcgcaccttgagtaaaaaagaaaaaaaggaaaagaagaaacgcgagaaagaggcactgcgccaggccagcgacaaggatgaccggcctttccagggcgaggacgtagagaacagccgattagccgctgaggtgtataaggacatgccggagactagctttacacgaactatttcaaatcctgaggtggtgatgaaacgcaggagacagcagaaactcgaaaagaggatgcaggagtttcgctcctcagacggcagaccggactctggaggaaccctacggatttacgccgattccctcaagccaaacattccatataagacaattcttttgtccacaacagaccctgcggatttcgcagtggccgaagccctggaaaaatatggcttggaaaaggagaaccccaaggattattgcatcgccagagtgatgctgccacctggtgctcagcattcagatgaaaaaggggctaaagagatcatactcgatgacgacgaatgccccctgcaaattttcagggaatggccatcagacaagggaatcctggttttccaacttaaacgcaggcctcccgaccacatcccaaaaaagactaaaaagcacctggaaggaaaaacgcccaagggcaaggagcgcgcagacggaagtgggtatggttccactctgcccccagagaaacttccctacctggttgagctgagccctggcagaaggaaccattttgcctactacaattatcatacatacgaggatggatctgattcgagggacaagcccaaactgtatcgcctgcagctcagcgtgacggaggttggcacagaaaaattagacgacaattctatccaactgttcggtcctggaattcagccccatcactgcgatttgaccaatatggacggcgtggtgactgtcacccccagatccatggatgctgaaacatacgtggaaggccaacgtatctcagaaactaccatgcttcaatcgggaatgaaagtccaattcggggcatctcacgttttcaaatttgtggacccctcccaggatcacgcattagctaagcgcagtgttgacggcggtctgatggtcaaaggtccgcgtcacaagccaggaatcgtacaggagacgacgttcgatctgggaggtgatattcatagtggtaccgctttgcccactagcaagtcaacaacaaggttagacagcgacagagtgagctccgcatcctccactgccgaacggggtatggtcaaacccatgattagagtggaacaacagccggattacagaaggcaggagtcccgtacccaggatgcttctggccctgagttaattctcccggcatctatcgagtttcgagagtccagtgaggactccttcttgagcgctattattaactatactaactctagtaccgtgcacttcaagttaagtcccacttacgtactttatatggcatgtaggtacgtgctgtccaatcaatacagacccgacatatcccctactgagcgcacccataaggtcattgccgtagtgaacaagatggtaagcatgatggaaggggtaatccaaaaacagaagaatattgccggagcccttgccttttggatggccaacgcctctgaactgctcaattttattaaacaagaccgagatttgagtagaatcacgctagatgcgcaggacgtgctcgcccacctggtgcagatggctttcaaatacctcgtgcattgcttgcagtctgaactcaataattatatgccagccttcctggatgatccagaggagaactctctgcagcggccaaagatcgacgatgtactccacaccctcactggagccatgtctctgctgcggaggtgccgggtcaatgccgcactgactatccaattgttttctcaactgttccactttatcaatatgtggctattcaatagactggtgaccgatcccgattcagggctttgtagtcattattggggcgcaattattcggcagcagctgggacacatcgaggcttgggcggagaagcagggattggaactggctgctgattgtcatctcagccggattgtgcaggctacgaccctgcttaccatggacaagtatgctccagatgatattcccaatattaattctacttgctttaagcttaacagcctgcagctgcaggctcttttgcagaactaccactgtgccccagacgaaccgttcatcccgacggaccttatcgagaatgtagtcaccgtggccgagaacacagcagacgagctcgcaagatctgatggccgagaggtccagctcgaggaggacccagatctgcagctcccgttcctgttacctgaagacggttatagctgtgatgtggtgcgaaatattcccaatgggcttcaggaattcctagacccgctgtgtcagcgtgggttttgccgtcttatcccacatacacggtcaccgggaacatggaccatctatttcgagggcgctgactatgaatcccatctcttgcgcgagaataccgagctcgctattcccttgaggaaagagcctgaaatcattactgtgacgttgaagaagcagaacggcatgggtctctccattgttgcagccaaaggcgctggacaggacaagttgggaatctacgtgaaatctgtagttaagggaggtgcagctgatgtggatggaagactagcagccggagatcagctgctatccgtcgacgggcgaagcctggttggtctgtcacaagagagagctgccgagctcatgacaaggacgagcagcgtcgtaaccttggaagttgccaaacaaggagcaatatatcatggactcgccaccctcctcaaccaaccttcacccatgatgcagcggatcagcgatcgtcggggttccgggaaaccacgcccaaagtccgaaggcttcgagctctataataacagcacacagaacggaagcccagagtcaccacagttgccttgggctgagtatagcgagccaaaaaagctcccgggagatgatcgactgatgaaaaatagggcagaccaccgcagctcaccaaatgtggctaatcaacctcctagtccaggcggaaagagcgcatacgcatccggtacaacggccaaaatcacctctgtgagcacaggcaatctctgtacggaagagcaaaccccgccaccccgacccgaggcataccccattccgacacagacctatacaagggagtatttcacattcccggcaagcaagtcgcaggatagaatggctcctccccagaaccagtggcctaactatgaggagaaaccacatatgcatactgattcaaatcactcttccatagccattcagcgcgttactagaagccaggaagagcttcgggaagataaggcataccagctggagcggcacagaatcgaggccgcaatggaccgcaagtcggatagtgacatgtggatcaatcaatcctcctctttagattcatctacgtcgtctcaggaacatctgaatcactctagcaaaagtgtgacacctgccagtaccctgacgaaatcaggccctggacggtggaaaacaccggcagccatccccgctacccctgtggcagtgtctcagcccattcgcacagaccttcctccgcctcctccgccaccccctgtccattacgccggagactttgatggaatgagcatggacctgcctttgcctccacccccaagcgcgaaccaaatcgggctgccaagtgctcaggtagccgctgccgaacgacgtaagagagaagagcaccagagatggtacgagaaggaaaaggcccgtctggaggaagagagggaacgaaaacgaagggagcaggaacgtaagctgggccagatgaggactcaaagtctcaaccctgccccattttcacctctgaccgctcagcagatgaaaccagagaaaccttccacccttcaacgaccacaggaaaccgtgattcgcgaactccaaccacagcagcagcccagaaccattgagcggagggatctccagtatataacggtgtctaaggaggagctctcgtccggtgacagtctgtcccctgacccatggaaacgagacgctaaggagaagctggagaaacagcagcaaatgcacatcgtggatatgctatcaaaagagattcaggaattacagtccaaacccgatagatcagcagaggagtcagatcggctacgaaaacttatgctggagtggcagtttcagaaacgcctgcaagaatccaagcaaaaggacgaggacgatgaggaggaggaagatgacgatgtcgacaccatgctgattatgcagcgcctggaggccgagcgcagggcccgacagacagccatgcccgcaattagtgttctggatcttctccaggacgaggaaaggcggagacagcagcaactggaagagatgcgcaagagagaagcggaggacagggctcggcaagaggaggagagacgccgacaggaagaggagaggacaaaacgcgatgcagaggagaagta

SEQ ID NO: 289612 - DNA, 4998 bp, Artificial Sequence
  derived and/or modified sequence
atgtccgccggaggcagagatgaagagcgcaggaagcttgcggatatcatccatcattggaatgcaaatcggcttgatctctttgagattagtcagcctaccgaggacctggagtttcatggcgtgatgcggttctactttcaggacaaagcagctggcaatttcgccaccaagtgcattcgggtgtcaagtaccgcgactactcaggatgtgattgaaactctggctgaaaaattcagaccggacatgcggatgctatcatcccctaagtacagcctgtacgaagtccacgttagcggcgagagacgactggacattgacgagaagccacttgtggtgcagttgaattggaacaaagatgatcgagagggcaggtttgtccttaagaacgaaaatgacgctatcccgcctaagaaggcacagtccaacgggcctgaaaaacaggagaaagaaggagtcatccagaattttaagcgcactctgtcaaaaaaggaaaaaaaagaaaagaaaaagagggaaaaagaggccctcagacaggcttcagacaaagacgaccggcctttccagggcgaagacgtagagaacagccggctggctgctgaggtctacaaggatatgccagaaacctctttcacaaggaccatttctaaccccgaagtcgtcatgaagaggcgtaggcaacagaagctggagaaaagaatgcaagaatttcggtcatccgacggtcgacccgacagcggcggaacattgagaatctacgccgattcacttaagccgaatattccctacaagaccatactgctttcaactacagacccggcagactttgcagtcgctgaagctctggaaaaatatgggctcgagaaggaaaatcctaaagactactgtattgcccgtgtgatgctgccaccaggagctcagcactccgatgagaaaggtgccaaggagatcatcttggacgacgacgagtgtcccttgcagatcttccgcgaatggccttcagataagggcattctggtcttccaacttaagcgcagacccccagaccacatccccaagaaaacaaaaaagcacctcgaggggaaaacccctaagggtaaagagagggcagacggatcaggttatgggtctactctgccgcctgaaaaactgccgtatctggtcgagctgagtccaggtcgcaggaatcactttgcctattacaattaccacacctacgaggatggtagtgactccagggataaaccaaagctgtaccgactccagctcagcgtcaccgaggttgggacagaaaagctggacgacaactccatacaactgtttggtcctgggattcagccacatcactgcgacttaacgaatatggatggggtcgtgaccgttacacccagatctatggacgccgaaacatacgtggagggtcagcgcataagcgagacaaccatgctgcaaagtggcatgaaggtgcagtttggagctagtcacgtctttaagttcgtcgatccatcccaggaccacgcactggccaagcgctcggttgacggcggtctgatggtcaagggaccaaggcacaagcctggaattgtacaggagacaacgtttgacttgggcggagacatccatagcgggaccgctctccccacatccaagagcactacaaggctcgattccgaccgcgtgtcttctgccagctcaaccgccgagcgcggtatggttaagcccatgattagagtcgaacagcagcctgattaccgacgtcaagagagccgcactcaagatgcttccggacctgaactcatcctgccagctagtattgagttcagggaatcttcagaggacagtttcctaagcgctatcattaactacactaatagtagcactgtgcatttcaaactgagtccaacctacgtcctgtatatggcctgcaggtacgtactctccaatcagtacaggcccgacataagtcctaccgagcggacccacaaagtgattgctgtggtaaacaaaatggtaagtatgatggagggggtgattcaaaagcagaaaaatattgcgggagctctggctttttggatggccaacgcctcagagcttctcaactttatcaaacaagaccgagatttgtcccggatcacccttgatgctcaggatgtcctagcacacctggtccagatggcctttaagtacctggtgcactgtctgcagtctgagttgaacaattacatgccagcgtttttagacgaccccgaagaaaactccctccagaggcctaagatagacgatgtgctccacaccctgaccggagcaatgagcctcctgagaaggtgccgcgtgaatgccgcactcaccatccaattgttctctcagctcttccattttataaacatgtggctgtttaaccgcctagtgacagatccggacagcggcctctgctctcactattggggtgccatcatccggcagcaacttggacacatcgaagcctgggctgaaaaacagggcctggagctggcggctgactgtcatttgtccaggatcgtacaggccacgacacttctgaccatggataagtatgcacccgatgatattccaaacatcaattccacctgctttaagctaaactccttgcagctccaggccctgctgcagaactatcattgcgccccagacgagccgttcattcctaccgatttaattgaaaatgtggtcaccgtggccgaaaataccgcggacgagctcgctcggtctgatggaagagaagtccaactcgaggaggatcctgacttgcagctgccattcctcctccccgaggatggctactcgtgcgatgttgtgcggaatattccaaacgggctacaggaattcctcgatcccctatgtcagcgtgggttttgccggctgattccacatacccgctcgccaggaacttggaccatctattttgagggagcagattatgagagccatctcttgagggagaacactgagctagcccagcccttgcggaaggaacccgaaattatcacggtgacactgaaaaagcagaatgggatgggactgagtatcgtggcggctaaaggagctggccaagataaactaggcatttacgttaagtccgtcgtgaagggaggcgctgccgacgtggatggaagactggccgctggtgaccagctgctttctgttgacggaagaagtctggtgggtctgtctcaggagagagctgccgagctaatgacacgtacaagctccgtcgtcactttagaagttgcaaagcaaggcgctatctaccacggtctggctacactgctcaaccagccatcccctatgatgcagcgcattagcgatcgcagaggaagcgggaaacccaggccaaagtcagaaggttttgagctttacaacaattctactcagaatggctctccagagagtccgcagctgccctgggctgagtactctgagcccaagaagctgcccggagacgaccgcttaatgaaaaatcgcgcagaccatcgctcctctccgaacgtcgctaatcagcctccctctccaggcggaaaatcggcctacgccagcggcaccaccgccaaaatcacctccgttagcacggggaatttatgcaccgaagagcagacccctccgccaagacccgaagcatatccaattcccacccagacttacacgagggaatatttcacatttccggctagtaagtctcaggatagaatggcaccaccacaaaaccagtggccaaattatgaggaaaaaccacacatgcacacagacagcaaccactcgtccatcgcgatccagcgtgtcacccgatcccaggaggaactgagagaagacaaagcctatcagcttgagcggcacagaatcgaggctgccatggataggaaatccgatagtgatatgtggatcaaccaatcctctagcctggacagctctacatccagccaggaacatctaaatcacagcagcaagtcagttacacctgctagtaccctgaccaaatctggtccagggcgttggaaaactcctgcagctataccggctactccagtcgccgtttctcaaccaatccgaaccgatctgcctcccccacccccacccccaccagtacactacgcaggcgacttcgatggtatgagtatggacttacccctgccaccccctcccagcgccaaccagatcggcctgccctcagcccaggtagcagccgcagaaaggaggaagagggaggagcatcaacgatggtatgagaaagaaaaggcaagacttgaagaggagagagaaagaaagagacgagaacaagagcggaaactgggacagatgagaactcaaagcctcaaccccgcacctttcagtccactgactgctcagcaaatgaagccagaaaaaccttctactctgcagcgcccacaggagacagtgatcagggagctgcaacctcagcagcagccaaggacaattgaacggagagatcttcagtatattactgtgagtaaggaagagctgtcaagcggcgacagtcttagtcccgacccgtggaagcgcgacgcaaaggagaaactggaaaagcagcagcagatgcacatcgtagatatgctcagcaaagaaatccaggagctgcagtcaaagccagatagaagtgcggaggagtccgaccgtcttagaaagttaatgctggaatggcagttccagaaaagactccaggagagcaagcagaaggacgaagacgacgaagaagaggaagatgacgatgtcgacaccatgctgattatgcaacgcctggaggcagaacgccgtgctagacagacagcgatgcccgctatcagcgttctggacctgctgcaggacgaggagcgtagacgccaacagcagttagaagaaatgaggaaaagagaggcagaggacagggcacgacaggaagaagagcgcaggcgccaggaagaggaaagaacaaagagggacgcagaggagaaggttatggtgctttag

SEQ ID NO: 289613 - DNA, 4986 bp, Artificial Sequence
  derived and/or modified sequence
atgagcgccggcggcagagacgaggagagaagaaagctggccgacatcatccaccactggaacgccaacagactggacctgttcgagatcagccagcccaccgaggacctggagttccacggcgtgatgagattctacttccaggacaaggccgccggcaacttcgccaccaagtgcatcagagtgagcagcaccgccaccacccaggacgtgatcgagaccctggccgagaagttcagacccgacatgagaatgctgagcagccccaagtacagcctgtacgaggtgcacgtgagcggcgagagaagactggacatcgacgagaagcccctggtggtgcagctgaactggaacaaggacgacagagagggcagattcgtgctgaagaacgagaacgacgccatcccccccaagaaggcccagagcaacggccccgagaagcaggagaaggagggcgtgatccagaacttcaagagaaccctgagcaagaaggagaagaaggagaagaagaagagagagaaggaggccctgagacaggccagcgacaaggacgacagacccttccagggcgaggacgtggagaacagcagactggccgccgaggtgtacaaggacatgcccgagaccagcttcaccagaaccatcagcaaccccgaggtggtgatgaagagaagaagacagcagaagctggagaagagaatgcaggagttcagaagcagcgacggcagacccgacagcggcggcaccctgagaatctacgccgacagcctgaagcccaacatcccctacaagaccatcctgctgagcaccaccgaccccgccgacttcgccgtggccgaggccctggagaagtacggcctggagaaggagaaccccaaggactactgcatcgccagagtgatgctgccccccggcgcccagcacagcgacgagaagggcgccaaggagatcatcctggacgacgacgagtgccccctgcagatcttcagagagtggcccagcgacaagggcatcctggtgttccagctgaagagaagaccccccgaccacatccccaagaagaccaagaagcacctggagggcaagacccccaagggcaaggagagagccgacggcagcggctacggcagcaccctgccccccgagaagctgccctacctggtggagctgagccccggcagaagaaaccacttcgcctactacaactaccacacctacgaggacggcagcgacagcagagacaagcccaagctgtacagactgcagctgagcgtgaccgaggtgggcaccgagaagctggacgacaacagcatccagctgttcggccccggcatccagccccaccactgcgacctgaccaacatggacggcgtggtgaccgtgacccccagaagcatggacgccgagacctacgtggagggccagagaatcagcgagaccaccatgctgcagagcggcatgaaggtgcagttcggcgccagccacgtgttcaagttcgtggaccccagccaggaccacgccctggccaagagaagcgtggacggcggcctgatggtgaagggccccagacacaagcccggcatcgtgcaggagaccaccttcgacctgggcggcgacatccacagcggcaccgccctgcccaccagcaagagcaccaccagactggacagcgacagagtgagcagcgccagcagcaccgccgagagaggcatggtgaagcccatgatcagagtggagcagcagcccgactacagaagacaggagagcagaacccaggacgccagcggccccgagctgatcctgcccgccagcatcgagttcagagagagcagcgaggacagcttcctgagcgccatcatcaactacaccaacagcagcaccgtgcacttcaagctgagccccacctacgtgctgtacatggcctgcagatacgtgctgagcaaccagtacagacccgacatcagccccaccgagagaacccacaaggtgatcgccgtggtgaacaagatggtgagcatgatggagggcgtgatccagaagcagaagaacatcgccggcgccctggccttctggatggccaacgccagcgagctgctgaacttcatcaagcaggacagagacctgagcagaatcaccctggacgcccaggacgtgctggcccacctggtgcagatggccttcaagtacctggtgcactgcctgcagagcgagctgaacaactacatgcccgccttcctggacgaccccgaggagaacagcctgcagagacccaagatcgacgacgtgctgcacaccctgaccggcgccatgagcctgctgagaagatgcagagtgaacgccgccctgaccatccagctgttcagccagctgttccacttcatcaacatgtggctgttcaacagactggtgaccgaccccgacagcggcctgtgcagccactactggggcgccatcatcagacagcagctgggccacatcgaggcctgggccgagaagcagggcctggagctggccgccgactgccacctgagcagaatcgtgcaggccaccaccctgctgaccatggacaagtacgcccccgacgacatccccaacatcaacagcacctgcttcaagctgaacagcctgcagctgcaggccctgctgcagaactaccactgcgcccccgacgagcccttcatccccaccgacctgatcgagaacgtggtgaccgtggccgagaacaccgccgacgagctggccagaagcgacggcagagaggtgcagctggaggaggaccccgacctgcagctgcccttcctgctgcccgaggacggctacagctgcgacgtggtgagaaacatccccaacggcctgcaggagttcctggaccccctgtgccagagaggcttctgcagactgatcccccacaccagaagccccggcacctggaccatctacttcgagggcgccgactacgagagccacctgctgagagagaacaccgagctggccatccccctgagaaaggagcccgagatcatcaccgtgaccctgaagaagcagaacggcatgggcctgagcatcgtggccgccaagggcgccggccaggacaagctgggcatctacgtgaagagcgtggtgaagggcggcgccgccgacgtggacggcagactggccgccggcgaccagctgctgagcgtggacggcagaagcctggtgggcctgagccaggagagagccgccgagctgatgaccagaaccagcagcgtggtgaccctggaggtggccaagcagggcgccatctaccacggcctggccaccctgctgaaccagcccagccccatgatgcagagaatcagcgacagaagaggcagcggcaagcccagacccaagagcgagggcttcgagctgtacaacaacagcacccagaacggcagccccgagagcccccagctgccctgggccgagtacagcgagcccaagaagctgcccggcgacgacagactgatgaagaacagagccgaccacagaagcagccccaacgtggccaaccagccccccagccccggcggcaagagcgcctacgccagcggcaccaccgccaagatcaccagcgtgagcaccggcaacctgtgcaccgaggagcagacccccccccccagacccgaggcctaccccatccccacccagacctacaccagagagtacttcaccttccccgccagcaagagccaggacagaatggcccccccccagaaccagtggcccaactacgaggagaagccccacatgcacaccgacagcaaccacagcagcatcgccatccagagagtgaccagaagccaggaggagctgagagaggacaaggcctaccagctggagagacacagaatcgaggccgccatggacagaaagagcgacagcgacatgtggatcaaccagagcagcagcctggacagcagcaccagcagccaggagcacctgaaccacagcagcaagagcgtgacccccgccagcaccctgaccaagagcggccccggcagatggaagacccccgccgccatccccgccacccccgtggccgtgagccagcccatcagaaccgacctgccccccccccccccccccccccccgtgcactacgccggcgacttcgacggcatgagcatggacctgcccctgccccccccccccagcgccaaccagatcggcctgcccagcgcccaggtggccgccgccgagagaagaaagagagaggagcaccagagatggtacgagaaggagaaggccagactggaggaggagagagagagaaagagaagagagcaggagagaaagctgggccagatgagaacccagagcctgaaccccgcccccttcagccccctgaccgcccagcagatgaagcccgagaagcccagcaccctgcagagaccccaggagaccgtgatcagagagctgcagccccagcagcagcccagaaccatcgagagaagagacctgcagtacatcaccgtgagcaaggaggagctgagcagcggcgacagcctgagccccgacccctggaagagagacgccaaggagaagctggagaagcagcagcagatgcacatcgtggacatgctgagcaaggagatccaggagctgcagagcaagcccgacagaagcgccgaggagagcgacagactgagaaagctgatgctggagtggcagttccagaagagactgcaggagagcaagcagaaggacgaggacgacgaggaggaggaggacgacgacgtggacaccatgctgatcatgcagagactggaggccgagagaagagccagacagaccgccatgcccgccatcagcgtgctggacctgctgcaggacgaggagagaagaagacagcagcagctggaggagatgagaaagagagaggccgaggacagagccagacaggaggaggagagaagaagacaggaggaggagagaaccaagagagacgccgaggagaagtag

SEQ ID NO: 289614 - DNA, 4998 bp, Artificial Sequence
  derived and/or modified sequence
atgagcgccggcggcagagacgaggagagaagaaagctggccgacatcatccaccactggaacgccaacagactggacctgttcgagatcagccagcccaccgaggacctggagttccacggcgtgatgagattctacttccaggacaaggccgccggcaacttcgccaccaagtgcatcagagtgagcagcaccgccaccacccaggacgtgatcgagaccctggccgagaagttcagacccgacatgagaatgctgagcagccccaagtacagcctgtacgaggtgcacgtgagcggcgagagaagactggacatcgacgagaagcccctggtggtgcagctgaactggaacaaggacgacagagagggcagattcgtgctgaagaacgagaacgacgccatcccccccaagaaggcccagagcaacggccccgagaagcaggagaaggagggcgtgatccagaacttcaagagaaccctgagcaagaaggagaagaaggagaagaagaagagagagaaggaggccctgagacaggccagcgacaaggacgacagacccttccagggcgaggacgtggagaacagcagactggccgccgaggtgtacaaggacatgcccgagaccagcttcaccagaaccatcagcaaccccgaggtggtgatgaagagaagaagacagcagaagctggagaagagaatgcaggagttcagaagcagcgacggcagacccgacagcggcggcaccctgagaatctacgccgacagcctgaagcccaacatcccctacaagaccatcctgctgagcaccaccgaccccgccgacttcgccgtggccgaggccctggagaagtacggcctggagaaggagaaccccaaggactactgcatcgccagagtgatgctgccccccggcgcccagcacagcgacgagaagggcgccaaggagatcatcctggacgacgacgagtgccccctgcagatcttcagagagtggcccagcgacaagggcatcctggtgttccagctgaagagaagaccccccgaccacatccccaagaagaccaagaagcacctggagggcaagacccccaagggcaaggagagagccgacggcagcggctacggcagcaccctgccccccgagaagctgccctacctggtggagctgagccccggcagaagaaaccacttcgcctactacaactaccacacctacgaggacggcagcgacagcagagacaagcccaagctgtacagactgcagctgagcgtgaccgaggtgggcaccgagaagctggacgacaacagcatccagctgttcggccccggcatccagccccaccactgcgacctgaccaacatggacggcgtggtgaccgtgacccccagaagcatggacgccgagacctacgtggagggccagagaatcagcgagaccaccatgctgcagagcggcatgaaggtgcagttcggcgccagccacgtgttcaagttcgtggaccccagccaggaccacgccctggccaagagaagcgtggacggcggcctgatggtgaagggccccagacacaagcccggcatcgtgcaggagaccaccttcgacctgggcggcgacatccacagcggcaccgccctgcccaccagcaagagcaccaccagactggacagcgacagagtgagcagcgccagcagcaccgccgagagaggcatggtgaagcccatgatcagagtggagcagcagcccgactacagaagacaggagagcagaacccaggacgccagcggccccgagctgatcctgcccgccagcatcgagttcagagagagcagcgaggacagcttcctgagcgccatcatcaactacaccaacagcagcaccgtgcacttcaagctgagccccacctacgtgctgtacatggcctgcagatacgtgctgagcaaccagtacagacccgacatcagccccaccgagagaacccacaaggtgatcgccgtggtgaacaagatggtgagcatgatggagggcgtgatccagaagcagaagaacatcgccggcgccctggccttctggatggccaacgccagcgagctgctgaacttcatcaagcaggacagagacctgagcagaatcaccctggacgcccaggacgtgctggcccacctggtgcagatggccttcaagtacctggtgcactgcctgcagagcgagctgaacaactacatgcccgccttcctggacgaccccgaggagaacagcctgcagagacccaagatcgacgacgtgctgcacaccctgaccggcgccatgagcctgctgagaagatgcagagtgaacgccgccctgaccatccagctgttcagccagctgttccacttcatcaacatgtggctgttcaacagactggtgaccgaccccgacagcggcctgtgcagccactactggggcgccatcatcagacagcagctgggccacatcgaggcctgggccgagaagcagggcctggagctggccgccgactgccacctgagcagaatcgtgcaggccaccaccctgctgaccatggacaagtacgcccccgacgacatccccaacatcaacagcacctgcttcaagctgaacagcctgcagctgcaggccctgctgcagaactaccactgcgcccccgacgagcccttcatccccaccgacctgatcgagaacgtggtgaccgtggccgagaacaccgccgacgagctggccagaagcgacggcagagaggtgcagctggaggaggaccccgacctgcagctgcccttcctgctgcccgaggacggctacagctgcgacgtggtgagaaacatccccaacggcctgcaggagttcctggaccccctgtgccagagaggcttctgcagactgatcccccacaccagaagccccggcacctggaccatctacttcgagggcgccgactacgagagccacctgctgagagagaacaccgagctggcccagcccctgagaaaggagcccgagatcatcaccgtgaccctgaagaagcagaacggcatgggcctgagcatcgtggccgccaagggcgccggccaggacaagctgggcatctacgtgaagagcgtggtgaagggcggcgccgccgacgtggacggcagactggccgccggcgaccagctgctgagcgtggacggcagaagcctggtgggcctgagccaggagagagccgccgagctgatgaccagaaccagcagcgtggtgaccctggaggtggccaagcagggcgccatctaccacggcctggccaccctgctgaaccagcccagccccatgatgcagagaatcagcgacagaagaggcagcggcaagcccagacccaagagcgagggcttcgagctgtacaacaacagcacccagaacggcagccccgagagcccccagctgccctgggccgagtacagcgagcccaagaagctgcccggcgacgacagactgatgaagaacagagccgaccacagaagcagccccaacgtggccaaccagccccccagccccggcggcaagagcgcctacgccagcggcaccaccgccaagatcaccagcgtgagcaccggcaacctgtgcaccgaggagcagacccccccccccagacccgaggcctaccccatccccacccagacctacaccagagagtacttcaccttccccgccagcaagagccaggacagaatggcccccccccagaaccagtggcccaactacgaggagaagccccacatgcacaccgacagcaaccacagcagcatcgccatccagagagtgaccagaagccaggaggagctgagagaggacaaggcctaccagctggagagacacagaatcgaggccgccatggacagaaagagcgacagcgacatgtggatcaaccagagcagcagcctggacagcagcaccagcagccaggagcacctgaaccacagcagcaagagcgtgacccccgccagcaccctgaccaagagcggccccggcagatggaagacccccgccgccatccccgccacccccgtggccgtgagccagcccatcagaaccgacctgccccccccccccccccccccccccgtgcactacgccggcgacttcgacggcatgagcatggacctgcccctgccccccccccccagcgccaaccagatcggcctgcccagcgcccaggtggccgccgccgagagaagaaagagagaggagcaccagagatggtacgagaaggagaaggccagactggaggaggagagagagagaaagagaagagagcaggagagaaagctgggccagatgagaacccagagcctgaaccccgcccccttcagccccctgaccgcccagcagatgaagcccgagaagcccagcaccctgcagagaccccaggagaccgtgatcagagagctgcagccccagcagcagcccagaaccatcgagagaagagacctgcagtacatcaccgtgagcaaggaggagctgagcagcggcgacagcctgagccccgacccctggaagagagacgccaaggagaagctggagaagcagcagcagatgcacatcgtggacatgctgagcaaggagatccaggagctgcagagcaagcccgacagaagcgccgaggagagcgacagactgagaaagctgatgctggagtggcagttccagaagagactgcaggagagcaagcagaaggacgaggacgacgaggaggaggaggacgacgacgtggacaccatgctgatcatgcagagactggaggccgagagaagagccagacagaccgccatgcccgccatcagcgtgctggacctgctgcaggacgaggagagaagaagacagcagcagctggaggagatgagaaagagagaggccgaggacagagccagacaggaggaggagagaagaagacaggaggaggagagaaccaagagagacgccgaggagaaggtgatggtgctgtag

SEQ ID NO: 289615 - DNA, 4981 bp, Artificial Sequence
  derived and/or modified sequence
gcggccgcggaggcggaggcagccgcggaggcggaggcggccggcggggggtggcgaggggcgccgggcccccgcggacctgtcgtcctcggcccgtcctccggccccggccccgcgcggctgaggaggcgcggccaggaccatgtcggcgggcggccgtgacgaggagcggcggaagctggccgacatcatccaccactggaacgccaaccggctggacctgttcgagatcagccagccgaccgaggatttggagttccatggagtgatgagattttattttcaagataaagctgctggaaactttgcaacaaaatgtattcgggtctctagtactgccaccactcaagatgtaatcgaaacgctcgcggagaaatttcgacctgatatgcgaatgctgtcctctcccaagtattcactctatgaagtgcatgtcagcggagaaagaagattggatatagatgagaaacctctagttgtacaactgaattggaacaaagatgatcgggaaggcagatttgttcttaagaatgagaatgacgccattcctcctaaggctcaaagtaatggacctgaaaagcaggaaaaagaaggggttatccagaacttcaagagaactctctcaaagaaagaaaagaaggaaaaaaagaagagagaaaaagaggcattgcgacaggcatctgataaagatgatagacctttccaaggggaggatgttgaaaattctcgactggctgctgaggtttacaaagacatgccggaaaccagctttactcgaaccatttctaatcctgaggtggttatgaaacgacggaggcagcaaaaattggaaaagagaatgcaggaatttcggagctcagatgggcggcctgattcaggtggaacattgagaatttatgcagatagtttaaaaccaaatattccctacaagacaatcctgctgtctactacagatcctgcagactttgctgtggctgaagctttagagaagtatggtctggaaaaagaaaaccctaaggattactgcatcgcccgggttatgcttcctcctggagcccagcattctgatgaaaagggtgctaaagaaattattcttgatgatgatgagtgtcctttacaaatcttcagggaatggccaagtgacaaagggattttagtctttcagttgaagaggaggccaccagaccacatcccaaagaaaaccaagaaacacttggaaggcaagacacccaagggaaaggagagagctgacgggtctggctatggctccacccttcctccggagaagctgccctatttagtagagttaagcccagatggttctgactctagagataagccaaagctttaccgccttcagttaagtgttactgaagttgggacagaaaagttggatgacaactctatccagttgtttggcccaggaattcagccccatcactgtgaccttaccaacatggatggagtggtcactgtgacgcccagaagtatggacgcagaaacctacgtggaaggccagcgcatctcagaaaccaccatgctgcagagtggcatgaaagtgcagtttggggcgtcccatgtatttaagtttgtggaccccagtcaggatcatgctcttgcaaaaagatctgtggatggaggcctgatggttaagggcccaagacataaacctggaattgttcaggagacaacttttgatttgggaggagatattcatagtgggacagcattaccgacaagcaagagcaccactaggctggacagcgacagagtgtcgtctgcctctagcacagccgagcggggaatggtgaagccgatgatcagagtagaacagcagccagattatcgcaggcaagaaagcagaacacaggatgcttctgggcctgagctgatactacctgcaagcattgaattcagggaaagttctgaagattcatttttgtctgccattataaattatactaatagctctacagtccactttaagttgtcccctacatatgtattatatatggcatgccggtatgtattgtccaaccagtacagacctgacatcagccctacagagcgcacacataaagtcattgcagtcgtcaacaagatggtgagcatgatggagggtgtcatccagaaacagaagaatattgcaggggcacttgccttctggatggcaaatgcatctgaacttctcaacttcattaagcaagaccgagaccttagtcggatcacactggatgctcaagatgttttagcacatttggttcaaatggcatttaaatacttggttcactgtcttcaatcagaacttaataattacatgccagcctttctagatgaccctgaagagaacagtctgcaacgaccaaaaatagatgatgtgctgcacacgctcacaggagccatgtccttgctacgacgctgcagagtcaatgccgccctgaccatccagctcttctctcagctcttccacttcatcaatatgtggctgttcaatagattggtgaccgacccagattcggggctgtgctcccattactggggtgcgattatccgtcagcagttgggccatattgaagcctgggctgagaagcaggggctggaactggctgcggactgtcatctgagcaggatcgtgcaggcaacgactttgcttaccatggataagtatgcacctgatgacattccaaatataaacagcacctgctttaagttaaattcattacaacttcaagccttattacagaactatcactgtgcacctgatgagccttttatcccaacggatcttatagaaaatgtagtgactgtggctgaaaacactgccgatgagctggcccgcagtgatggaagggaagtgcagttggaggaggatcctgatctgcagctgccgtttcttttgccagaagatggttattcttgtgatgttgtcagaaacattccaaatggtttacaagaatttttagaccctctgtgccagagaggattttgcaggttaattcctcacacacgttcaccaggtacttggacaatatattttgaaggtgcagattatgaaagtcaccttctgcgtgagaacacagagctggctcagcctctgaggaaagaacctgaaataatcactgtgaccctaaaaaagcagaatggaatgggccttagcattgttgcagcaaagggtgctggtcaagataaactaggaatctatgtgaagtcggttgtgaaaggaggtgctgcagatgtggatggacgtctagctgcaggtgatcagctcctcagtgtggatggacgaagtctggttggactctctcaggaaagggcggcagaactcatgacaagaacaagctctgtggtgacactggaagtagcaaagcagggtgccatctaccacggtctggccacccttctcaatcagccatcccccatgatgcagagaatttcagatcgtcgtggctcaggtaaaccccgaccaaagagtgaaggctttgagctctataataattcaactcaaaatgggtctcctgagagtcctcagctgccttgggcagaatatagtgaaccaaagaaattgcctggtgatgacagactgatgaaaaatagagctgatcaccgttccagccccaacgtagcaaatcagcctcctagtcctggagggaaaagtgcatatgcctctggaacaacagcgaagataacatctgtctctactggaaacctctgcactgaggagcagacgcctccgcctagacctgaagcctaccccatccccactcagacgtacaccagagagtattttaccttcccagcttccaaatcccaggatcggatggctcctcctcagaaccagtggccaaattatgaggaaaagccacatatgcacacagatagtaatcattccagtattgcaattcagcgtgttacacgttcccaagaagaacttcgagaagataaagcttaccaacttgagcggcatcgaatagaggcagctatggaccgaaagtctgatagtgatatgtggataaatcagagctcctcactggactccagtacctctagccaggagcatctgaaccattcctctaagtcggtcacccctgcttccacactgaccaaaagtggccctggccgttggaaaacaccagcagccataccggccacccctgtggccgtctcccagccaatccgaacagacctgcctccgccacccccgccacctccagtccactatgccggtgatttcgatggaatgtccatggatttgcctctcccaccacccccttccgccaaccagatagggctgccgtctgcgcaggtggctgctgctgaacggagaaagagagaagaacatcagcgttggtatgagaaggagaaggcccgcctggaggaggagcgggagaggaagcggagagagcaggagaggaagttgggccagatgcgcactcagtccttaaaccctgctccgttttctcccctgactgcacagcagatgaagcccgaaaagccttccacactccagcggccacaggaaacagtcattcgggagctgcagcctcagcagcagccccgcacgatcgagcgcagagacttgcagtacattacagtcagcaaagaggagctttcctcgggggacagtctgtcccccgacccgtggaagcgggacgccaaggagaagctggagaagcagcagcagatgcacatcgtggacatgctgagcaaggagatccaggagctccagagcaaaccggaccgcagcgccgaggagagcgaccggctgcgcaagctcatgctggagtggcagttccagaagagactccaggagtcgaagcagaaggacgaagatgacgaggaggaggaggacgatgatgtggacaccatgctgatcatgcagcgcctggaggctgaacgaagagcgagggtaaaggggggagtgctttggctgtgcccatctgtggtccctattttagcttctgcgtgtttcccatggggatag

SEQ ID NO: 289616 - protein, 133 aa, Artificial Sequence
  derived and/or modified sequence
MDLAGLLKSQFLCHLVFCYVFIASGLIINTIQLFTLLLWPINKQLFRKINCRLSYCISSQLVMLLEWWSGTECTIFTDPRAYLKYGKENAIVVLNHKFEIDFLCGWSLSERFGLLGFDLLHVACMPLELGLFS

SEQ ID NO: 289617 - DNA, 480 bp, Artificial Sequence
  derived and/or modified sequence
atggacctggccggcctgctgaagagccagttcctgtgccacctggtgttctgctacgtgttcatcgccagcggcctgatcatcaacaccatccagctgttcaccctgctgctgtggcccatcaacaagcagctgttcagaaagatcaactgcagactgagctactgcatcagcagccagctggtgatgctgctggagtggtggagcggcaccgagtgcaccatcttcaccgaccccagagcctacctgaagtacggcaaggagaacgccatcgtggtgctgaaccacaagttcgagatcgacttcctgtgcggctggagcctgagcgagagattcggcctgctgggcgtgagccagaagtgcatccccccctgcctgacccacttcagcggcagcgccccccccctggtgttcctgctgctggtgatccagaacctgcagaagaaccagcagagcttctacctgatgaagtggagctag

SEQ ID NO: 289618 - DNA, 375 bp, Artificial Sequence
  derived and/or modified sequence
atgctgctggagtggtggagcggcaccgagtgcaccatcttcaccgaccccagagcctacctgaagtacggcaaggagaacgccatcgtggtgctgaaccacaagttcgagatcgacttcctgtgcggctggagcctgagcgagagattcggcctgctgggcggcagcaaggtgctggccaagaaggagctggcctacgtgcccatcatcggctggatgtggtacttcaccgagatggtgttctgcagcagaaagtgggagcaggacagaaagaccgtggccaccagcctgcagcacctgagagactaccccgagaagtacttcgtgtgcagacaccagagcagctgcgtgcccagagcccccgccggcctgtag

SEQ ID NO: 289619 - DNA, 402 bp, Artificial Sequence
  derived and/or modified sequence
atggacctggccggcctgctgaagagccagttcctgtgccacctggtgttctgctacgtgttcatcgccagcggcctgatcatcaacaccatccagctgttcaccctgctgctgtggcccatcaacaagcagctgttcagaaagatcaactgcagactgagctactgcatcagcagccagctggtgatgctgctggagtggtggagcggcaccgagtgcaccatcttcaccgaccccagagcctacctgaagtacggcaaggagaacgccatcgtggtgctgaaccacaagttcgagatcgacttcctgtgcggctggagcctgagcgagagattcggcctgctgggcttcgacctgctgcacgtggcctgcatgcccctggagctgggcctgttcagctag

SEQ ID NO: 289620 - DNA, 357 bp, Artificial Sequence
  derived and/or modified sequence
atggacctggccggcctgctgaagagccagttcctgtgccacctggtgttctgctacgtgttcatcgccagcggcctgatcatcaacaccatccagctgttcaccctgctgctgtggcccatcaacaagcagctgttcagaaagatcaactgcagactgagctactgcatcagcagcagactgcagggccccggccaggagagagccggcctgtgccccaactacagactggacgtggtgctgcacagagacggcctgctgttcgcccaggtgggcgccggcagccaggacggctgccaccagttcgccgccccccccggcctgcccagagaggtgttcttccccgacagcctgtag

SEQ ID NO: 289621 - DNA, 942 bp, Artificial Sequence
  derived and/or modified sequence
cagctcttataaactagtggcaatttctgaacccagccggctccatctcagcttctggtttctaagtccatgtgccaaaggctgccaggaaggagacgccttcctgagtcctggatctttcttccttctggaaatctttgactgtgggtagttatttatttctgaataagagcgtccacgcatcatggacctcgcgggactgctgaagtctcagttcctgtgccacctggtcttctgctacgtctttattgcctcagggctaatcatcaacaccattcagctcttcactctcctcctctggcccattaacaagcagctcttccggaagatcaactgcagactgtcctattgcatctcaagccagctggtgatgctgctggagtggtggtcgggcacggaatgcaccatcttcacggacccgcgcgcctacctcaagtatgggaaggaaaatgccatcgtggttctcaaccacaagtttgaaattgactttctgtgtggctggagcctgtccgaacgctttgggctgttaggggtaagtcagaagtgcattcccccctgcctcacacatttctctggttcagccccaccacttgtctttttgctcctggtcattcagaacttgcagaagaatcaacagagtttctacttgatgaaatggtcctaataaactgctttttattcttgctgggagtcagtcttaacagcttcttatgggcaatcataagaggtactcaacaattgctacctgccggccattttacatatgattcatttatttaatccttacagcaacatgaatagatgatgtgccacactccattttttaaaaactaagttatatagagcttaatattcggctcagagtcacacagctgtaattagatttggatttcactcccatccatatttcttaattccatgctctactgcctccttggctaa

SEQ ID NO: 289622 - DNA, 933 bp, Artificial Sequence
  derived and/or modified sequence
ccagtgttggctgacttacagctcttataaactagtggcaatttctgaacccagccggctccatctcagcttctggtttctaagtccatgtgccaaaggctgccaggaaggagagctggtgatgctgctggagtggtggtcgggcacggaatgcaccatcttcacggacccgcgcgcctacctcaagtatgggaaggaaaatgccatcgtggttctcaaccacaagtttgaaattgactttctgtgtggctggagcctgtccgaacgctttgggctgttagggggctccaaggtcctggccaagaaagagctggcctatgtcccaattatcggctggatgtggtacttcaccgagatggtcttctgttcgcgcaagtgggagcaggatcgcaagacggttgccaccagtttgcagcacctccgggactaccccgagaagtattttgtatgtaggcaccagagcagctgtgtcccaagggctcctgcaggactgtgaccgtgggacccccatgtgacttccacaggacacgtgactgtgtggtcctgtgcgactccagggctgtgtgtgaccatagggctgtgtataacctcagggatgtatgtgaccatggggccgtgtgtgaccgtggggccacgtatgactgtggggccgtgtatgaccatggggccgtgtgtgaccccagggctgtgtgtgaccccagggctgtgtgtgaccatggggccgtgtgtgatcatgtggccatatgtgaccctggggctatgtgtgaccccagggctgtgtgtgaccccagggctatgtgtgacctcagggctgtatgtaaccatggggccctgtgtgatcgtgtggccatatgtgcccctggggctgtgtgtgaccccagggccaggcatgacaccagggctgtgtgtgaccccagggctgtatgtgacccc

SEQ ID NO: 289623 - DNA, 1801 bp, Artificial Sequence
  derived and/or modified sequence
ctagtggcaatttctgaacccagccggctccatctcagcttctggtttctaagtccatgtgccaaaggctgccaggaaggagacgccttcctgagtcctggatctttcttccttctggaaatctttgactgtgggtagttatttatttctgaataagagcgtccacgcatcatggacctcgcgggactgctgaagtctcagttcctgtgccacctggtcttctgctacgtctttattgcctcagggctaatcatcaacaccattcagctcttcactctcctcctctggcccattaacaagcagctcttccggaagatcaactgcagactgtcctattgcatctcaagccagctggtgatgctgctggagtggtggtcgggcacggaatgcaccatcttcacggacccgcgcgcctacctcaagtatgggaaggaaaatgccatcgtggttctcaaccacaagtttgaaattgactttctgtgtggctggagcctgtccgaacgctttgggctgttagggtttgacctcttgcacgtagcttgcatgcctttggaactgggtctcttcagttgacttttgtcgtcttcaacacactgcagcgtgtagcggttgagcctgtgtcacatagctgaatcagagtcatctgcggtactcagggctccaaggtcctggccaagaaagagctggcctatgtcccaattatcggctggatgtggtacttcaccgagatggtcttctgttcgcgcaagtgggagcaggatcgcaagacggttgccaccagtttgcagcacctccgggactaccccgagaagtattttgtatgtaggcaccagagcagctgtgtcccaagggctcctgcaggactgtgaccgtgggacccccatgtgacttccacaggacacgtgactgtgtggtcctgtgcgactccagggctgtgtgtgaccatagggctgtgtataacctcagggatgtatgtgaccatggggccgtgtgtgaccgtggggccacgtatgactgtggggccgtgtatgaccatggggccgtgtgtgaccccagggctgtgtgtgaccccagggctgtgtgtgaccatggggccgtgtgtgatcatgtggccatatgtgaccctggggctatgtgtgaccccagggctgtgtgtgaccccagggctatgtgtgacctcagggctgtatgtaaccatggggccctgtgtgatcgtgtggccatatgtgcccctggggctgtgtgtgaccccagggccaggcatgacaccagggctgtgtgtgaccccagggctgtatgtgaccccagggctgtgtgtgacctcagggctgtatgtaaccatggggccctgtgtgatcgtgtggccatatgtgaccctggggctgtgtgtgaccccagggccatgcatgaccccagggctgtgtgtgaccccgaggctgcgtgcgactcctgcctccttccttccagttcctgattcactgtgagggcacacggttcacggagaagaagcatgagatcagcatgcaggtggcccgggccaaggggctgcctcgcctcaagcatcacctgttgccacgaaccaagggcttcgccatcaccgtgaggagcttgagaaatgtagtttcagctgtatatgactgtacactcaatttcagaaataatgaaaatccaacactgctgggagtcctaaacggaaagaaataccatgcagatttgtatgttaggaggatcccactggaagacatccctgaagacgatgacgagtgctcggcctggctgcacaagctctaccaggagaagg

SEQ ID NO: 289624 - DNA, 480 bp, Artificial Sequence
  derived and/or modified sequence
atggatctggcaggcctcctgaaatctcagttcttatgccacctcgtgttctgctatgtgtttatcgcctctgggctcattatcaataccattcagctgtttactttgcttctttggcccatcaacaaacaactgttccggaagattaactgcagactgtcttactgtatctctagccagttggtgatgcttttggaatggtggtcaggcacagaatgcaccattttcaccgatcctcgggcttacttgaagtatgggaaagaaaatgctattgtggttcttaatcataaattcgagatagactttctatgcgggtggagcctctccgagcgctttggattactgggggtatcgcagaaatgtattcccccttgtctgacccacttcagcggctcagccccgccgctagtgttcctgctcctggtcatacagaacttgcagaaaaaccagcagtctttctacctgatgaagtggagttag

SEQ ID NO: 289625 - DNA, 375 bp, Artificial Sequence
  derived and/or modified sequence
atgctgctggagtggtggagtggcacggaatgcacgatctttaccgatccacgagcctatcttaagtatggtaaggagaacgctattgtcgtgttgaaccacaagtttgaaatcgactttctgtgtggctggtccctgagcgagcgatttggcctcttgggaggatctaaagtgcttgctaagaaggagctagcatatgttccaatcatcggctggatgtggtactttacagagatggtcttctgtagtaggaagtgggagcaggaccggaagacagttgctacctcacttcagcacctccgagactaccctgaaaagtactttgtatgcaggcatcaatcaagctgcgtcccccgagctccagccgggctctag

SEQ ID NO: 289626 - DNA, 402 bp, Artificial Sequence
  derived and/or modified sequence
atggacttggctgggctcctcaaatcacagttcctatgccacctcgtcttctgctacgtgtttattgcttccggactaatcatcaacacaatccagctgtttaccctgctgttgtggcccatcaacaagcagttgtttcggaagatcaattgccggctttcttactgtataagcagccagctcgtgatgctcctcgaatggtggagtggcacggagtgcacaatctttacagaccctagggcatacctcaagtatgggaaggaaaacgccatcgtggtcctcaatcacaagttcgagattgactttctttgcggatggtccctgtctgagcgctttggcctgctggggtttgacttgctccacgtagcttgcatgcctttggaactgggcctgttctcttag

SEQ ID NO: 289627 - DNA, 357 bp, Artificial Sequence
  derived and/or modified sequence
atggatctagccggcctcctgaaatcgcagttcctgtgtcacttggtattctgttatgtgttcattgcgagtggattgattatcaatactatccaactgttcacgctgcttctgtggcctatcaacaaacagttgttcaggaaaataaactgtcgcctctcttattgtatcagttcaagactgcaggggcctggacaagagagggcaggcctgtgccccaattatcgcttagacgtagtgcttcacagggatggcctcctgttcgcacaagttggagctggtagtcaggatggttgccaccagtttgctgccccccccggcctccctcgagaggttttcttccccgatagtctttag

SEQ ID NO: 289628 - DNA, 480 bp, Artificial Sequence
  derived and/or modified sequence
atggacctggccggcctgctgaagagccagttcctgtgccacctggtgttctgctacgtgttcatcgccagcggcctcatcatcaacaccatccagctgttcaccctgctgctgtggcccatcaacaagcagctgttcaggaagatcaactgccgcctgagctactgcatcagcagccagctggtgatgctgctggagtggtggagcggcacagagtgcaccatcttcacagacccccgggcctacctgaagtatggcaaggaaaatgccatcgtggtgctgaaccacaagtttgaaattgacttcctgtgtggctggagcctgtctgagcgcttcggcctgctgggcgtgtcccagaagtgcatccccccctgcctgacccacttcagcggcagcgccccacccctggtgttcctgctgctggtgatccagaacctgcagaagaaccagcagagcttctacctgatgaagtggagctag

SEQ ID NO: 289629 - DNA, 375 bp, Artificial Sequence
  derived and/or modified sequence
atgctgctggagtggtggagcggcacagagtgcaccatcttcacagacccccgggcctacctgaagtatggcaaggaaaatgccatcgtggtgctgaaccacaagtttgaaattgacttcctgtgtggctggagcctgtctgagcgcttcggcctgctgggcggcagcaaggtgctggccaagaaggagctggcctacgtgcccatcatcggctggatgtggtacttcacagagatggtgttctgcagcaggaagtgggagcaggacaggaagacagtggccaccagcctgcagcacctgcgggactacccagagaagtactttgtgtgccgccaccagagcagctgtgtgccccgggccccagctggcctgtag

SEQ ID NO: 289630 - DNA, 402 bp, Artificial Sequence
  derived and/or modified sequence
atggacctggccggcctgctgaagagccagttcctgtgccacctggtgttctgctacgtgttcatcgccagcggcctcatcatcaacaccatccagctgttcaccctgctgctgtggcccatcaacaagcagctgttcaggaagatcaactgccgcctgagctactgcatcagcagccagctggtgatgctgctggagtggtggagcggcacagagtgcaccatcttcacagacccccgggcctacctgaagtatggcaaggaaaatgccatcgtggtgctgaaccacaagtttgaaattgacttcctgtgtggctggagcctgtctgagcgcttcggcctgctgggctttgacctgctgcacgtggcctgcatgcccctggagctgggcctcttctcctag

SEQ ID NO: 289631 - DNA, 357 bp, Artificial Sequence
  derived and/or modified sequence
atggacctggccggcctgctgaagagccagttcctgtgccacctggtgttctgctacgtgttcatcgccagcggcctcatcatcaacaccatccagctgttcaccctgctgctgtggcccatcaacaagcagctgttcaggaagatcaactgccgcctgagctactgcatcagcagccggctgcagggccctggccaggagagagctggcctgtgccccaactaccgcctggatgtggtgctgcacagagatggcctgctgtttgcccaggtgggcgccggcagccaggacggctgccaccagtttgctgcccctcctggcctgccccgggaggtgttcttcccagacagcctgtag

SEQ ID NO: 289632 - DNA, 480 bp, Artificial Sequence
  derived and/or modified sequence
atggacctggccggcctgctgaagagccagttcctgtgccacctggtgttttgctatgtttttatcgcatccggtttgattataaacacgattcagttgtttaccctcttgctgtggccgattaacaaacagctctttcgcaaaattaattgcagacttagctactgcatctctagtcaactcgtgatgttgctggagtggtggtccgggacggaatgtaccatctttacagacccccgtgcctatctaaagtatggcaaggaaaacgccatcgtggtcctgaaccataagtttgagatagacttcctctgtggatggtctttatctgagaggttcggactcctcggggtctcccagaagtgcatccccccctgcctcacgcacttttcaggcagcgcacctcccctggtttttttgctactggtcatccagaaccttcagaagaaccagcaaagtttctacctgatgaagtggagctag

SEQ ID NO: 289633 - DNA, 375 bp, Artificial Sequence
  derived and/or modified sequence
atgctgctggagtggtggagcggcaccgagtgcaccatcttcaccgatccccgcgcctacctgaaatacggtaaagagaacgcaatagtcgttttgaaccataaattcgaaatcgatttcctctgcgggtggagtctgtcagagcggtttggcctcctgggcggctctaaggtcctggccaagaaggaactggcctacgtccctattatcggctggatgtggtactttacagagatggtattctgtagccggaagtgggagcaggatcggaagacggttgccacgtcactccaacatctaagagactatcccgaaaagtattttgtttgccgccatcagtctagttgcgttcctcgcgctccggctggactgtag

SEQ ID NO: 289634 - DNA, 402 bp, Artificial Sequence
  derived and/or modified sequence
atggacctggccggcctgctgaagagccagttcctgtgccacctggtcttctgttacgtgtttatcgcgtcaggtctgatcatcaatacaattcagctcttcactttgctgctatggccaattaataagcagttgttcagaaagattaactgtagactgtcctactgcatttcatctcagctggtcatgcttttggagtggtggtcgggcactgagtgtacgatcttcaccgacccgcgggcgtacctgaagtacggcaaagagaatgccatcgtcgtattgaatcataaatttgagatcgactttctctgcgggtggtccctgtctgagcgctttggcctgctgggattcgatctactgcacgtcgcctgtatgcccctcgaattaggactgttttcctag

SEQ ID NO: 289635 - DNA, 357 bp, Artificial Sequence
  derived and/or modified sequence
atggacctggccggcctgctgaagagccagttcctgtgccacctggtcttctgctatgtgttcattgcaagcggcctgattatcaacacaatccagttgttcactctcctgctttggcctattaataagcagttgtttcggaaaataaattgcaggctgtcatactgcatatccagccgcttgcaggggcccgggcaggagagagcaggtttgtgccccaactatagactcgatgttgtgttacaccgcgacggcctcttgttcgcccaggtgggcgcgggctctcaagacggttgtcaccagtttgctgcccctcccggcttacccagggaggtgttctttccagactccctctag

SEQ ID NO: 289636 - DNA, 480 bp, Artificial Sequence
  derived and/or modified sequence
atggaccttgccggactcctgaagtcccagttcttatgccacttagttttttgttatgttttcatcgcctccgggctgattatcaacactatacaactgtttactctgctgctgtggccgattaacaaacaattgtttcgcaagattaattgccgattaagttactgcatcagttcccagcttgtgatgctcctcgaatggtggtctggcactgagtgtacaatctttaccgacccacgcgcttatctgaagtatggaaaagagaacgccattgtggtcctgaatcacaagtttgagatcgactttctgtgtggatggtcattgtccgagcgctttgggctcctgggcgtgagtcagaagtgtattcccccatgtctgacacacttctctggatccgcaccgccactggtgtttctcttgcttgtgattcagaacttacagaaaaaccagcagtccttctacctgatgaagtggagttag

SEQ ID NO: 289637 - DNA, 375 bp, Artificial Sequence
  derived and/or modified sequence
atgctgctggaatggtggtcagggacagagtgcacgattttcaccgaccctagagcctacctgaagtacgggaaagagaatgcgattgtcgtgctgaaccacaaattcgaaatcgactttctctgcggctggtctttgagcgaacggtttggccttttgggaggcagcaaagtgttggctaaaaaagaattggcctatgtccccataatcggatggatgtggtattttaccgagatggttttttgctcacgtaaatgggaacaggatcgaaagaccgtggccacatcattgcagcatttgcgcgattacccagagaagtatttcgtctgcaggcatcaaagcagctgcgttccacgtgcaccggcaggtctgtag

SEQ ID NO: 289638 - DNA, 402 bp, Artificial Sequence
  derived and/or modified sequence
atggacctggccggtctactgaagtcccagtttctatgccatctggttttctgctatgtgttcattgcctcaggcttgatcatcaataccatccaactttttacccttctgttgtggccaattaataagcagctgtttagaaaaataaattgtcggttgagctattgtatatctagccagctcgtgatgctcctagaatggtggtccggaaccgaatgtaccatattcaccgaccctagagcgtacctcaaatacggtaaagagaacgcaattgtcgtactcaatcacaaattcgaaatcgatttcctctgcggctggtcactcagtgaaagatttggactcctgggatttgacctcctgcacgtggcatgcatgccccttgaactggggctgttttcatag

SEQ ID NO: 289639 - DNA, 357 bp, Artificial Sequence
  derived and/or modified sequence
atggatctggcgggtctcctgaagagtcaattcctgtgccatttagtgttctgctacgttttcatagctagtggcctgattataaatacaatccagctgttcactctcctgttgtggccaattaacaaacaacttttccgcaaaattaactgtcgtctctcatattgtatatccagccgcctgcagggtccgggacaggagcgcgctggattatgccctaactatagactcgacgtggtgcttcatagggacggtttactgtttgcgcaggttggggcaggttcccaggacggttgccatcagtttgccgcacccccaggtctgcctagagaggtcttctttccggactcattgtag

SEQ ID NO: 289640 - protein, 2341 aa, Artificial Sequence
  derived and/or modified sequence
MKNIYCLIPKLVNFATLGCLWISVVQCTVLNSCLKSCVTNLGQQLDLGTPHNLSEPCIQGCHFWNSVDQKNCALKCNDTYATVCERESCEVGCSSAEGAYEEEVLENADLPTAPFASSIGSHNMTLRWKSANFSGVKYIIQWKYAQLLGSWTYTKTVSRPSYVVKPLHPFTEYIFRVVWIFTAQLQLYSPPSPSYRTHPHGVPETAPLIRNIESSSPDTVEVSWDPPQFPGGPILGYNLRLISKNQKLDAGTQRTSFQFYSTLPNTIYRFSIAAVNEVGEGPEAESSITTSSSAVQQEEQWLFLSRKTSLRKRSLKHLVDEAHCLRLDAIYHNITGISVDVHQQIVYFSEGTLIWAKKAANMSDVSDLRIFYRGSGLISSISIDWLYQRMYFIMDELVCVCDLENCSNIEEITPPSISAPQKIVADSYNGYVFYLLRDGIYRADLPVPSGRCAEAVRIVESCTLKDFAIKPQAKRIIYFNDTAQVFMSTFLDGSASHLILPRIPFADVKSFACENNDFLVTDGKVIFQQDALSFNEFIVGCDLSHIEEFGFGNLVIFGSSSQLHPLPGRPQELSVLFGSHQALVQWKPPALAIGASPSAWQNWTYEVKVSTQDPPEVTHIFLNISGTMLNVPELQSAMKYKVSVRASSPKRPGPWSEPSVGTTLVPASEPPFIMAVKEDGLWSKPLNSFGPGEFLSSDIGNVSDMDWYNNSLYYSDTKGDVFVWLLNGTDISENYHLPSIAGAGALAFEWLGHFLYWAGKTYVIQRQSVLTGHTDIVTHVKLLVNDMVVDSVGGYLYWTTLYSVESTRLNGESSLVLQTQPWFSGKKVIALTLDLSDGLLYWLVQDSQCIHLYTAVLRGQSTGDTTITEFAAWSTSEISQNALMYYSGRLFWINGFRIITTQEIGQKTSVSVLEPARFNQFTIIQTSLKPLPGNFSFTPKVIPDSVQESSFRIEGNASSFQILWNGPPAVDWGVVFYSVEFSAHSKFLASEQHSLPVFTVEGLEPYALFNLSVTPYTYWGKGPKTSLSLRAPETVPSAPENPRIFILPSGKCCNKNEVVVEFRWNKPKHENGVLTKFEIFYNISNQSITNKTCEDWIAVNVTPSVMSFQLEGMSPRCFIAFQVRAFTSKGPGPYADVVKSTTSEINPFPHLITLLGNKIVFLDMDQNQVVWTFSAERVISAVCYTADNEMGYYAEGDSLFLLHLHNRSSSELFQDSLVFDITVITIDWISRHLYFALKESQNGMQVFDVDLEHKVKYPREVKIHNRNSTIISFSVYPLLSRLYWTEVSNFGYQMFYYSIISHTLHRILQPTATNQQNKRNQCSCNVTEFELSGAMAIDTSNLEKPLIYFAKAQEIWAMDLEGCQCWRVITVPAMLGKTLVSLTVDGDLIYWIITAKDSTQIYQAKKGNGAIVSQVKALRSRHILAYSSVMQPFPDKAFLSLASDTVEPTILNATNTSLTIRLPLAKTNLTWYGITSPTPTYLVYYAEVNDRKNSSDLKYRILEFQDSIALIEDLQPFSTYMIQIAVKNYYSDPLEHLPPGKEIWGKTKNGVPEAVQLINTTVRSDTSLIISWRESHKPNGPKESVRYQLAISHLALIPETPLRQSEFPNGRLTLLVTRLSGGNIYVLKVLACHSEEMWCTESHPVTVEMFNTPEKPYSLVPENTSLQFNWKAPLNVNLIRFWVELQKWKYNEFYHVKTSCSQGPAYVCNITNLQPYTSYNVRVVVVYKTGENSTSLPESFKTKAGVPNKPGIPKLLEGSKNSIQWEKAEDNGCRITYYILEIRKSTSNNLQNQNLRWKMTFNGSCSSVCTWKSKNLKGIFQFRVVAANNLGFGEYSGISENIILVGDDFWIPETSFILTIIVGIFLVVTIPLTFVWHRRLKNQKSAKEGVTVLINEDKELAELRGLAAGVGLANACYAIHTLPTQEEIENLPAFPREKLTLRLLLGSGAFGEVYEGTAVDILGVGSGEIKVAVKTLKKGSTDQEKIEFLKEAHLMSKFNHPNILKQLGVCLLNEPQYIILELMEGGDLLTYLRKARMATFYGPLLTLVDLVDLCVDISKGCVYLERMHFIHRDLAARNCLVSVKDYTSPRIVKIGDFGLARDIYKNDYYRKRGEGLLPVRWMAPESLMDGIFTTQSDVWSFGILIWEILTLGHQPYPAHSNLDVLNYVQTGGRLEPPRNCPDDLWNLMTQCWAQEPDQRPTFHRIQDQLQLFRNFFLNSIYKSRDEANNSGVINESFEGEDGDVICLNSDDIMPVALMETKNREGLNYMVLATECGQGEEKSEGPLGSQESESCGLRKEEKEPHADKDFCQEKQVAYCPSGKPEGLNYACLTHSGYGDGSD

SEQ ID NO: 289641 - DNA, 7026 bp, Artificial Sequence
  derived and/or modified sequence
atgaaaaatatatactgcctgattccaaagctcgtcaatttcgctaccctcggttgcctttggatatccgtggtccaatgcaccgtgctcaatagctgcctcaagtcctgcgtgactaacttagggcagcagctggatctggggaccccacacaacctttcagagccttgtatccagggttgtcacttctggaattctgttgaccagaaaaactgtgctctgaaatgtaatgatacatacgcgactgtgtgcgaaagggaatcctgtgaagttgggtgctcaagtgccgaaggtgcgtacgaagaagaagtcctggagaacgccgacctgccaacggccccgtttgcgtcttctattgggtcacacaatatgacactccgctggaagagcgccaatttcagcggtgtgaagtacattatccagtggaagtacgctcagcttctggggtcctggacttatacgaagacagtgagtcgcccatcatacgtggtcaagcctctccatcctttcaccgagtatatcttccgagtggtttggattttcacagcacaactgcagctgtattctcctccctcaccttcctacaggacccacccccacggagtacctgagactgccccgctcattcggaatatcgagagctcttctcctgacaccgtggaagtgtcctgggatccccctcaatttcctggcggccccattctaggctacaacctgcggttaattagcaagaatcagaagcttgatgcaggaacccaacggaccagctttcaattctacagtacattgcccaataccatttaccggttcagcatagcggcagtgaatgaagtgggcgagggccctgaagctgaaagcagcattaccacatcgagttccgccgtgcagcaagaggaacagtggctatttttatcaaggaagacctctctccgcaaaagaagccttaaacacctggtggacgaggcacactgcttacgtctggatgcaatatatcacaacatcaccggtattagtgtcgatgttcaccagcagatcgtgtacttctccgagggcaccctcatttgggccaaaaaggccgccaacatgtctgacgtttcggatctgcgcatcttctacagaggatctggattgattagctctatttccatagattggctgtaccaacgcatgtacttcataatggatgaacttgtttgcgtctgcgacctggagaattgttctaatatagaagagatcacaccacctagtatctccgccccccagaaaattgttgcggactcctacaacgggtacgtcttttatctcctgagagacgggatatatcgagccgatttacctgtgcccagcggtagatgtgcagaagctgtccgaatcgtcgagagttgtacccttaaggatttcgccatcaagccgcaggccaagcggataatctacttcaatgataccgcccaggttttcatgagtactttcctggatgggtctgcgtcccacctgatacttccaaggataccatttgctgatgtcaaaagttttgcttgcgaaaacaatgattttttggtgaccgatgggaaggtcatctttcagcaggacgctctgagcttcaatgaattcatcgtgggatgtgatctgtcacacattgaagaatttggctttggaaacttggtgatcttcgggagcagttcgcagttacacccacttcctggcagaccccaggaattgtccgtgctctttggctctcaccaggctctcgttcagtggaaacctccagctctggctattggagcaagtccttctgcttggcaaaattggacatacgaagtgaaagtgtccacgcaggacccacccgaggtgacacatattttcctgaacatttccggtacaatgctgaacgtccccgaactccagtctgctatgaaatataaagtttcagtcagggccagcagtcccaagaggcccggaccttggtctgagccttctgtagggaccacactcgtgcccgctagcgagccccccttcatcatggccgtgaaggaagatggactttggagcaaacccctcaattccttcggaccaggggaatttctgtcatcagacataggcaacgtttcggacatggattggtacaataacagcctgtattattctgataccaagggtgacgtgttcgtgtggttactgaacggaaccgatatttcagagaactaccacctgccgagcattgctggggctggggctctggcttttgagtggttggggcatttcctctactgggctggaaaaacttatgtcatccagagacagagcgtgcttaccgggcacactgacatagtgactcatgtgaaacttttagtgaatgacatggtggtggatagcgtagggggctacctttactggaccaccctgtactcagtggagtcgacaagactaaacggagaatcaagcctggtccttcagacccagccatggtttagcggaaagaaggtgatcgccttgaccttagatttgtcagatggcctgctctactggcttgtgcaggattcgcagtgcattcacctttacactgcggtgctgcgcggacagtctactggcgacacaactatcacagagttcgcggcatggtccacctctgagatctcacagaacgctctaatgtattactccggacgactgttctggataaacggcttccgtatcataactacccaagagatcgggcagaagacttcggttagtgtgctagagcctgcacgcttcaatcagtttacaatcattcagacatccttaaagcctcttccaggcaatttctcgttcaccccaaaagttatccctgacagtgtccaagagtcttcgtttaggatcgagggcaacgcatccagcttccagatcttgtggaatggcccccctgcggtggattggggtgtggttttctactctgtggaattcagtgcccactcaaaattcctcgcttcagagcagcattcgctgcctgtattcacagtggaagggttggaaccttacgccttgttcaacttgtctgtgaccccatacacctattgggggaaaggcccaaagactagcctttctttgcgggcgcctgaaaccgtgccctcagctcctgaaaacccccgtatctttatcttgccaagcggtaaatgctgtaacaaaaatgaggtcgtagtggagttccggtggaataagccgaaacacgagaacggagtattgacgaagtttgagatcttctacaatatttccaatcagtcaatcactaataaaacctgcgaggactggatcgccgtcaatgttactccctctgttatgtcctttcagcttgaaggtatgtcgcctaggtgcttcatcgcttttcaggtccgcgcctttacatctaaaggaccaggcccctacgcagacgtggtaaagagtactacatccgaaattaatccattcccacatttaattacgctgctgggcaacaagattgtctttctggacatggatcagaatcaggtcgtctggactttttctgctgagcgcgttatcagcgccgtctgctatacagccgataacgaaatgggctattatgctgagggggacagcctgttcctattgcatctgcacaaccggtcctccagcgagctctttcaggatagtctcgtctttgatatcaccgtgattacaattgactggatatctcgccatttatacttcgcactgaaggagagtcagaacggcatgcaagtgtttgacgtggatttggaacacaaagtcaagtatcctagggaggtgaaaatccacaatagaaactccacaattataagtttttcagtatatcccctcctctcaaggctgtattggaccgaggtaagcaatttcggatatcagatgttctattatagtattatctctcatacgctgcaccgcatactgcaacctacggctaccaatcagcaaaacaaaaggaatcagtgctcttgtaatgtgacggaattcgaacttagcggtgccatggcaatcgatacctctaatctggagaaacctctcatatatttcgctaaggctcaggagatatgggccatggacctggaaggttgtcaatgctggcgcgtcatcacagtccctgctatgctcgggaagacattggtctctctcacggtggacggtgacttgatttactggattatcaccgcaaaagactctacccagatctatcaggctaagaagggcaatggagccatcgtgtctcaggtgaaagcactgcgaagtagacacattctggcttatagtagcgtgatgcagccctttccagacaaagctttcctgtcgcttgctagtgatacagtggagcctacgatattaaatgctacgaacactagtctgactattagactcccgctggctaaaactaacctcacgtggtacggcatcacctccccaaccccaacgtacctggtgtactacgccgaagtgaatgacaggaagaacagtagcgatttgaagtaccgaatcctcgaatttcaggacagtattgccctgatagaggatctgcaacctttttctacttatatgattcagatagccgtcaaaaactactactctgatccgcttgaacatctcccccctggaaaggaaatctggggcaaaaccaagaacggagtgcccgaggccgtgcagttgattaacaccactgttcgctcagatacttcactcattattagttggagggagagccataaacccaacggaccaaaagagtctgtgagatatcaacttgccattagccacctggctctcatccctgagaccccccttaggcagtctgaatttccaaatggacggcttacactactggtcacacgcctgtctggagggaacatttatgtgctgaaggtactcgcttgtcattcagaagagatgtggtgtaccgagagtcatcctgtgacagtagaaatgtttaacacgcccgaaaagccgtattctttagtgccagaaaacacatctttgcagtttaactggaaagcccccctgaatgtgaatctgattcgtttctgggtggagctgcagaaatggaagtacaacgagttttaccatgtaaaaacctcctgtagccagggccccgcttatgtgtgtaacattaccaatcttcagccctatacttcgtataacgttcgcgtcgtcgtagtctataaaacaggcgagaactcaacttccctgcccgagtccttcaagacaaaggctggggtgcccaataagccaggcataccaaaattgctggagggttcaaagaattcaatccaatgggaaaaagccgaggacaatgggtgtcgtatcacatattatatccttgagatccggaagtctacaagcaacaacctacagaaccaaaatcttcggtggaagatgacttttaatggttcttgctcctccgtatgtacgtggaagtcaaagaacttgaagggaatctttcaattcagagtggttgctgcaaataacctgggtttcggcgagtactccggcatctccgagaatatcattctggtaggcgatgatttctggatcccagagaccagcttcattctgacaataattgtaggaatctttctcgttgtgaccatccctcttactttcgtgtggcacagaaggctgaaaaatcagaagtcggccaaggaaggtgtcaccgtgctcattaacgaagataaggaactcgctgagctgcgaggcctggccgccggtgtggggctggccaatgcctgttatgcaattcacactcttcccacacaagaagagattgaaaatcttccagctttccccagagagaagctgaccctgaggctgttgctggggtctggggccttcggtgaagtctacgagggcaccgcagtggacatactcggcgtgggaagcggtgaaatcaaggtggccgtgaagaccttgaaaaaaggaagtaccgatcaggaaaagattgagttcctcaaagaggctcacctaatgagcaaattcaaccatcctaacatcttgaaacagttgggcgtttgcctccttaacgaaccacagtatattatcttggaattaatggaggggggcgacctgctgacgtatctccggaaggctagaatggccacgttttatggaccactgcttactctcgttgacctggtggatctgtgtgtggatatcagtaagggttgcgtgtacttagagagaatgcacttcattcaccgagatcttgctgctagaaattgccttgtaagcgtcaaagactataccagccctcggatcgttaagatcggagatttcggcctggccagggacatctataagaatgactactacaggaagcgaggagagggattgttacctgtgcggtggatggcccctgagagcttgatggacgggatattcaccacccaatctgacgtctggagcttcggcatccttatttgggagatacttacacttgggcatcagccttaccccgctcacagcaacctagatgtcctgaactatgtgcagactggcggacgcctggagcccccgcggaactgtcctgatgacctttggaatctgatgacacagtgctgggcacaggagcctgaccaacgtccgacgttccaccgcattcaggatcagctccaacttttccgcaactttttcttgaactctatctacaagtcaagggacgaagctaacaacagcggcgtgatcaacgagagcttcgagggagaagatggtgatgttatttgtcttaactccgacgatatcatgccggtggcacttatggagacaaagaatcgagaaggcttaaactacatggtgctggccactgagtgtgggcagggtgaagaaaagagcgaggggccactcggaagccaagaatccgaaagctgcggtctgcggaaggaagaaaaggagccccatgcagacaaagacttctgtcaggaaaagcaggtggcatactgtccctccgggaaaccggagggattgaactacgcatgcctaacacattcgggttacggcgacggaagcgattag

SEQ ID NO: 289642 - DNA, 7026 bp, Artificial Sequence
  derived and/or modified sequence
atgaagaacatctactgcctgatccccaagctggtgaactttgccaccctgggctgcctgtggatctctgtggtgcagtgcaccgtgctgaacagctgcctgaagagctgtgtgaccaacctgggccagcagctggacctgggcaccccccacaacctgtctgagccctgcatccagggctgccacttctggaacagcgtggaccagaagaactgtgccctgaagtgcaatgacacctacgccaccgtgtgtgagcgggagagctgtgaggtgggctgcagcagcgctgagggcgcctatgaggaggaggtgctggagaatgctgacctgcccacagccccctttgccagcagcatcggcagccacaacatgaccctgcgctggaagagcgccaacttcagcggcgtgaagtacatcatccagtggaagtatgcccagctgctgggctcctggacctacaccaagacagtgtcccggcccagctatgtggtgaagcccctgcaccccttcacagagtacatcttccgggtggtgtggatcttcaccgcccagctgcagctgtacagcccccccagccccagctaccgcacccacccccacggcgtgcctgagacagcccccctcatccggaacatcgagagcagcagcccagacacagtggaggtgtcctgggaccccccccagtttcctgggggccccatcctgggctacaacctgcggctcatcagcaagaaccagaagctggatgctggcacccagaggaccagcttccagttctacagcaccctgcccaacaccatctaccgcttcagcattgctgctgtgaatgaggtgggggagggccctgaggccgagagcagcatcaccaccagcagcagcgctgtgcagcaggaggagcagtggctgttcctgagcaggaagaccagcctgaggaagaggagcctgaagcacctggtggatgaggcccactgcctgcggctggatgccatctaccacaacatcaccggcatctctgtggatgtgcaccagcagatcgtgtacttcagcgagggcaccctcatctgggccaagaaggccgccaacatgtctgatgtgtctgacctgcgcatcttctaccggggcagcggcctcatcagcagcatcagcattgactggctgtaccagaggatgtacttcatcatggatgagctggtgtgtgtgtgtgacctggagaactgcagcaacatcgaggagatcaccccacccagcatcagcgccccccagaagatcgtggccgacagctacaacggctacgtgttctacctgctgagagatggcatctacagagctgacctgcctgtgcccagcggccgctgtgccgaggccgtgcgcatcgtggagagctgcaccctgaaggactttgccatcaagccccaggccaagaggatcatctacttcaatgacacagcccaggtgttcatgagcaccttcctggatggcagcgccagccacctgatcctgccccgcatcccctttgctgatgtgaagagctttgcctgtgagaacaatgacttcctggtgacagatggcaaggtgatcttccagcaggatgccctgtccttcaatgagttcatcgtgggctgtgacctgagccacatcgaggagtttggatttggaaacctggtgatcttcggcagcagcagccagctgcaccccctgcccggccggccccaggagctgtctgtgctgtttggcagccaccaggccctggtgcagtggaagcccccagccctggccatcggggccagccccagcgcctggcagaactggacctatgaggtgaaggtgtccacccaggaccccccagaggtgacccacatcttcctgaacatcagcggcaccatgctgaatgtgcctgagctgcagagcgccatgaagtacaaggtgtctgtgcgggccagcagccccaagaggcctggcccctggagcgagcccagcgtgggcaccaccctggtgcctgccagcgagccccccttcatcatggctgtgaaggaggatggcctgtggagcaagcccctgaacagctttggacctggagagttcctgagcagtgacattggaaatgtgtctgacatggactggtacaacaacagcctgtactacagcgacaccaagggagatgtgtttgtgtggctgctgaatggaacagacatcagcgagaactaccacctgcccagcattgctggagctggggccctggcctttgagtggctgggccacttcctgtactgggccggcaagacctacgtgatccagaggcagagcgtgctgaccggccacacagacatcgtgacccacgtgaagctgctggtgaatgacatggtggtggacagcgtgggcggctacctgtactggaccaccctgtacagcgtggagagcacccggctgaatggagagagcagcctggtgctgcagacccagccctggttcagcggcaagaaggtgattgccctgaccctggacctgagtgatggcctgctgtactggctggtgcaggacagccagtgcatccacctgtacacagctgtgctgcggggccagagcactggagacaccaccatcacagaatttgctgcctggagcaccagcgagatcagccagaatgccctgatgtactacagcggccgcctcttctggatcaatggcttccgcatcatcaccacccaggagatcggccagaagacctctgtgtctgtgctggagcccgcccgcttcaaccagttcaccatcatccagaccagcctgaagcccctgcccggcaacttctccttcacccccaaggtgatcccagattctgtgcaggagagcagcttcagaattgagggcaatgccagcagcttccagatcctgtggaatggacctcctgctgtggactggggcgtggtgttctacagcgtggagttcagcgcccacagcaagttcctggccagcgagcagcacagcctgcccgtcttcaccgtggagggcctggagccctatgccctcttcaacctgtctgtgaccccctacacctactggggcaagggccccaagaccagcctgagcctgcgggcccctgagaccgtgcccagcgcccctgagaacccccgcatcttcatcctgcccagcggcaagtgctgcaacaagaatgaggtggtggtggagttccgctggaacaagcccaagcatgaaaatggagtgctgaccaagtttgagatcttctacaacatcagcaaccagagcatcaccaacaagacctgtgaggactggattgctgtgaatgtgacccccagcgtgatgtccttccagctggagggcatgagcccccgctgcttcatcgccttccaggtgcgggccttcaccagcaaaggacctggcccctatgcagatgtggtgaagagcaccaccagcgagatcaaccccttcccccacctgatcaccctgctgggcaacaagatcgtgttcctggacatggaccagaaccaggtggtgtggaccttctctgctgagagggtcatctctgctgtgtgctacacagctgacaatgagatgggctactatgcagagggggacagcctcttcctgctgcacctgcacaacagaagcagcagcgagctgttccaggacagcctggtgtttgacatcaccgtcatcaccatcgactggatcagccgccacctgtactttgccctgaaggagagccagaatggcatgcaggtgtttgatgtggacctggagcacaaggtgaagtacccccgggaggtgaagatccacaacagaaacagcaccatcatctccttctctgtgtaccccctgctgagccggctgtactggacagaggtgagcaactttggctaccagatgttctactacagcatcatcagccacaccctgcaccgcatcctgcagcccacagccaccaaccagcagaacaagaggaaccagtgcagctgcaatgtgacagaatttgagctgagcggggccatggccatcgacaccagcaacctggagaagcccctcatctactttgccaaggcccaggagatctgggccatggacctggagggctgccagtgctggagggtcatcaccgtgcctgccatgctgggcaagaccctggtgtccctgactgtggatggagacctgatctactggatcatcacagccaaggacagcacccagatctaccaggccaagaagggaaatggagccatcgtgtcccaggtgaaggccctgcggagccgccacatcctggcctacagctctgtgatgcagcccttcccagacaaggccttcctgagcctggccagtgacacagtggagcccaccatcctgaatgccaccaacaccagcctgaccatccggctgcccctggccaagaccaacctgacctggtacggcatcaccagccccacccccacctacctggtgtactatgcagaggtgaatgacaggaagaacagcagtgacctgaagtaccgcatcctggagttccaggacagcatcgccctgattgaggacctgcagcccttcagcacctacatgatccagattgctgtgaagaactactacagcgaccccctggagcacctgcccccaggcaaggagatctggggcaagaccaagaatggagtgcctgaggccgtgcagctgatcaacaccaccgtgcggagtgacaccagcctcatcatctcctggagggagagccacaagcccaacggccccaaggagagcgtgcgctaccagctggccatcagccacctggccctgatccctgagacccccctgcggcagagcgagttccccaacggccgcctgaccctgctggtgacccggctgagcggcggcaacatctacgtgctgaaggtgctggcctgccacagcgaggagatgtggtgcacagagagccaccctgtgacagtggagatgttcaacaccccagagaagccctacagcctggtgcctgagaacaccagcctgcagttcaactggaaggcccccctgaatgtgaacctgatccgcttctgggtggagctgcagaagtggaagtacaatgagttctaccacgtgaagaccagctgcagccagggccctgcctacgtgtgcaacatcaccaacctgcagccctacaccagctacaacgtgcgggtggtggtggtgtacaagacaggagagaacagcaccagcctgcctgagagcttcaagaccaaggccggcgtgcccaacaagccaggcatccccaagctgctggagggcagcaagaacagcatccagtgggagaaggcagaagataatggctgccgcatcacctactacatcctggagatcaggaagagcaccagcaacaacctgcagaaccagaacctgcgctggaagatgaccttcaacggcagctgcagctctgtgtgcacctggaagagcaagaacctgaagggcatcttccagttccgggtggtggccgccaacaacctgggctttggagagtacagcggcatcagcgagaacatcatcctggtgggagatgacttctggatccctgagaccagcttcatcctgaccatcatcgtgggcatcttcctggtggtgaccatccccctgacctttgtgtggcaccggcggctgaagaaccagaagagcgccaaggagggcgtgacagtgctgatcaatgaagacaaggagctggccgagctgcggggcctggccgccggcgtgggcctggccaatgcctgctacgccatccacaccctgcccacccaggaggagattgagaacctgcctgccttcccccgggagaagctgaccctgcggctgctgctgggcagcggggccttcggggaggtgtatgagggcacagctgtggacatcctgggcgtgggcagcggggagatcaaggtggccgtgaagaccctgaagaagggcagcacagaccaggagaagattgagttcctgaaggaggcccacctgatgagcaagttcaaccaccccaacatcctgaagcagctgggcgtgtgcctgctgaatgagccccagtacatcatcctggagctgatggagggcggggacctgctgacctacctgaggaaggccaggatggccaccttctacggccccctgctgaccctggtggacctggtggacctgtgtgtggacatcagcaagggctgtgtgtacctggagaggatgcacttcatccaccgggacctggccgccaggaactgcctggtgtctgtgaaggactacaccagccccagaattgtgaagatcggggactttggcctggcccgggacatctacaagaatgactactacaggaagagaggagagggcctgctgcctgtgcgctggatggcccctgagagcctgatggatggcatcttcaccacccagagtgatgtgtggagctttggcatcctgatctgggagatcctgaccctgggccaccagccctacccagcccacagcaacctggatgtgctgaactacgtgcagacaggaggccgcctggagccccccaggaactgcccagatgacctgtggaacctgatgacccagtgctgggcccaggagccagaccagaggcccaccttccaccgcatccaggaccagctgcagctgttcaggaacttcttcctgaacagcatctacaagagcagagatgaggccaacaacagcggggtcatcaatgaaagctttgaaggagaagatggagatgtgatctgcctgaacagtgatgacatcatgcctgtggccctgatggagaccaagaaccgggagggcctgaactacatggtgctggccacagaatgtggccagggcgaggagaagtctgagggccccctgggcagccaggagagcgagagctgtggcctgaggaaggaggagaaggagccccatgctgacaaggacttctgccaggagaagcaggtggcctactgccccagcggcaagccagagggcctgaactatgcctgcctgacccacagcggctatggagatggcagtgactag

SEQ ID NO: 289643 - DNA, 7026 bp, Artificial Sequence
  derived and/or modified sequence
atgaagaacatctactgcctgatccccaagctggtgaacttcgccacactgggctgcctttggatcagcgttgtgcagtgcactgtgttgaactcctgcttgaaatcatgcgtgaccaatctgggccagcaactggacctcgggacgccacacaatctcagcgagccatgcattcaggggtgccacttctggaactcagttgaccagaagaactgcgctctgaagtgcaacgacacctatgccaccgtatgtgagcgagaatcttgcgaggtcgggtgttctagcgcagaaggcgcatacgaagaggaggtcctcgagaacgccgacctcccgaccgccccatttgctagcagcataggcagccacaatatgacgctgcgttggaaaagcgccaatttttcaggcgtgaagtatatcatacagtggaagtatgctcagctgttaggatcttggacctacaccaaaacagtgagtagaccttcctatgtggtgaaaccactacacccatttacggaatatattttcagagtggtgtggatatttacggctcagttgcagctatactcacccccctccccgagctatcggacacaccctcacggcgtgccggagaccgccccactaattagaaatatcgagagttcttcgcccgacacagtagaggtgtcctgggatcctccgcagttcccgggaggcccaattctgggctacaacctccgcttgatcagcaaaaaccagaaacttgatgctgggacgcagagaacctcctttcagttctattccacacttcccaatacgatttaccgttttagcattgccgccgtcaacgaggtgggcgagggcccagaggcggagagttcaatcaccacttccagctccgcagtacagcaggaggagcagtggttatttctttccagaaaaaccagcttaaggaagcgctctctgaaacacctggtggatgaggcacattgtctcaggctggacgcgatctaccacaacatcactggtatctccgtggacgtgcaccagcagatagtgtacttttccgagggtacattgatctgggccaagaaggcagccaatatgtcagacgtgagcgacctcagaatcttctacagaggctctggactgatatcatcgatatccatcgactggctataccaacgtatgtatttcatcatggatgagctcgtgtgcgtgtgcgatttggagaactgcagtaatatcgaagagatcacccccccctccatctccgcaccacagaagatagtggccgactcctataacggctacgtgttctatctcttgcgagacgggatctacagagcggatctccctgtaccctctggcaggtgcgccgaggccgtacggatcgtggagtcctgtacactcaaggacttcgctattaagccccaggccaaacggattatttacttcaatgatacagcccaggtctttatgtctacatttttagatgggagtgcctcgcacctgatattaccgcggattcccttcgcagacgtcaagtcttttgcttgcgaaaataacgattttctggtcaccgacggtaaagttatcttccagcaggacgcgctctcctttaacgaattcatagtcggatgtgacttgtcccatatcgaagagttcggctttgggaatcttgtgatttttgggagtagctctcagttacacccactgccgggacgacctcaggaacttagtgttctatttggttcgcatcaggcactggtgcagtggaaacctcccgctctggctataggggccagcccttccgcttggcaaaattggacttatgaggtgaaagtctcgactcaggatcctccagaggttacacatatcttcctcaacatctcaggaactatgcttaacgtgcccgaactacagagcgccatgaaatataaagtgagcgttcgggcaagttcacccaagcgcccaggcccatggagcgagccatccgttgggactacactcgtccccgctagcgagccgcctttcatcatggccgttaaggaggacgggctttggagtaaaccgcttaactcatttggaccgggtgaatttctctcatccgatattggaaatgtgagcgacatggattggtataataacagcctgtactatagcgacactaagggagatgtctttgtttggctgctgaatggaacagatattagtgaaaactatcacctgcccagcattgcgggggctggggcgttggctttcgagtggttgggtcatttcctttattgggcaggaaagacatatgtaattcagcgtcagtctgtgctgacaggacataccgacattgtcacccatgtgaagcttctggtcaatgatatggtggtcgacagcgtaggaggttacctctactggacgaccctgtacagtgtggaatcaacaaggctcaatggagagagctcactggtgctacagacacagccctggttctcaggaaagaaagttattgccctgaccctggacctctccgacggtttactatactggcttgtgcaggacagtcagtgtatccatctgtatacagccgtcttgaggggccagtcaacgggtgataccactatcactgaatttgccgcgtggagcacatccgagatctcacagaatgctctcatgtattacagtggccgtctgttttggattaacggcttccgcatcatcaccacccaggagatcggtcagaaaacatctgtttctgtccttgaacccgcaaggtttaaccagttcactatcatacaaacaagcctgaagccactcccgggcaacttttctttcacccccaaagttatccccgactctgtccaggagtccagctttcggattgaaggaaacgctagttccttccagattctatggaacggaccccccgctgtggactggggagttgttttctactccgtagaattctctgcgcatagcaagttcttagcttcagaacagcattcacttcctgtttttacagtggagggtttggaaccatacgcattgtttaatctgtcggtgacaccttatacctactggggcaaaggtcccaaaacttccttgtcccttagggcacccgagactgtgccatcagcacctgagaatccgcgcatctttatcttgccatctggcaaatgctgtaataaaaatgaggttgtggtggaatttcggtggaacaaaccaaagcacgagaacggggtgcttaccaagtttgagatattctacaacattagcaaccagagcatcaccaacaagacctgcgaggactggattgccgtgaatgtcaccccttcagtgatgtctttccagttagagggtatgagtccaagatgtttcatcgcttttcaggtgcgggcatttacatccaagggccctggaccatacgctgacgtggtgaagtccacaaccagcgagattaacccttttcctcacctgatcacactcctggggaataaaatcgtgtttctggacatggatcagaatcaggttgtctggaccttcagtgctgagagagtcatttcagctgtttgttacaccgctgacaacgagatgggatactatgctgagggagactcactcttcctgttacatttacacaatagatcgagtagtgagctcttccaagattctctcgtgttcgatattacggttattaccatagactggatttcccgccacctctatttcgccctgaaagaatcccagaacggtatgcaagtgttcgatgtggatctggaacacaaggtgaaatatcctagggaagttaagatccacaacaggaactcaaccattatttcttttagtgtttatccactactgtctcggctgtattggactgaagttagcaattttgggtaccagatgttttactattccatcatctcacacaccctgcatagaatccttcagcctaccgcgacaaaccaacagaataagagaaatcagtgttcttgtaacgtcaccgagttcgagctgtctggcgctatggccatagacacttctaacctggagaaaccactgatctattttgccaaggcacaggagatctgggcgatggacttagagggttgtcagtgttggagggtcataacggtgccggctatgctgggcaagacactggtgtctctgaccgtcgatggcgacctaatttattggattataaccgctaaagactcaactcagatctaccaggcgaagaagggcaatggagctatcgtgagccaggtaaaagcactccgtagcagacatattctcgcttattcctcagtcatgcaacccttcccggacaaagccttccttagtctggcatcagacacagtcgaaccaacgattctcaatgcaactaatacatcactcaccattaggttgcctctggccaaaaccaatctcacctggtatggcattaccagcccgactcctacctacctggtctactatgcagaggttaatgatcgcaagaactcgtcagatctaaaatatcggattttggagtttcaggattccatagcattgatcgaagacctccagccattctctacctacatgattcagattgcagttaagaactactactcagatccattggaacaccttcctcccggcaaggaaatctggggaaaaaccaaaaatggcgtccctgaagctgtccagctgattaataccacagtgcgcagtgacacctctctgattatatcctggagagagtcccacaaaccgaacggccccaaagaatccgtgcgttatcagttagccatctcccatcttgcactgatccctgagaccccgctccggcaatccgagtttcccaatggcaggctgactcttctggtgactcggctgtcaggaggcaatatctacgtgttgaaagttctcgcttgccactccgaagagatgtggtgcactgaatcccacccagtaacggtggagatgtttaatacacctgaaaagccatatagtctggtgcccgagaatactagccttcagtttaactggaaagcaccacttaatgtgaacctaattcgcttctgggtcgaactgcaaaagtggaaatacaacgagttctaccacgtgaagacctcatgctctcaaggcccggcgtatgtctgtaacatcaccaacctgcagccctacacaagctataacgtcagagtggtagtcgtttacaagacaggagagaattctacatctctccccgaatccttcaagaccaaagcaggagttcctaataagcccggtattcctaaacttctcgagggctcaaagaactcaatacagtgggagaaagcggaagacaacggctgtagaattacatattacattttggagatcagaaaatccacaagcaacaacctgcagaaccagaacctcaggtggaagatgactttcaacggctcatgttcctctgtgtgcacatggaaaagtaagaatctgaaggggatcttccagttcagagtggtggctgccaacaacctgggatttggggaatatagtggaatctctgagaatatcatactcgtgggagacgacttctggattcccgagacttcctttatcctaactattatagtcgggatcttcctggttgtcacgattcccctcacttttgtctggcacagacggcttaagaatcagaaaagtgccaaggagggagtaactgtactgataaacgaagacaaggagctggcagaactaagggggttggccgcaggagttggtctcgcaaatgcctgctatgctattcatacgctgcctacccaggaggaaatagaaaacctgcctgcctttcctagagagaagctcactcttcgactcctgctcggttctggcgctttcggggaggtgtatgaaggtaccgcagtcgacatccttggggtaggaagcggtgagatcaaggtcgccgtgaagacactgaagaaaggttccactgaccaggaaaaaatcgagttcctcaaggaggctcacttgatgtccaaattcaaccaccccaacatcctcaaacagctgggcgtgtgcctgctaaacgaaccgcagtatatcatcctggagctgatggaaggtggggatctgttgacgtacctgaggaaggctcggatggcaaccttctacggtcctctcttaacactcgtagaccttgtcgacttgtgcgtagacattagtaaagggtgcgtctatctggaacgaatgcattttatccacagagacctcgcagcccgcaactgtttagtgtcagtaaaagactacacctccccgcgaatcgtaaaaatcggggattttggtctggctagggatatctataagaatgactattaccgtaagcgtggtgaaggactcctgccagtaaggtggatggcccctgaatcactgatggatggaattttcaccacacagtccgatgtgtggagctttggaattttgatttgggagatcctgaccctcggacaccagccataccctgcacattccaacctggatgtgctgaattatgttcaaacaggcggcagactcgagccacctcgcaactgtcctgatgacctgtggaatcttatgactcagtgctgggcccaagagccagaccagagacctacttttcacaggatacaggaccagcttcagctttttcgaaattttttccttaatagcatctacaaaagtcgagacgaagctaacaactcaggcgtcatcaatgagagtttcgagggtgaggacggcgacgttatctgcctgaactcagacgacatcatgccggtggcgctgatggaaaccaagaatcgagagggattaaattatatggtgcttgctacagaatgtggacagggggaggaaaagtcagaagggcctctgggtagtcaggaatcagagagttgcgggcttagaaaggaagaaaaagagccgcacgccgataaggacttttgccaggagaaacaggtagcctactgcccctccggaaaacctgagggtctgaattacgcctgcttaacccactccgggtacggagatggctctgactag

SEQ ID NO: 289644 - DNA, 7025 bp, Artificial Sequence
  derived and/or modified sequence
atgaaaaacatctactgtctgattccaaaactggtcaattttgccaccctggggtgtttgtggattagtgtggtgcagtgtaccgtactgaattcatgcctgaagagctgtgtaactaacttgggccagcagctggatctaggtacccctcacaatctgtctgaaccatgcatccagggatgccacttctggaattcagtggaccagaagaattgcgcactgaaatgtaacgacacatacgccactgtatgcgaaagggagtcctgcgaagtgggctgttcttccgcggagggcgcttacgaagaggaggtgttggaaaatgccgatttgcctactgctcctttcgcctcttccatcggtagccacaatatgacactgcgctggaagtccgccaatttttctggggttaaatacataatccagtggaagtacgctcaactgcttggctcatggacatacacaaagactgtgtcaaggcccagctatgtggtgaaaccgctgcaccccttcactgagtacatcttcagggtggtttggatatttacagcacagctgcagctgtactcaccaccgtctccttcttatagaacacacccccacggcgtgcccgagaccgcccctctgataaggaacatagagagctcaagccctgacacagtcgaggtgtcatgggatcctcctcagtttcctggtgggcctattttgggatacaacctgaggctgatctctaagaatcagaagctggacgctggaacacagcgaaccagcttccagttttactctactttacccaacacaatttataggttcagcattgccgcagtgaatgaggtcggcgaaggaccggaagccgagagctctattaccaccagctcctcagcagtccagcaggaggagcaatggctcttcctgagccggaaaacatcactgagaaagcggagcctcaaacatctggtggatgaagctcattgcctcagactggacgccatttatcacaatatcacaggcatcagcgtagatgtgcatcagcagatcgtgtatttcagtgagggcaccctaatctgggccaaaaaggctgcgaatatgtccgatgtgtctgatctccgaattttctacagaggcagtggactgattagctctatttccatcgattggctgtatcagcgcatgtactttattatggacgagcttgtgtgcgtttgcgacctagaaaattgctccaatattgaggaaattaccccacctagcatcagcgcgccacaaaagattgttgcggactcttacaatgggtacgttttctacctgctgcgcgacggcatatacagagctgacctgcccgttccaagtggtaggtgtgctgaggccgtccggatcgtcgaatcttgtaccttgaaggatttcgccattaagccccaggctaagcggatcatttatttcaacgacacagcccaggtgtttatgtccacgtttcttgatggcagcgcctctcacttaatcctgcccagaatccctttcgccgacgtcaagtcattcgcgtgtgagaataacgattttcttgttacggatgggaaggtgatctttcagcaggatgctctaagcttcaacgaatttatagtgggctgtgacttaagccacatagaggagttcggtttcggaaacctcgtgatcttcggaagtagttctcagctgcaccccctcccagggcgaccacaggagcttagcgtgctgtttggatcgcaccaggccttagtccaatggaaacctccagccctcgctatcggagcgtcaccctcagcctggcaaaactggacctatgaggtaaaagtgtccacccaggatcccccagaagtcacgcatattttcctgaacatctccggcaccatgttaaacgttccagaacttcagagcgcaatgaagtataaggtgagtgttagagctagcagtcctaagcggcctggcccttggagcgagcccagcgtgggaaccactcttgtcccagcatcagagcctcccttcattatggcggtgaaagaggacggactgtggtcaaagccattgaactcatttggccctggtgagtttctaagttctgatatcgggaacgtgtctgatatggactggtacaataactcactgtattattctgacactaagggtgatgtttttgtatggctgctgaacggcaccgacatctccgagaactaccatctcccttcaatagctggtgctggcgcattggccttcgagtggctggggcactttctgtactgggccggtaagacatatgtcattcagagacagagtgtcttgaccgggcacactgacatcgtaacccacgtcaagctattagtcaatgacatggttgtggacagcgtcggcggatatttgtattggaccacactgtactccgtcgaatctacacgtctgaacggagagagctcactggtcctgcagactcagccctggttttccggaaagaaggtgatagctctcactttggacctgagcgacggactgttgtattggctcgtgcaggattctcaatgtatccatctatacacggctgtgttgcggggtcaatcaaccggggatacaaccatcaccgagtttgccgcatggagcacctccgagattagccagaatgccttaatgtattattctggcagactcttttggataaacggctttaggatcatcacaacccaagaaatcggccagaagacgtcagtatcagtgctggagccggctagattcaatcagttcactataatccaaacatccctcaagcctctgcccggaaacttcagtttcactcctaaagttataccagattctgtccaggagtcctcattccggatcgaggggaacgccagcagcttccaaatcctgtggaatgggcctccagctgtggattggggtgtggtcttttacagtgtggaattctccgcgcactccaaattcttagcatctgagcagcactcattgcctgtctttacggttgaaggcctggaaccttatgcccttttcaatctttccgtgacgccgtatacctactggggaaaggggcctaagacaagtctgagcctgagggcccctgagacggtgccatctgcaccggagaaccctcggatatttatcctcccgagcggaaaatgttgcaacaaaaacgaagtggtcgtggagtttcggtggaataaacctaagcacgagaacggcgttcttactaagtttgagatcttctataacatctcaaatcaatcgattaccaacaaaacatgtgaagactggatcgccgtaaatgtaacaccttccgtaatgagcttccagttagagggtatgtcacctagatgctttatcgctttccaggtgcgggcatttaccagcaagggccctgggccttatgcggacgtggtgaagagcacaacatctgaaattaacccctttcctcatctcattaccctactagggaataagatcgtcttcctggacatggatcagaatcaggtggtctggaccttttcagctgaacgcgtaatttccgccgtctgctatacagcagacaacgagatggggtattacgccgagggggattccttattcttactccatctgcacaacaggagcagttccgaattgtttcaggactcgctcgtttttgacattactgtcatcaccattgactggatctctcggcatttatactttgcattgaaggagagtcagaacgggatgcaggtgtttgacgtggatctggaacataaagtgaagtatcccagagaggtaaagatccacaatcggaacagcacaattatttccttctctgtatatccactcttatccagactgtattggaccgaggtgtcgaattttggataccaaatgttttactacagcatcatctcccatactctgcacagaatcctgcagccaactgccactaatcagcaaaataagcgcaaccagtgttcctgcaatgtgacagaattcgagcttagtggagccatggcaattgacacctccaatcttgagaagcccctcatttattttgccaaagcacaggagatttgggccatggacctagagggatgccagtgctggagggttatcacggtccctgcaatgctgggcaagacactggtatccctcactgtcgatggagatctcatctattggatcatcaccgctaaggactccactcaaatctatcaggcaaagaagggtaacggcgctattgtgagccaggtgaaggcccttcggtcccgacacatcctggcgtacagctctgtgatgcagccatttcctgataaggcgttcctgtcccttgcttccgataccgtcgaacccaccatcctcaacgccacgaacacctcgctgacgatccggttaccgctggctaagaccaatctgacctggtatggcattacttctcccactccaacatatctagtgtattatgcagaagtgaatgatagaaaaaattcgagcgatttgaaataccgaatacttgaatttcaggacagcattgccttgatagaggaccttcagccattttcaacctacatgatccaaattgctgtgaagaattattacagcgatcccctggaacaccttcctccaggaaaggagatttggggcaagaccaaaaacggggtccccgaggctgtgcagctcatcaatacgaccgtgcgatccgatacaagcctgatcataagttggagagagagccacaaacctaatggcccaaaagagtcggtgcggtatcaacttgccattagccacttagctctgattcccgaaacccctctgagacaatcagagttccctaacggcaggctcaccctcctagtgaccaggctctcaggaggtaacatctatgtgctgaaggtgctggcttgccattctgaagaaatgtggtgtacagaaagccaccctgtcacagtggaaatgttcaataccccagagaaaccttactctctcgtcccggaaaataccagtcttcagtttaactggaaggccccattaaatgtgaaccttatccgcttttgggtagaactgcagaaatggaagtacaatgaattctatcacgtgaaaacctcctgcagccaagggccagcttacgtgtgcaatatcactaatctgcaaccctatacctcctataacgtgcgcgtagttgtagtgtacaagaccggcgaaaactcaacaagtctgccggaaagtttcaaaaccaaggcaggcgtgccaaacaagcccggtattcccaaactgctcgaggggagtaagaactctattcagtgggaaaaagccgaggacaacggctgcaggataacttattatattcttgagattcgtaagtccaccagcaataacctacagaatcagaacctacgatggaaaatgactttcaacggaagttgcagtagcgtctgcacttggaagtctaaaaacttgaaggggattttccaatttcgcgtggtggcggcaaacaacctgggcttcggggagtactctgggatctccgagaatatcatacttgtaggggacgacttttggattcccgaaacctcctttatactgactatcattgtgggaattttcctcgtggtaactatccctctcactttcgtctggcatcgtagactcaaaaatcagaaaagcgctaaggaaggcgttactgtactcatcaacgaagataaggagctcgctgagctgaggggcttggcagctggcgtgggactagctaacgcctgctacgcgatccacacgctgccgactcaagaagaaattgagaacctccctgctttcccaagggaaaagttgactctccggcttctgctgggctctggcgctttcggagaggtctacgaagggacagcagtggacatactcggtgttggctccggagaaatcaaagtggcggtcaaaacactgaagaagggttctaccgatcaggagaagattgagttcttaaaggaggcacacctgatgtccaagtttaatcacccgaacattctgaaacagctgggagtgtgtctgctaaatgaaccgcagtacataattctggaactcatggagggaggcgatctgctaacctatcttagaaaggccaggatggcaacattttacggacctctgcttacactagtggatcttgtggatctgtgcgtagatatctctaaggggtgcgtgtacctggaaagaatgcattttatacaccgtgatctggccgctcggaattgtctcgtctctgttaaagactacacatccccccgaatcgtgaagatcggggattttggactcgcaagggacatttataagaatgattattatagaaagagaggggaaggactgcttcctgtccgatggatggctcccgaatctttgatggatggaattttcactactcagtcagatgtgtggtcatttgggatattgatctgggagatcctaacactgggacatcagccttatccggcacacagtaatttggacgtgctgaattacgtacaaaccggtggcaggcttgagccccctcgaaactgtccagatgatctttggaatttgatgacccaatgctgggcgcaagaaccagatcagcgcccaactttccaccggattcaagatcagctgcagctgttcagaaatttcttcctgaattcaatctacaaatccagagatgaagccaacaattccggagtgatcaacgagagttttgaaggggaggatggcgatgtgatctgtctcaatagtgatgatataatgcctgtggccctgatggagactaaaaacagagaaggactgaattatatggtgctggcaaccgaatgcggccagggcgaggagaaaagtgaggggccacttgggtcgcaagagtcggaatcttgtggtctgcggaaggaggagaaggagccgcatgccgataaggacttctgccaggagaagcaagtagcctattgcccttctggcaaaccagagggcctgaattacgcttgtctaacgcacagcggatacggggacggatccgatta

SEQ ID NO: 289645 - DNA, 7417 bp, Artificial Sequence
  derived and/or modified sequence
caagctttcaagcattcaaaggtctaaatgaaaaaggctaagtattatttcaaaaggcaagtatatcctaatatagcaaaacaaacaaagcaaaatccatcagctactcctccaattgaagtgatgaagcccaaataattcatatagcaaaatggagaaaattagaccggccatctaaaaatctgccattggtgaagtgatgaagaacatttactgtcttattccgaagcttgtcaattttgcaactcttggctgcctatggatttctgtggtgcagtgtacagttttaaatagctgcctaaagtcgtgtgtaactaatctgggccagcagcttgaccttggcacaccacataatctgagtgaaccgtgtatccaaggatgtcacttttggaactctgtagatcagaaaaactgtgctttaaagtgtaatgatacttatgccaccgtttgtgagcgggagtcgtgtgaggttggctgtagcagcgcggaaggtgcatatgaagaggaagtactggaaaatgcagacctaccaactgctccctttgcttcttccattggaagccacaatatgacattacgatggaaatctgcaaacttctctggagtaaaatacatcattcagtggaaatatgcacaacttctgggaagctggacttatactaagactgtgtccagaccgtcctatgtggtcaagcccctgcaccccttcactgagtacattttccgagtggtttggatcttcacagcgcagctgcagctctactcccctccaagtcccagttacaggactcatcctcatggagttcctgaaactgcacctttgattaggaatattgagagctcaagtcccgacactgtggaagtcagctgggatccacctcaattcccaggtggacctattttgggttataacttaaggctgatcagcaaaaatcaaaaattagatgcagggacacagagaaccagtttccagttttactccactttaccaaatactatctacaggttttctattgcagcagtaaatgaagttggtgagggtccagaagcagaatctagtattaccacttcatcttcagcagttcaacaagaggaacagtggctctttttatccagaaaaacttctctaagaaagagatctttaaaacatttagtagatgaagcacattgccttcggttggatgctatataccataatattacaggaatatctgttgatgtccaccagcaaattgtttatttctctgaaggaactctcatatgggcgaagaaggctgccaacatgtctgatgtatctgacctgagaattttttacagaggttcaggattaatttcttctatctccatagattggctttatcaaagaatgtatttcatcatggatgaactggtatgtgtctgtgatttagagaactgctcaaacatcgaggaaattactccaccctctattagtgcacctcaaaaaattgtggctgattcatacaatgggtatgtcttttacctcctgagagatggcatttatagagcagaccttcctgtaccatctggccggtgtgcagaagctgtgcgtattgtggagagttgcacgttaaaggactttgcaatcaagccacaagccaagcgaatcatttacttcaatgacactgcccaagtcttcatgtcaacatttctggatggctctgcttcccatctcatcctacctcgcatcccctttgctgatgtgaaaagttttgcttgtgaaaacaatgactttcttgtcacagatggcaaggtcattttccaacaggatgctttgtcttttaatgaattcatcgtgggatgtgacctgagtcacatagaagaatttgggtttggtaacttggtcatctttggctcatcctcccagctgcaccctctgccaggccgcccgcaggagctttcggtgctgtttggctctcaccaggctcttgttcaatggaagcctcctgcccttgccataggagccagcccttctgcctggcagaactggacctatgaggtgaaagtatccacccaagaccctcctgaagtcactcatattttcttgaacataagtggaaccatgctgaatgtacctgagctgcagagtgctatgaaatacaaggtttctgtgagagcaagttctccaaagaggccaggcccctggtcagagccctcagtgggtactaccctggtgccagctagtgaaccaccatttatcatggctgtgaaagaagatgggctttggagtaaaccattaaatagctttggcccaggagagttcttatcctctgatataggaaatgtgtcagacatggattggtataacaacagcctctactacagtgacacgaaaggcgacgtttttgtgtggctgctgaatgggacggatatctcagagaattatcacctacccagcattgcaggagcaggggctttagcttttgagtggctgggtcactttctctactgggctggaaagacatatgtgatacaaaggcagtctgtgttgacgggacacacagacattgttacccacgtgaagctattggtgaatgacatggtggtggattcagttggtggatatctctactggaccacactctattcagtggaaagcaccagactaaatggggaaagttcccttgtactacagacacagccttggttttctgggaaaaaggtaattgctctaactttagacctcagtgatgggctcctgtattggttggttcaagacagtcaatgtattcacctgtacacagctgttcttcggggacagagcactggggataccaccatcacagaatttgcagcctggagtacttctgaaatttcccagaatgcactgatgtactatagtggtcggctgttctggatcaatggctttaggattatcacaactcaagaaataggtcagaaaaccagtgtctctgttttggaaccagccagatttaatcagttcacaattattcagacatcccttaagcccctgccagggaacttttcctttacccctaaggttattccagattctgttcaagagtcttcatttaggattgaaggaaatgcttcaagttttcaaatcctgtggaatggtccccctgcggtagactggggtgtagttttctacagtgtagaatttagtgctcattctaagttcttggctagtgaacaacactctttacctgtatttactgtggaaggactggaaccttatgccttatttaatctttctgtcactccttatacctactggggaaagggccccaaaacatctctgtcacttcgagcacctgaaacagttccatcagcaccagagaaccccagaatatttatattaccaagtggaaaatgctgcaacaagaatgaagttgtggtggaatttaggtggaacaaacctaagcatgaaaatggggtgttaacaaaatttgaaattttctacaatatatccaatcaaagtattacaaacaaaacatgtgaagactggattgctgtcaatgtcactccctcagtgatgtcttttcaacttgaaggcatgagtcccagatgctttattgccttccaggttagggcctttacatctaaggggccaggaccatatgctgacgttgtaaagtctacaacatcagaaatcaacccatttcctcacctcataactcttcttggtaacaagatagtttttttagatatggatcaaaatcaagttgtgtggacgttttcagcagaaagagttatcagtgccgtttgctacacagctgataatgagatgggatattatgctgaaggggactcactctttcttctgcacttgcacaatcgctctagctctgagcttttccaagattcactggtttttgatatcacagttattacaattgactggatttcaaggcacctctactttgcactgaaagaatcacaaaatggaatgcaagtatttgatgttgatcttgaacacaaggtgaaatatcccagagaggtgaagattcacaataggaattcaacaataatttctttttctgtatatcctcttttaagtcgcttgtattggacagaagtttccaattttggctaccagatgttctactacagtattatcagtcacaccttgcaccgaattctgcaacccacagctacaaaccaacaaaacaaaaggaatcaatgttcttgtaatgtgactgaatttgagttaagtggagcaatggctattgatacctctaacctagagaaaccattgatatactttgccaaagcacaagagatctgggcaatggatctggaaggctgtcagtgttggagagttatcacagtacctgctatgctcggaaaaacccttgttagcttaactgtggatggagatcttatatactggatcatcacagcaaaggacagcacacagatttatcaggcaaagaaaggaaatggggccatcgtttcccaggtgaaggccctaaggagtaggcatatcttggcttacagttcagttatgcagccttttccagataaagcgtttctgtctctagcttcagacactgtggaaccaactatacttaatgccactaacactagcctcacaatcagattacctctggccaagacaaacctcacatggtatggcatcaccagccctactccaacatacctggtttattatgcagaagttaatgacaggaaaaacagctctgacttgaaatatagaattctggaatttcaggacagtatagctcttattgaagatttacaaccattttcaacatacatgatacagatagctgtaaaaaattattattcagatcctttggaacatttaccaccaggaaaagagatttggggaaaaactaaaaatggagtaccagaggcagtgcagctcattaatacaactgtgcggtcagacaccagcctcattatatcttggagagaatctcacaagccaaatggacctaaagaatcagtccgttatcagttggcaatctcacacctggccctaattcctgaaactcctctaagacaaagtgaatttccaaatggaaggctcactctccttgttactagactgtctggtggaaatatttatgtgttaaaggttcttgcctgccactctgaggaaatgtggtgtacagagagtcatcctgtcactgtggaaatgtttaacacaccagagaaaccttattccttggttccagagaacactagtttgcaatttaattggaaggctccattgaatgttaacctcatcagattttgggttgagctacagaagtggaaatacaatgagttttaccatgttaaaacttcatgcagccaaggtcctgcttatgtctgtaatatcacaaatctacaaccttatacttcatataatgtcagagtagtggtggtttataagacgggagaaaatagcacctcacttccagaaagctttaagacaaaagctggagtcccaaataaaccaggcattcccaaattactagaagggagtaaaaattcaatacagtgggagaaagctgaagataatggatgtagaattacatactatatccttgagataagaaagagcacttcaaataatttacagaaccagaatttaaggtggaagatgacatttaatggatcctgcagtagtgtttgcacatggaagtccaaaaacctgaaaggaatatttcagttcagagtagtagctgcaaataatctagggtttggtgaatatagtggaatcagtgagaatattatattagttggagatgatttttggataccagaaacaagtttcatacttactattatagttggaatatttctggttgttacaatcccactgacctttgtctggcatagaagattaaagaatcaaaaaagtgccaaggaaggggtgacagtgcttataaacgaagacaaagagttggctgagctgcgaggtctggcagccggagtaggcctggctaatgcctgctatgcaatacatactcttccaacccaagaggagattgaaaatcttcctgccttccctcgggaaaaactgactctgcgtctcttgctgggaagtggagcctttggagaagtgtatgaaggaacagcagtggacatcttaggagttggaagtggagaaatcaaagtagcagtgaagactttgaagaagggttccacagaccaggagaagattgaattcctgaaggaggcacatctgatgagcaaatttaatcatcccaacattctgaagcagcttggagtttgtctgctgaatgaaccccaatacattatcctggaactgatggagggaggagaccttcttacttatttgcgtaaagcccggatggcaacgttttatggtcctttactcaccttggttgaccttgtagacctgtgtgtagatatttcaaaaggctgtgtctacttggaacggatgcatttcattcacagggatctggcagctagaaattgccttgtttccgtgaaagactataccagtccacggatagtgaagattggagactttggactcgccagagacatctataaaaatgattactatagaaagagaggggaaggcctgctcccagttcggtggatggctccagaaagtttgatggatggaatcttcactactcaatctgatgtatggtcttttggaattctgatttgggagattttaactcttggtcatcagccttatccagctcattccaaccttgatgtgttaaactatgtgcaaacaggagggagactggagccaccaagaaattgtcctgatgatctgtggaatttaatgacccagtgctgggctcaagaacccgaccaaagacctacttttcatagaattcaggaccaacttcagttattcagaaattttttcttaaatagcatttataagtccagagatgaagcaaacaacagtggagtcataaatgaaagctttgaaggtgaagatggcgatgtgatttgtttgaattcagatgacattatgccagttgctttaatggaaacgaagaaccgagaagggttaaactatatggtacttgctacagaatgtggccaaggtgaagaaaagtctgagggtcctctaggctcccaggaatctgaatcttgtggtctgaggaaagaagagaaggaaccacatgcagacaaagatttctgccaagaaaaacaagtggcttactgcccttctggcaagcctgaaggcctgaactatgcctgtctcactcacagtggatatggagatgggtctgattaatagcgttgtttgggaaatagagagttgagataaacactctcattcagtagttactgaaagaaaactctgctagaatgataaatgtcatggtggtctataactccaaataaacaatgcaacgttcctgatttctaatcttggttctgagagccatttggtttcagttgtagcaatccccataccagctgcctg

SEQ ID NO: 289646 - DNA, 7026 bp, Artificial Sequence
  derived and/or modified sequence
atgaagaacatctactgcctgatccccaagctggtgaacttcgccaccctgggctgcctgtggatcagcgtggtgcagtgcaccgtgctgaacagctgcctgaagagctgcgtgaccaacctgggccagcagctggacctgggcaccccccacaacctgagcgagccctgcatccagggctgccacttctggaacagcgtggaccagaagaactgcgccctgaagtgcaacgacacctacgccaccgtgtgcgagagagagagctgcgaggtgggctgcagcagcgccgagggcgcctacgaggaggaggtgctggagaacgccgacctgcccaccgcccccttcgccagcagcatcggcagccacaacatgaccctgagatggaagagcgccaacttcagcggcgtgaagtacatcatccagtggaagtacgcccagctgctgggcagctggacctacaccaagaccgtgagcagacccagctacgtggtgaagcccctgcaccccttcaccgagtacatcttcagagtggtgtggatcttcaccgcccagctgcagctgtacagcccccccagccccagctacagaacccacccccacggcgtgcccgagaccgcccccctgatcagaaacatcgagagcagcagccccgacaccgtggaggtgagctgggaccccccccagttccccggcggccccatcctgggctacaacctgagactgatcagcaagaaccagaagctggacgccggcacccagagaaccagcttccagttctacagcaccctgcccaacaccatctacagattcagcatcgccgccgtgaacgaggtgggcgagggccccgaggccgagagcagcatcaccaccagcagcagcgccgtgcagcaggaggagcagtggctgttcctgagcagaaagaccagcctgagaaagagaagcctgaagcacctggtggacgaggcccactgcctgagactggacgccatctaccacaacatcaccggcatcagcgtggacgtgcaccagcagatcgtgtacttcagcgagggcaccctgatctgggccaagaaggccgccaacatgagcgacgtgagcgacctgagaatcttctacagaggcagcggcctgatcagcagcatcagcatcgactggctgtaccagagaatgtacttcatcatggacgagctggtgtgcgtgtgcgacctggagaactgcagcaacatcgaggagatcaccccccccagcatcagcgccccccagaagatcgtggccgacagctacaacggctacgtgttctacctgctgagagacggcatctacagagccgacctgcccgtgcccagcggcagatgcgccgaggccgtgagaatcgtggagagctgcaccctgaaggacttcgccatcaagccccaggccaagagaatcatctacttcaacgacaccgcccaggtgttcatgagcaccttcctggacggcagcgccagccacctgatcctgcccagaatccccttcgccgacgtgaagagcttcgcctgcgagaacaacgacttcctggtgaccgacggcaaggtgatcttccagcaggacgccctgagcttcaacgagttcatcgtgggctgcgacctgagccacatcgaggagttcggcttcggcaacctggtgatcttcggcagcagcagccagctgcaccccctgcccggcagaccccaggagctgagcgtgctgttcggcagccaccaggccctggtgcagtggaagccccccgccctggccatcggcgccagccccagcgcctggcagaactggacctacgaggtgaaggtgagcacccaggacccccccgaggtgacccacatcttcctgaacatcagcggcaccatgctgaacgtgcccgagctgcagagcgccatgaagtacaaggtgagcgtgagagccagcagccccaagagacccggcccctggagcgagcccagcgtgggcaccaccctggtgcccgccagcgagccccccttcatcatggccgtgaaggaggacggcctgtggagcaagcccctgaacagcttcggccccggcgagttcctgagcagcgacatcggcaacgtgagcgacatggactggtacaacaacagcctgtactacagcgacaccaagggcgacgtgttcgtgtggctgctgaacggcaccgacatcagcgagaactaccacctgcccagcatcgccggcgccggcgccctggccttcgagtggctgggccacttcctgtactgggccggcaagacctacgtgatccagagacagagcgtgctgaccggccacaccgacatcgtgacccacgtgaagctgctggtgaacgacatggtggtggacagcgtgggcggctacctgtactggaccaccctgtacagcgtggagagcaccagactgaacggcgagagcagcctggtgctgcagacccagccctggttcagcggcaagaaggtgatcgccctgaccctggacctgagcgacggcctgctgtactggctggtgcaggacagccagtgcatccacctgtacaccgccgtgctgagaggccagagcaccggcgacaccaccatcaccgagttcgccgcctggagcaccagcgagatcagccagaacgccctgatgtactacagcggcagactgttctggatcaacggcttcagaatcatcaccacccaggagatcggccagaagaccagcgtgagcgtgctggagcccgccagattcaaccagttcaccatcatccagaccagcctgaagcccctgcccggcaacttcagcttcacccccaaggtgatccccgacagcgtgcaggagagcagcttcagaatcgagggcaacgccagcagcttccagatcctgtggaacggcccccccgccgtggactggggcgtggtgttctacagcgtggagttcagcgcccacagcaagttcctggccagcgagcagcacagcctgcccgtgttcaccgtggagggcctggagccctacgccctgttcaacctgagcgtgaccccctacacctactggggcaagggccccaagaccagcctgagcctgagagcccccgagaccgtgcccagcgcccccgagaaccccagaatcttcatcctgcccagcggcaagtgctgcaacaagaacgaggtggtggtggagttcagatggaacaagcccaagcacgagaacggcgtgctgaccaagttcgagatcttctacaacatcagcaaccagagcatcaccaacaagacctgcgaggactggatcgccgtgaacgtgacccccagcgtgatgagcttccagctggagggcatgagccccagatgcttcatcgccttccaggtgagagccttcaccagcaagggccccggcccctacgccgacgtggtgaagagcaccaccagcgagatcaaccccttcccccacctgatcaccctgctgggcaacaagatcgtgttcctggacatggaccagaaccaggtggtgtggaccttcagcgccgagagagtgatcagcgccgtgtgctacaccgccgacaacgagatgggctactacgccgagggcgacagcctgttcctgctgcacctgcacaacagaagcagcagcgagctgttccaggacagcctggtgttcgacatcaccgtgatcaccatcgactggatcagcagacacctgtacttcgccctgaaggagagccagaacggcatgcaggtgttcgacgtggacctggagcacaaggtgaagtaccccagagaggtgaagatccacaacagaaacagcaccatcatcagcttcagcgtgtaccccctgctgagcagactgtactggaccgaggtgagcaacttcggctaccagatgttctactacagcatcatcagccacaccctgcacagaatcctgcagcccaccgccaccaaccagcagaacaagagaaaccagtgcagctgcaacgtgaccgagttcgagctgagcggcgccatggccatcgacaccagcaacctggagaagcccctgatctacttcgccaaggcccaggagatctgggccatggacctggagggctgccagtgctggagagtgatcaccgtgcccgccatgctgggcaagaccctggtgagcctgaccgtggacggcgacctgatctactggatcatcaccgccaaggacagcacccagatctaccaggccaagaagggcaacggcgccatcgtgagccaggtgaaggccctgagaagcagacacatcctggcctacagcagcgtgatgcagcccttccccgacaaggccttcctgagcctggccagcgacaccgtggagcccaccatcctgaacgccaccaacaccagcctgaccatcagactgcccctggccaagaccaacctgacctggtacggcatcaccagccccacccccacctacctggtgtactacgccgaggtgaacgacagaaagaacagcagcgacctgaagtacagaatcctggagttccaggacagcatcgccctgatcgaggacctgcagcccttcagcacctacatgatccagatcgccgtgaagaactactacagcgaccccctggagcacctgccccccggcaaggagatctggggcaagaccaagaacggcgtgcccgaggccgtgcagctgatcaacaccaccgtgagaagcgacaccagcctgatcatcagctggagagagagccacaagcccaacggccccaaggagagcgtgagataccagctggccatcagccacctggccctgatccccgagacccccctgagacagagcgagttccccaacggcagactgaccctgctggtgaccagactgagcggcggcaacatctacgtgctgaaggtgctggcctgccacagcgaggagatgtggtgcaccgagagccaccccgtgaccgtggagatgttcaacacccccgagaagccctacagcctggtgcccgagaacaccagcctgcagttcaactggaaggcccccctgaacgtgaacctgatcagattctgggtggagctgcagaagtggaagtacaacgagttctaccacgtgaagaccagctgcagccagggccccgcctacgtgtgcaacatcaccaacctgcagccctacaccagctacaacgtgagagtggtggtggtgtacaagaccggcgagaacagcaccagcctgcccgagagcttcaagaccaaggccggcgtgcccaacaagcccggcatccccaagctgctggagggcagcaagaacagcatccagtgggagaaggccgaggacaacggctgcagaatcacctactacatcctggagatcagaaagagcaccagcaacaacctgcagaaccagaacctgagatggaagatgaccttcaacggcagctgcagcagcgtgtgcacctggaagagcaagaacctgaagggcatcttccagttcagagtggtggccgccaacaacctgggcttcggcgagtacagcggcatcagcgagaacatcatcctggtgggcgacgacttctggatccccgagaccagcttcatcctgaccatcatcgtgggcatcttcctggtggtgaccatccccctgaccttcgtgtggcacagaagactgaagaaccagaagagcgccaaggagggcgtgaccgtgctgatcaacgaggacaaggagctggccgagctgagaggcctggccgccggcgtgggcctggccaacgcctgctacgccatccacaccctgcccacccaggaggagatcgagaacctgcccgccttccccagagagaagctgaccctgagactgctgctgggcagcggcgccttcggcgaggtgtacgagggcaccgccgtggacatcctgggcgtgggcagcggcgagatcaaggtggccgtgaagaccctgaagaagggcagcaccgaccaggagaagatcgagttcctgaaggaggcccacctgatgagcaagttcaaccaccccaacatcctgaagcagctgggcgtgtgcctgctgaacgagccccagtacatcatcctggagctgatggagggcggcgacctgctgacctacctgagaaaggccagaatggccaccttctacggccccctgctgaccctggtggacctggtggacctgtgcgtggacatcagcaagggctgcgtgtacctggagagaatgcacttcatccacagagacctggccgccagaaactgcctggtgagcgtgaaggactacaccagccccagaatcgtgaagatcggcgacttcggcctggccagagacatctacaagaacgactactacagaaagagaggcgagggcctgctgcccgtgagatggatggcccccgagagcctgatggacggcatcttcaccacccagagcgacgtgtggagcttcggcatcctgatctgggagatcctgaccctgggccaccagccctaccccgcccacagcaacctggacgtgctgaactacgtgcagaccggcggcagactggagccccccagaaactgccccgacgacctgtggaacctgatgacccagtgctgggcccaggagcccgaccagagacccaccttccacagaatccaggaccagctgcagctgttcagaaacttcttcctgaacagcatctacaagagcagagacgaggccaacaacagcggcgtgatcaacgagagcttcgagggcgaggacggcgacgtgatctgcctgaacagcgacgacatcatgcccgtggccctgatggagaccaagaacagagagggcctgaactacatggtgctggccaccgagtgcggccagggcgaggagaagagcgagggccccctgggcagccaggagagcgagagctgcggcctgagaaaggaggagaaggagccccacgccgacaaggacttctgccaggagaagcaggtggcctactgccccagcggcaagcccgagggcctgaactacgcctgcctgacccacagcggctacggcgacggcagcgactag

SEQ ID NO: 289647 - protein, 66 aa, Artificial Sequence
  derived and/or modified sequence
MIGLNFNLRELLTKFEKDIQAEIDAHNDIFKSIDGNRQKMVKALGNSEEATMLQHRLDDMNQRWND

SEQ ID NO: 289648 - DNA, 756 bp, Artificial Sequence
  derived and/or modified sequence
tgaatcggcctgatgagcctgagcaagggcctgctggaggagaagtacagatacctgttcaaggaggtggccggccccaccgagatgtgcgaccagagacagctgggcctgctgctgcacgacgccatccagatccccagacagctgggcgaggtggccgccttcggcggcagcaacatcgagcccagcgtgagaagctgcttccagcagaacaacaacaagcccgagatcagcgtgaaggagttcatcgactggatgcacctggagccccagagcatggtgtggctgcccgtgctgcacagagtggccgccgccgagaccgccaagcaccaggccaagtgcaacatctgcaaggagtgccccatcgtgggcttcagatacagaagcctgaagcacttcaactacgacgtgtgccagagctgcttcttcagcggcagaaccgccaagggccacaagctgcactaccccatggtggagtactgcatccccaccaccagcggcgaggacgtgagagacttcaccaaggtgctgaagaacaagttcagaagcaagaagtacttcgccaagcaccccagactgggctacctgcccgtgcagaccgtgctggagggcgacaacctggagacccccagccagagcccccagctgttccacgacgacacccacagcagaatcgagcagtacgccaccagactggcccagatggagagaaccaacggcagcttcctgaccgacagcagcagcaccaccggctag

SEQ ID NO: 289649 - DNA, 201 bp, Artificial Sequence
  derived and/or modified sequence
atgatcggcctgaacttcaacctgagagagctgctgaccaagttcgagaaggacatccaggccgagatcgacgcccacaacgacatcttcaagagcatcgacggcaacagacagaagatggtgaaggccctgggcaacagcgaggaggccaccatgctgcagcacagactggacgacatgaaccagagatggaacgactag

SEQ ID NO: 289650 - DNA, 555 bp, Artificial Sequence
  derived and/or modified sequence
atgcacctggagccccagagcatggtgtggctgcccgtgctgcacagagtggccgccgccgagaccgccaagcaccaggccaagtgcaacatctgcaaggagtgccccatcgtgggcttcagatacagaagcctgaagcacttcaactacgacgtgtgccagagctgcttcttcagcggcagaaccgccaagggccacaagctgcactaccccatggtggagtactgcatccccaccaccagcggcgaggacgtgagagacttcaccaaggtgctgaagaacaagttcagaagcaagaagtacttcgccaagcaccccagactgggctacctgcccgtgcagaccgtgctggagggcgacaacctggagacccccagccagagcccccagctgttccacgacgacacccacagcagaatcgagcagtacgccaccagactggcccagatggagagaaccaacggcagcttcctgaccgacagcagcagcaccaccggcagcgtggaggacgagcacgccctgatccagcagtactgccagaccctgggcggctag

SEQ ID NO: 289651 - DNA, 546 bp, Artificial Sequence
  derived and/or modified sequence
atgcacctggagccccagagcatggtgtggctgcccgtgctgcacagagtggccgccgccgagaccgccaagcaccaggccaagtgcaacatctgcaaggagtgccccatcgtgggcttcagatacagaagcctgaagcacttcaactacgacgtgtgccagagctgcttcttcagcggcagaaccgccaagggccacaagctgcactaccccatggtggagtactgcatccccaccaccagcggcgaggacgtgagagacttcaccaaggtgctgaagaacaagttcagaagcaagaagtacttcgccaagcaccccagactgggctacctgcccgtgcagaccgtgctggagggcgacaacctggagacccccatcaccctgatcagcatgtggcccgagcactacgaccccagccagagcccccagctgttccacgacgacacccacagcagaatcgagcagtacgccaccagactggcccagatggagagaaccaacggcagcttcctgaccgacagcagcagcaccaccggcagcgtgtag

SEQ ID NO: 289652 - DNA, 756 bp, Artificial Sequence
  derived and/or modified sequence
tgaatcgggctgatgagtttgagcaagggcctacttgaagagaagtatcgatacctgtttaaagaggtcgctggccccactgagatgtgcgaccagaggcagcttggactgctgctccatgatgcaattcagattcctcgtcagctgggagaggtcgcagcatttggcgggagtaacatcgaaccaagtgtgcgcagttgctttcagcagaacaacaacaaacctgaaatcagcgtgaaggagtttatagattggatgcatctagagccgcagagcatggtgtggctgcctgtgctgcacagggttgctgctgccgaaaccgccaagcaccaggcaaaatgcaatatctgcaaggagtgcccaatcgtaggctttcgttataggtcacttaagcacttcaattatgacgtgtgtcagtcatgcttttttagtggcagaacagccaagggacacaagcttcactatccaatggtggagtactgcatcccaaccaccagtggcgaggacgttcgcgactttacaaaggttttgaagaacaaattcagatcaaaaaaatatttcgcgaagcacccacgcttgggctatttgcctgtacagacggtgctggagggagataaccttgagaccccgagtcagtccccccaattgtttcacgacgatacacatagccgcattgagcagtatgccactaggctagcccaaatggaaagaacgaatggaagcttcctcactgacagctcttcgaccacagggtag

SEQ ID NO: 289653 - DNA, 201 bp, Artificial Sequence
  derived and/or modified sequence
atgattggcctcaatttcaatctgcgagagttacttactaaatttgagaaggacattcaggcggagatcgatgcccataacgatatttttaagagcatcgacgggaatcgacagaagatggtgaaggctctcgggaacagtgaggaggcaacgatgctgcagcataggctggatgacatgaaccagagatggaacgattag

SEQ ID NO: 289654 - DNA, 555 bp, Artificial Sequence
  derived and/or modified sequence
atgcatctcgaaccccagtctatggtttggcttccagttctgcaccgtgtggccgctgctgaaactgctaagcaccaagcgaagtgtaatatttgtaaggagtgccctattgttgggtttcgttaccgaagcttaaaacattttaactatgatgtgtgccagtcttgcttcttctccggtagaacagcaaagggccacaagctacactacccaatggtggaatactgtatccctacaactagtggcgaagacgttagagatttcacaaaggtgctaaaaaacaaatttcgctcaaaaaagtattttgctaaacacccacggctcggctatctgcccgttcagacagtccttgagggtgataatttagagaccccttctcaatccccacagttgtttcatgacgacacacacagcagaatcgagcaatatgccacaagactggcacagatggagcgaacaaacggctctttcctgaccgactctagtagcacaacgggttcagtggaggacgagcacgctctcatccagcagtattgccagacactgggcggctag

SEQ ID NO: 289655 - DNA, 546 bp, Artificial Sequence
  derived and/or modified sequence
atgcatttagaaccccaatccatggtttggttgccagtgcttcacagagtcgccgcagccgaaaccgcaaagcaccaagcaaaatgtaacatttgcaaggagtgccccatagtcggatttagatacagatctctgaaacacttcaattacgacgtgtgccagtcttgcttcttctctggccgcaccgccaaagggcacaagctgcactatccaatggtcgagtactgcattcccacgacttcaggagaagacgttagagactttactaaggttctcaagaataagtttaggtcaaaaaaatatttcgctaaacatccccggcttgggtaccttcccgttcagaccgtgcttgaaggcgataaccttgaaacacccatcactctgatcagcatgtggccagagcattacgaccctagccagagcccacagctgtttcacgacgacacgcatagtagaatcgagcagtatgccacacgacttgctcagatggaacgaaccaatgggagcttccttaccgatagctcttcaactactgggtcagtctag

SEQ ID NO: 289656 - DNA, 201 bp, Artificial Sequence
  derived and/or modified sequence
atgattgggctgaatttcaacctgcgcgagctgctgaccaagtttgaaaaggacatccaggctgagattgatgcacataatgacatcttcaaatctattgacggcaaccgtcagaagatggttaaagccctcgggaattccgaggaagcgacgatgctgcagcacaggctggacgacatgaatcagagatggaacgactag

SEQ ID NO: 289657 - DNA, 555 bp, Artificial Sequence
  derived and/or modified sequence
atgcacctcgaaccacagtccatggtgtggctcccagttttacatagggtggccgccgccgaaacggcaaaacatcaagccaagtgcaacatctgtaaagaatgtcctatagttggctttcgttacagatctttaaaacactttaactatgatgtctgccagtcctgtttcttttctggtcgaaccgccaaagggcataaacttcactacccgatggtggaatattgcatccccactacctccggcgaagatgtccgcgactttaccaaggtacttaaaaataagttcaggagcaaaaagtattttgccaagcacccacggctcggctatcttccagtacagactgttctggagggggataatctggaaacgccttcacagtcccctcagctttttcatgatgatacccattctcgtatcgaacagtacgctacgcggctcgctcagatggagcgaacgaacggaagcttcctgaccgactcctccagcacaaccggatccgtggaggatgaacatgcactgatccaacagtattgtcagacactcggaggatag

SEQ ID NO: 289658 - DNA, 756 bp, Artificial Sequence
  derived and/or modified sequence
tgaattggcctgatgagcctgagcaagggcctgctggaggagaagtaccgctacctgttcaaggaggtggccggccccacagagatgtgtgaccagaggcagctgggcctgctgctgcatgatgccatccagatcccccggcagctgggggaggtggccgcctttggaggcagcaacatcgagcccagcgtgcgcagctgcttccagcagaacaacaacaagccagagatctctgtgaaggagttcatcgactggatgcacctggagccccagagcatggtgtggctgcctgtgctgcaccgggtggccgctgctgagacagccaagcaccaggccaagtgcaacatctgcaaggaatgtcccatcgtgggcttccgctaccgcagcctgaagcacttcaactatgatgtgtgccagagctgcttcttcagcggccgcacagccaagggccacaagctgcactaccccatggtggagtactgcatccccaccaccagcggggaggatgtgcgggacttcaccaaggtgctgaagaacaagttccgcagcaagaagtactttgccaagcacccccggctgggctacctgcctgtgcagacagtgctggagggggacaacctggagacccccagccagagcccccagctgttccatgatgacacccacagcagaattgagcagtatgccacccggctggcccagatggagaggaccaacggcagcttcctgacagacagcagcagcaccaccggctag

SEQ ID NO: 289659 - DNA, 201 bp, Artificial Sequence
  derived and/or modified sequence
atgattggcctgaacttcaacctgcgggagctgctgaccaagtttgagaaggacatccaggccgagattgatgcccacaatgacatcttcaagagcattgatggcaaccggcagaagatggtgaaggccctgggcaacagcgaggaggccaccatgctgcagcaccggctggatgacatgaaccagcgctggaatgactag

SEQ ID NO: 289660 - DNA, 555 bp, Artificial Sequence
  derived and/or modified sequence
atgcacctggagccccagagcatggtgtggctgcctgtgctgcaccgggtggccgctgctgagacagccaagcaccaggccaagtgcaacatctgcaaggagtgccccatcgtgggcttccgctaccgcagcctgaagcacttcaactatgatgtgtgccagagctgcttcttcagcggccgcacagccaagggccacaagctgcactaccccatggtggagtactgcatccccaccaccagcggagaagatgtgcgggacttcaccaaggtgctgaagaacaagttccgcagcaagaagtactttgccaagcacccccggctgggctacctgcctgtgcagacagtgctggagggggacaacctggagacccccagccagagcccccagctgttccatgatgacacccacagccgcatcgagcagtatgccacccggctggcccagatggagaggaccaacggcagcttcctgacagacagcagcagcaccactggatctgtggaggatgagcacgccctgatccagcagtactgccagaccctgggcggctag

SEQ ID NO: 289661 - DNA, 546 bp, Artificial Sequence
  derived and/or modified sequence
atgcacctggagccccagagcatggtgtggctgcctgtgctgcaccgggtggccgctgctgagacagccaagcaccaggccaagtgcaacatctgcaaggagtgccccatcgtgggcttccgctaccgcagcctgaagcacttcaactatgatgtgtgccagagctgcttcttcagcggccgcacagccaagggccacaagctgcactaccccatggtggagtactgcatccccaccaccagcggagaagatgtgcgggacttcaccaaggtgctgaagaacaagttccgcagcaagaagtactttgccaagcacccccggctgggctacctgcctgtgcagacagtgctggagggggacaacctggagacccccatcaccctcatctccatgtggccagagcactatgaccccagccagagcccccagctgttccatgatgacacccacagcagaattgagcagtatgccacccggctggcccagatggagaggaccaacggcagcttcctgacagacagcagcagcaccaccggctctgtgtag

SEQ ID NO: 289662 - DNA, 756 bp, Artificial Sequence
  derived and/or modified sequence
tgaatcggcctgatgagcctgagcaagggcctgctggaggagaagtacaggtacctgttcaaagaggtggctggtcccacagaaatgtgcgaccagaggcagcttgggctactgctccacgacgctattcagattccccggcagcttggagaagtggcggctttcggaggctccaacatcgaaccgagcgtaagatcatgtttccagcagaataataacaaacccgaaatatctgtaaaagagttcatcgactggatgcacctagagccacaaagcatggtatggctgcccgtactgcaccgggtggctgccgctgagaccgctaagcatcaggcaaagtgcaatatatgtaaagaatgccccattgtagggttccggtaccggtcactaaaacacttcaactacgacgtgtgccagtcttgctttttcagcggtcggaccgcaaaggggcacaagctgcactatcctatggtggagtactgcattccaaccacttcaggggaggatgtacgtgacttcactaaagtcctcaaaaacaaatttcggtccaagaagtattttgccaagcatcctcggctgggttatcttccagtgcagaccgttctcgagggtgataacctggagacaccatcccagagcccccagctctttcacgatgatactcattcacgcatcgagcagtacgccactaggcttgcacagatggagcgaacaaacggatccttcctgactgatagctccagtaccaccggatag

SEQ ID NO: 289663 - DNA, 201 bp, Artificial Sequence
  derived and/or modified sequence
atgatcggcctgaacttcaacctgcgggagctgctgaccaagttcgagaaggacattcaggcggaaatcgacgcccataatgacatatttaagagtatcgacggaaaccggcagaaaatggtcaaggctcttggcaacagtgaagaggctaccatgctgcaacatcgcctggacgacatgaaccagcggtggaatgactag

SEQ ID NO: 289664 - DNA, 555 bp, Artificial Sequence
  derived and/or modified sequence
atgcacctggagccccagagcatggtgtggctgcccgtgctgcaccgagtggctgcagctgagactgccaagcaccaggctaagtgcaacatttgcaaggaatgccccattgtgggattccggtaccgctctctaaaacatttcaattacgacgtgtgccagtcctgttttttctctggtaggactgccaagggccataagctgcattatccaatggttgaatactgtatccctacaacctcgggtgaggacgttcgagactttaccaaagtgttaaagaacaaattcagatccaagaaatactttgctaagcaccctcgacttggatacttgcccgtacagacagtcctggagggcgacaaccttgaaacaccaagccagagcccccaacttttccatgatgatacgcactctcggatcgaacaatatgccacccgactggcgcaaatggaaagaaccaatggctctttcctgaccgattcttcttccaccacaggctccgttgaagatgagcatgctctcattcagcagtattgtcaaacactaggcgggtag

SEQ ID NO: 289665 - DNA, 546 bp, Artificial Sequence
  derived and/or modified sequence
atgcacctggagccccagagcatggtgtggctgcccgtgctgcaccgcgttgcagcagccgagacagccaaacaccaggccaaatgtaacatctgtaaggaatgtcccattgtgggttttagatacaggtcacttaaacatttcaactatgatgtgtgccagtcctgcttctttagcggaaggaccgctaagggacacaagttgcattaccctatggtcgagtattgcattcctactacaagtggcgaggacgtgagagatttcacaaaggtcctaaaaaacaaattcagaagcaagaagtattttgctaaacaccctaggctcggatatctccctgtacagaccgtgctagagggagataacctcgagactcccattacactgatcagtatgtggcctgagcattacgacccctcccagtccccccagttgttccatgatgacacgcattcaaggatcgagcagtacgccaccaggctcgcacagatggagcggacgaatggttcctttctgacagacagctctagcactaccggatctgtctag

SEQ ID NO: 289666 - DNA, 201 bp, Artificial Sequence
  derived and/or modified sequence
atgatcggcctgaacttcaacctgcgggagctgctgaccaagttcgaaaaggatatacaggcggaaatcgatgcacacaatgatatctttaaatcaatcgatgggaaccgccagaagatggtcaaggccctcggcaattcagaggaggcaacaatgttacagcacaggctcgatgacatgaaccagaggtggaatgattag

SEQ ID NO: 289667 - DNA, 555 bp, Artificial Sequence
  derived and/or modified sequence
atgcacctggagccccagagcatggtgtggctgcccgtgctgcaccgcgttgctgctgccgagacagctaagcatcaagccaagtgtaatatttgtaaggagtgcccaatcgtgggcttcaggtaccgatccctgaagcacttcaattacgacgtctgccagagttgtttttttagcggtcgaaccgccaagggccacaagctgcactaccctatggtcgagtattgcattcctactacttccggggaggacgtccgggattttactaaagtcctgaagaataagttccgaagcaagaagtacttcgccaaacatcccagacttgggtacctccctgtccagactgtgcttgaaggtgacaatctggaaactcccagccagagcccacagttgttccacgatgatacccattcaagaattgagcaatatgctacccgattagcacagatggaacgaaccaacggttcattcttgacagactcttcttccacaacaggttccgtagaggatgaacacgcactgattcagcagtactgccaaacactgggggggtag

SEQ ID NO: 289668 - DNA, 756 bp, Artificial Sequence
  derived and/or modified sequence
tgaatcggcttgatgagtttaagcaaggggctactggaggagaaataccgctacctgttcaaggaagtcgccggaccgaccgagatgtgcgatcaacggcagctgggcctgttactgcacgacgcaatacaaatcccacggcaactgggggaggtagcagcattcgggggaagcaacatcgagcccagcgtcagaagctgttttcagcagaacaataacaaacccgagatcagtgtaaaggaatttattgactggatgcacctggagccacagagcatggtgtggctgcctgtattgcaccgcgttgcagccgctgagaccgcaaaacaccaagcgaagtgcaatatttgcaaagaatgcccaatcgttgggtttcggtaccggagcttgaagcattttaactacgacgtatgccagagctgctttttttcaggacgcacagccaaggggcataaactgcattaccccatggtagaatactgcattcctactaccagtggtgaggacgtcagagattttacgaaggttttgaaaaacaaattccgaagtaaaaagtacttcgcaaagcatccccgactgggctacctgcctgtgcagacagtgctggagggggacaacctcgagactccgagccagagcccgcagttatttcatgacgacacacactccaggatagaacagtatgctacccgtctggcccaaatggaacgcaccaatggctctttcttgacagattcctcctcgactaccggttag

SEQ ID NO: 289669 - DNA, 201 bp, Artificial Sequence
  derived and/or modified sequence
atgataggtctgaactttaatctccgagaattgctcaccaaattcgagaaagatattcaggctgagatcgacgctcacaacgacatctttaaaagtatcgatggcaacaggcagaaaatggtgaaagcactcgggaacagcgaagaggccaccatgctacagcaccgtttggatgatatgaatcagcggtggaatgattag

SEQ ID NO: 289670 - DNA, 555 bp, Artificial Sequence
  derived and/or modified sequence
atgcacctggaaccccagagtatggtgtggctcccggtgttacaccgagtagccgcagctgagactgcgaagcaccaggccaagtgtaacatctgcaaagagtgccccattgttggctttagataccgatctctgaagcacttcaattatgacgtgtgtcaatcctgtttttttagcggtcgcacagcaaaaggacataaactgcattatccgatggtcgaatactgtattcctaccactagcggggaggatgtgagggacttcactaaagtccttaagaataagtttaggtctaaaaaatatttcgccaaacatcccaggctggggtatctgcccgtgcaaaccgtcctggagggagataacctcgagaccccatcccagtcgcctcagttgttccatgatgatacccactcacgcatcgagcagtatgctacaaggcttgcccagatggaacgaaccaacgggtcttttcttacagactcttctagtaccaccggttctgtagaggacgaacacgcactcattcaacagtactgtcagacccttggaggttag

SEQ ID NO: 289671 - DNA, 546 bp, Artificial Sequence
  derived and/or modified sequence
atgcatctggagcctcaatctatggtatggctgcctgtactacacagagtcgcagctgcggagactgctaaacatcaggcaaaatgcaacatctgtaaagagtgccccattgtgggttttaggtaccgaagccttaaacatttcaattacgacgtgtgtcaatcctgtttcttctccggccgtaccgctaagggtcataagcttcattatcctatggtggagtactgtattcctaccacttccggcgaggatgtacgggacttcacgaaggtgttgaaaaacaagttccggtccaagaaatattttgcgaagcatcctcggctcggatatctgcctgtgcagactgttctggaaggggacaacctggaaactcctattacgctcatttcaatgtggcccgagcactacgaccccagccaatcgccccagctgttccatgatgacacccactcaagaatcgaacagtatgcgacccggctggcccaaatggaacggacaaatggtagcttcctgacagatagcagtagtactaccggttcggtgtag

SEQ ID NO: 289672 - DNA, 201 bp, Artificial Sequence
  derived and/or modified sequence
atgattggactaaacttcaatctccgagagctgcttaccaagttcgaaaaagatattcaggctgagatcgatgctcacaatgacatatttaaatcaatagatgggaaccggcagaaaatggtgaaagcactcgggaactctgaagaggctaccatgctacagcatcggctcgacgatatgaatcagcgatggaacgactag

SEQ ID NO: 289673 - DNA, 555 bp, Artificial Sequence
  derived and/or modified sequence
atgcacctggaacctcagagcatggtgtggctgccagtgctccacagagtggcagccgcagaaaccgctaagcaccaggccaaatgcaacatttgcaaagaatgtccaatcgttggattccggtatcgcagtcttaagcattttaattatgacgtgtgccagtcatgtttcttttctgggaggactgctaaggggcataaactacactaccctatggtggagtattgtatcccaacaacctccggagaggatgtccgagatttcacaaaggtgctgaagaacaaattcaggtccaaaaagtatttcgcgaaacacccacgactgggttacttaccggtccagactgttttggagggcgataatcttgaaaccccatcacagtcacctcagctattccatgacgatacccactctcgtattgaacaatacgccacaaggctggcacaaatggagcggacaaacggatctttcttaactgacagcagttctactacggggtcagtagaagatgagcacgccctgatccagcagtactgccaaactctaggcggatag

SEQ ID NO: 289674 - DNA, 753 bp, Artificial Sequence
  derived and/or modified sequence
agattggattaatgtctctctccaaaggtctcttggaagaaaaatacagatatctctttaaggaagttgcagggccaacagaaatgtgtgaccagaggcagctgggcctgttacttcatgatgccatccagatcccccggcagctaggtgaagtagcagcttttggaggcagtaatattgagcctagtgttcgcagctgcttccaacagaataacaataaaccagaaataagtgtgaaagagtttatagattggatgcatttggaaccacagtccatggtttggctcccagttttacatcgagtggcagcagcggagactgcaaaacatcaggccaaatgcaacatctgtaaagaatgtccaattgtcgggttcaggtatagaagccttaagcattttaactatgatgtctgccagagttgtttcttttcgggtcgaacagcaaaaggtcacaaattacattacccaatggtggaatattgtatacctacaacatctggggaagatgtacgagacttcacaaaggtacttaagaacaagttcaggtcgaagaagtactttgccaaacaccctcgacttggttacctgcctgtccagacagttcttgaaggtgacaacttagagaccccctcacaatctcctcaactgtttcatgatgacacccattcaagaatagaacaatatgccacacgactggcccagatggaaaggactaatgggtcttttctcactgatagcagctccaccacaggaa

SEQ ID NO: 289675 - DNA, 579 bp, Artificial Sequence
  derived and/or modified sequence
aactctaagcttggggccctggagagaacagttgtggcctgcaggtcattagtgaggtgagcagaagggaatcctggacttcccagagaaagaggagaccatgccagcctcgtggaacacagctaccaggaaatacagaagcaggtctattccttgcgaactccgaagtccatgaaaaaacggacccacagtggggtggctaaaatgtcccagcgcaagctgccgctgctgctgatggaccatagctcaagggcaaggcttgtaaaggattttacaaaggattttaaagtatagccagaaaagatacggtgtttagaagttaaacgctgttgtctgaaggaagtttgccggaaagatgtaggcttcaagggctactggacaatgattggtctgaacttcaacttacgggaactgctgacaaaatttgaaaaggacatccaggcagaaattgatgcccacaatgacatatttaaaagcattgacggaaacaggcagaagatggtaaaagctttgggaaattctgaagaggctactatgcttcaacatcgactggatgatatgaaccaaagatggaatgac

SEQ ID NO: 289676 - DNA, 678 bp, Artificial Sequence
  derived and/or modified sequence
aagattatgaagcaacaacactagctacagtttaaatgaaggcatttcttcacttttaatatatttcttttttcaccagaataacaataaaccagaaataagtgtgaaagagtttatagattggatgcatttggaaccacagtccatggtttggctcccagttttacatcgagtggcagcagcggagactgcaaaacatcaggccaaatgcaacatctgtaaagaatgtccaattgtcgggttcaggtatagaagccttaagcattttaactatgatgtctgccagagttgtttcttttcgggtcgaacagcaaaaggtcacaaattacattacccaatggtggaatattgtatacctacaacatctggggaagatgtacgagacttcacaaaggtacttaagaacaagttcaggtcgaagaagtactttgccaaacaccctcgacttggttacctgcctgtccagacagttcttgaaggtgacaacttagagaccccctcacaatctcctcaactgtttcatgatgacacccattcaagaatagaacaatatgccacacgactggcccagatggaaaggactaatgggtcttttctcactgatagcagctccaccacaggaagtgtggaagacgagcacgccctcatccagcagtattgccaaacactcggaggaga

SEQ ID NO: 289677 - DNA, 666 bp, Artificial Sequence
  derived and/or modified sequence
aagattatgaagcaacaacactagctacagtttaaatgaaggcatttcttcacttttaatatatttcttttttcaccagaataacaataaaccagaaataagtgtgaaagagtttatagattggatgcatttggaaccacagtccatggtttggctcccagttttacatcgagtggcagcagcggagactgcaaaacatcaggccaaatgcaacatctgtaaagaatgtccaattgtcgggttcaggtatagaagccttaagcattttaactatgatgtctgccagagttgtttcttttcgggtcgaacagcaaaaggtcacaaattacattacccaatggtggaatattgtatacctacaacatctggggaagatgtacgagacttcacaaaggtacttaagaacaagttcaggtcgaagaagtactttgccaaacaccctcgacttggttacctgcctgtccagacagttcttgaaggtgacaacttagagactcctatcacactcatcagtatgtggccagagcactatgacccctcacaatctcctcaactgtttcatgatgacacccattcaagaatagaacaatatgccacacgactggcccagatggaaaggactaatgggtcttttctcactgatagcagctccaccacaggaagtgt

SEQ ID NO: 289678 - DNA, 495 bp, Artificial Sequence
  derived and/or modified sequence
atgattggtctgaacttcaacttacgggaactgctgacaaaatttgaaaaggacatccaggcagaaattgatgcccacaatgacatatttaaaagcattgacggaaacaggcagaagatggtaaaagctttgggaaattctgaagaggctactatgcttcaacatcgactggatgatatgaaccaaagatggaatgacttaaaagcaaaatctgctagcatcagggcccatttggaggccagcgctgagaagtggaacaggttgctgatgtccttagaagaactgatcaaatggctgaatatgaaagatgaagagcttaagaaacaaatgcctattggaggagatgttccagccttacagctccagtatgaccattgtaaggccctgagacgggagttaaaggagaaagaatattctgtcctgaatgctgtcgaccaggcccgagttttcttggctgatcagccaattgaggcccctgaagagccaagaagaaac

SEQ ID NO: 289679 - DNA, 806 bp, Artificial Sequence
  derived and/or modified sequence
agattggattaatgtctctctccaaaggtctcttggaagaaaaatacagatatctctttaaggaagttgcagggccaacagaaatgtgtgaccagaggcagctgggcctgttacttcatgatgccatccagatcccccggcagctaggtgaagtagcagcttttggaggcagtaatattgagcctagtgttcgcagctgcttccaacagaataacaataaaccagaaataagtgtgaaagagtttatagattggatgcatttggaaccacagtccatggtttggctcccagttttacatcgagtggcagcagcggagactgcaaaacatcaggccaaatgcaacatctgtaaagaatgtccaattgtcgggttcaggtatagaagccttaagcattttaactatgatgtctgccagagttgtttcttttcgggtcgaacagcaaaaggtcacaaattacattacccaatggtggaatattgtatacctacaacatctggggaagatgtacgagacttcacaaaggtacttaagaacaagttcaggtcgaagaagtactttgccaaacaccctcgacttggttacctgcctgtccagacagttcttgaaggtgacaacttagagaccccctcacaatctcctcaactgtttcatgatgacacccattcaagaatagaacaatatgccacacgactggcccagatggaaaggactaatgggtcttttctcactgatagcagctccaccacaggaagtgtggaagacgagcacgccctcatccagcagtattgccaaacactcggagga

SEQ ID NO: 289680 - protein, 119 aa, Artificial Sequence
  derived and/or modified sequence
  misc_feature (1)..(1): Xaa can be any naturally occurring amino acid
XVSLKEDIDMLQNALAENDTPYYDVSRNARHADGVFTSDFSKLLGQLSAKKYLESLMGKRVSSNISEDPVPVKRHSDAVFTDNYTRLRKQMAVKKYLNSILNGKRSEGESPDFPEELEK

SEQ ID NO: 289681 - DNA, 354 bp, Artificial Sequence
  derived and/or modified sequence
gtgagcctgaaggaggacatcgacatgctgcagaacgccctggccgagaacgacaccccctactacgacgtgagccgcaacgcccgccacgccgacggcgtgttcaccagcgacttcagcaagctgctgggccagctgagcgccaagaagtacctggagagcctgatgggcaagcgcgtgagcagcaacatcagcgaggaccccgtgcccgtgaagcgccacagcgacgccgtgttcaccgacaactacacccgcctgcgcaagcagatggccgtgaagaagtacctgaacagcatcctgaacggcaagcgcagcgagggcgagagccccgacttccccgaggagctggagaag

SEQ ID NO: 289682 - DNA, 360 bp, Artificial Sequence
  derived and/or modified sequence
tgagtgagcctgaaggaggacatcgacatgctgcagaacgccctggccgagaacgacaccccctactacgacgtgagcagaaacgccagacacgccgacggcgtgttcaccagcgacttcagcaagctgctgggccagctgagcgccaagaagtacctggagagcctgatgggcaagagagtgagcagcaacatcagcgaggaccccgtgcccgtgaagagacacagcgacgccgtgttcaccgacaactacaccagactgagaaagcagatggccgtgaagaagtacctgaacagcatcctgaacggcaagagaagcgagggcgagagccccgacttccccgaggagctggagaagtag

SEQ ID NO: 289683 - DNA, 360 bp, Artificial Sequence
  derived and/or modified sequence
taagtgtccctgaaggaggacatagatatgctgcaaaacgctctcgctgagaacgatactccttattacgacgtgtctcgaaatgccaggcatgctgacggtgtcttcacgtcagatttttcaaagctcctgggccagctgtcagcaaagaaatacctcgaatccctgatgggcaagcgggtttcttcgaatatttctgaggatcctgtgccggtgaaacgtcactctgacgccgtgtttacggataactatacccgtctccggaaacagatggcagtcaagaaatacctgaactccatccttaatggtaagaggtccgaaggcgagagccctgattttcctgaagaactggaaaaatag

SEQ ID NO: 289684 - DNA, 360 bp, Artificial Sequence
  derived and/or modified sequence
tgagtgtccctgaaggaggacatcgacatgctgcagaatgccctggctgaaaatgacaccccctactatgatgtgtccagaaatgcccggcatgctgatggagtcttcaccagtgacttcagcaagctgctgggccagctgagcgccaagaagtacctggagagcctgatgggcaagagggtgagcagcaacatcagtgaagatcctgtgcctgtgaagaggcacagtgatgctgtgttcacagacaactacacccggctgaggaagcagatggctgtgaagaagtacctgaacagcatcctgaatggcaagaggtctgagggggagagcccagacttccctgaggagctggagaagtag

SEQ ID NO: 289685 - DNA, 360 bp, Artificial Sequence
  derived and/or modified sequence
tgagtgagcctgaaggaggacatcgacatgctgcagaacgccctggctgagaatgacacgccatactatgatgtgagccgaaatgcaaggcacgccgacggcgtttttaccagcgacttcagcaagctgttggggcagctgagtgccaagaagtacctggaatcactgatgggaaaacgggtatcatctaacatctcagaggatccagttccagtcaaaaggcattcagatgctgtctttaccgataattatacgagactgcggaaacagatggctgtgaaaaagtatcttaacagtattctgaacggaaaaagaagcgagggggaatcccccgattttccagaggaattagagaagtag

SEQ ID NO: 289686 - DNA, 360 bp, Artificial Sequence
  derived and/or modified sequence
taggtgtccctgaaggaagatatcgatatgttgcagaatgctcttgccgagaacgataccccatattatgatgtatcacggaacgcccgacacgccgatggagtcttcacaagcgatttttcaaagctactcggccagttgagcgcaaagaagtatctggagtctttgatgggcaaacgggtctcttccaatattagtgaggatccagtacccgtgaagagacattcagacgctgtgttcacagacaattacactcgccttaggaaacaaatggcggtcaagaagtacctgaacagcatactcaacgggaaacggtctgaaggggaaagccctgatttcccagaagagttagaaaagtag

SEQ ID NO: 289687 - DNA, 1257 bp, Artificial Sequence
  derived and/or modified sequence
agtttcattaaaagaagacattgacatgttgcaaaatgcattagctgaaaatgacacaccctattatgatgtatccagaaatgccaggcatgctgatggagttttcaccagtgacttcagtaaactcttgggtcaactttctgccaaaaagtaccttgagtctcttatgggaaaacgtgttagcagtaacatctcagaagaccctgtaccagtcaaacgtcactcagatgcagtcttcactgacaactatacccgccttagaaaacaaatggctgtaaagaaatatttgaactcaattctgaatggaaagaggagtgagggagaatctcccgactttccagaagagttagaaaaatgatgaaaaagacctttggagcaaagctgatgacaacttcccagtgaattcttgaaggaaaatgatacgcaacataattaaattttgagttctacataagtaattcaagaaaacaacttcaatatccaaaccaaataaaaatattgtgttgtgaatgttgtgatgtattctagctaatgtaataactgtgaagtttacattgtaaatagtatttgagagttctaaattttgtctttaactcataaaaagcctgcaatttcatatgctgtatatcctttctaacaaaaaaatatatttaatgataagtaaatgctaggttaattccaattatatgagacgtttttggaagagtagtaatagagcaaaattgatgtgtttatttatagagtgtacttaactattcaggagagtagaacagataatcagtgtgtctaaatttgaatgttaagcagatggaatgctgtgttaaataaacctcaaaatgtctaagatagtaacaatgaagataaaaagacattcttccaaaaagattttcagaaaatattatgtgtttccatattttataggcaacctttatttttaatggtgttttaaaaaatctcaaatttggattgctaatcaccaaaggctctctcctgatagtctttcagttaaggagaacgacccctgcttctgacactgaaacttccctttctgcttgtgttaagtatgtgtaaaatgtgaagtgaatgaaacactcagttgttcaataataaatatttttgccataatgactcagaatattgctttggtcatatgagcttccttctgtgaaagtacatttggagacacaactatttttccaaaataattttaagaaatcaaagagagaaaataaagaccttgcttatgattgcagataa

SEQ ID NO: 289688 - protein, 1288 aa, Artificial Sequence
  derived and/or modified sequence
MALSKGLRLLGRLGAEGDCSVLLEARGRDDCLLFEAGTVATLAPEEKEVIKGQYGKLTDAYGCLGELRLKSGGTSLSFLVLVTGCTSVGRIPDAEIYKITATDFYPLQEEAKEEERLIALKKILSSGVFYFSWPNDGSRFDLTVRTQKQGDDSSEWGNSFFWNQLLHVPLRQHQVSCCDWLLKIICGVVTIRTVYASHKQAKACLVSRVSCERTGTRFHTRGVNDDGHVSNFVETEQMIYMDDGVSSFVQIRGSVPLFWEQPGLQVGSHHLRLHRGLEANAPAFDRHMVLLKEQYGQQVVVNLLGSRGGEEVLNRAFKKLLWASCHAGDTPMINFDFHQFAKGGKLEKLETLLRPQLKLHWEDFDVFTKGENVSPRFQKGTLRMNCLDCLDRTNTVQSFIALEVLHLQLKTLGLSSKPIVDRFVESFKAMWSLNGHSLSKVFTGSRALEGKAKVGKLKDGARSMSRTIQSNFFDGVKQEAIKLLLVGDVYGEEVADKGGMLLDSTALLVTPRILKAMTERQSEFTNFKRIRIAMGTWNVNGGKQFRSNVLRTAELTDWLLDSPQLSGATDSQDDSSPADIFAVGFEEMVELSAGNIVNASTTNKKMWGEQLQKAISRSHRYILLTSAQLVGVCLYIFVRPYHVPFIRDVAIDTVKTGMGGKAGNKGAVGIRFQFHSTSFCFICSHLTAGQSQVKERNEDYKEITQKLCFPMGRNVFSHDYVFWCGDFNYRIDLTYEEVFYFVKRQDWKKLLEFDQLQLQKSSGKIFKDFHEGAINFGPTYKYDVGSAAYDTSDKCRTPAWTDRVLWWRKKHPFDKTAGELNLLDSDLDVDTKVRHTWSPGALQYYGRAELQASDHRPVLAIVEVEVQEVDVGARERVFQEVSSFQGPLDATVVVNLQSPTLEEKNEFPEDLRTELMQTLGSYGTIVLVRINQGQMLVTFADSHSALSVLDVDGMKVKGRAVKIRPKTKDWLKGLREEIIRKRDSMAPVSPTANSCLLEENFDFTSLDYESEGDILEDDEDYLVDEFNQPGVSDSELGGDDLSDVPGPTALAPPSKSPALTKKKQHPTYKDDADLVELKRELEAVGEFRHRSPSRSLSVPNRPRPPQPPQRPPPPTGLMVKKSASDASISSGTHGQYSILQTARLLPGAPQQPPKARTGISKPYNVKQIKTTNAQEAEAAIRCLLEARGGASEEALSAVAPRDLEASSEPEPTPGAAKPETPQAPPLLPRRPPPRVPAIKKPTLRRTGKIVFCSRSQASQPCLLLQRHEFVRTVAAQRLASVDTSGSSV

SEQ ID NO: 289689 - DNA, 3867 bp, Artificial Sequence
  derived and/or modified sequence
atggccctgagcaagggcctgagactgctgggcagactgggcgccgagggcgactgcagcgtgctgctggaggccagaggcagagacgactgcctgctgttcgaggccggcaccgtggccaccctggcccccgaggagaaggaggtgatcaagggccagtacggcaagctgaccgacgcctacggctgcctgggcgagctgagactgaagagcggcggcaccagcctgagcttcctggtgctggtgaccggctgcaccagcgtgggcagaatccccgacgccgagatctacaagatcaccgccaccgacttctaccccctgcaggaggaggccaaggaggaggagagactgatcgccctgaagaagatcctgagcagcggcgtgttctacttcagctggcccaacgacggcagcagattcgacctgaccgtgagaacccagaagcagggcgacgacagcagcgagtggggcaacagcttcttctggaaccagctgctgcacgtgcccctgagacagcaccaggtgagctgctgcgactggctgctgaagatcatctgcggcgtggtgaccatcagaaccgtgtacgccagccacaagcaggccaaggcctgcctggtgagcagagtgagctgcgagagaaccggcaccagattccacaccagaggcgtgaacgacgacggccacgtgagcaacttcgtggagaccgagcagatgatctacatggacgacggcgtgagcagcttcgtgcagatcagaggcagcgtgcccctgttctgggagcagcccggcctgcaggtgggcagccaccacctgagactgcacagaggcctggaggccaacgcccccgccttcgacagacacatggtgctgctgaaggagcagtacggccagcaggtggtggtgaacctgctgggcagcagaggcggcgaggaggtgctgaacagagccttcaagaagctgctgtgggccagctgccacgccggcgacacccccatgatcaacttcgacttccaccagttcgccaagggcggcaagctggagaagctggagaccctgctgagaccccagctgaagctgcactgggaggacttcgacgtgttcaccaagggcgagaacgtgagccccagattccagaagggcaccctgagaatgaactgcctggactgcctggacagaaccaacaccgtgcagagcttcatcgccctggaggtgctgcacctgcagctgaagaccctgggcctgagcagcaagcccatcgtggacagattcgtggagagcttcaaggccatgtggagcctgaacggccacagcctgagcaaggtgttcaccggcagcagagccctggagggcaaggccaaggtgggcaagctgaaggacggcgccagaagcatgagcagaaccatccagagcaacttcttcgacggcgtgaagcaggaggccatcaagctgctgctggtgggcgacgtgtacggcgaggaggtggccgacaagggcggcatgctgctggacagcaccgccctgctggtgacccccagaatcctgaaggccatgaccgagagacagagcgagttcaccaacttcaagagaatcagaatcgccatgggcacctggaacgtgaacggcggcaagcagttcagaagcaacgtgctgagaaccgccgagctgaccgactggctgctggacagcccccagctgagcggcgccaccgacagccaggacgacagcagccccgccgacatcttcgccgtgggcttcgaggagatggtggagctgagcgccggcaacatcgtgaacgccagcaccaccaacaagaagatgtggggcgagcagctgcagaaggccatcagcagaagccacagatacatcctgctgaccagcgcccagctggtgggcgtgtgcctgtacatcttcgtgagaccctaccacgtgcccttcatcagagacgtggccatcgacaccgtgaagaccggcatgggcggcaaggccggcaacaagggcgccgtgggcatcagattccagttccacagcaccagcttctgcttcatctgcagccacctgaccgccggccagagccaggtgaaggagagaaacgaggactacaaggagatcacccagaagctgtgcttccccatgggcagaaacgtgttcagccacgactacgtgttctggtgcggcgacttcaactacagaatcgacctgacctacgaggaggtgttctacttcgtgaagagacaggactggaagaagctgctggagttcgaccagctgcagctgcagaagagcagcggcaagatcttcaaggacttccacgagggcgccatcaacttcggccccacctacaagtacgacgtgggcagcgccgcctacgacaccagcgacaagtgcagaacccccgcctggaccgacagagtgctgtggtggagaaagaagcaccccttcgacaagaccgccggcgagctgaacctgctggacagcgacctggacgtggacaccaaggtgagacacacctggagccccggcgccctgcagtactacggcagagccgagctgcaggccagcgaccacagacccgtgctggccatcgtggaggtggaggtgcaggaggtggacgtgggcgccagagagagagtgttccaggaggtgagcagcttccagggccccctggacgccaccgtggtggtgaacctgcagagccccaccctggaggagaagaacgagttccccgaggacctgagaaccgagctgatgcagaccctgggcagctacggcaccatcgtgctggtgagaatcaaccagggccagatgctggtgaccttcgccgacagccacagcgccctgagcgtgctggacgtggacggcatgaaggtgaagggcagagccgtgaagatcagacccaagaccaaggactggctgaagggcctgagagaggagatcatcagaaagagagacagcatggcccccgtgagccccaccgccaacagctgcctgctggaggagaacttcgacttcaccagcctggactacgagagcgagggcgacatcctggaggacgacgaggactacctggtggacgagttcaaccagcccggcgtgagcgacagcgagctgggcggcgacgacctgagcgacgtgcccggccccaccgccctggccccccccagcaagagccccgccctgaccaagaagaagcagcaccccacctacaaggacgacgccgacctggtggagctgaagagagagctggaggccgtgggcgagttcagacacagaagccccagcagaagcctgagcgtgcccaacagacccagacccccccagcccccccagagaccccccccccccaccggcctgatggtgaagaagagcgccagcgacgccagcatcagcagcggcacccacggccagtacagcatcctgcagaccgccagactgctgcccggcgccccccagcagccccccaaggccagaaccggcatcagcaagccctacaacgtgaagcagatcaagaccaccaacgcccaggaggccgaggccgccatcagatgcctgctggaggccagaggcggcgccagcgaggaggccctgagcgccgtggcccccagagacctggaggccagcagcgagcccgagcccacccccggcgccgccaagcccgagaccccccaggccccccccctgctgcccagaagacccccccccagagtgcccgccatcaagaagcccaccctgagaagaaccggcaagatcgtgttctgcagcagaagccaggccagccagccctgcctgctgctgcagagacacgagttcgtgagaaccgtggccgcccagagactggccagcgtggacaccagcggcagcagcgtgtag

SEQ ID NO: 289690 - DNA, 3867 bp, Artificial Sequence
  derived and/or modified sequence
atggctctatccaaagggctgaggttgctcggcaggcttggggctgaaggggactgcagcgtcctgctggaagcacggggaagagacgattgtctcctgtttgaagccggaacagtggcaactctcgcccccgaggaaaaggaggttattaaaggtcagtacgggaaattaaccgacgcttacgggtgtttgggcgaacttaggctgaagtccggaggcaccagtctgagttttctggtcttagtaaccggatgtactagcgttgggcgtatcccagacgcagagatctataaaattaccgcaacagacttttatccactccaggaggaggccaaagaggaggagcggttgatcgctctgaaaaagattctgagcagcggcgtgttttactttagctggcctaacgatggatcccggtttgacctgactgttcggacccaaaaacagggcgatgattcatccgaatggggcaattcattcttctggaaccagctcctgcacgtgcccttaagacagcaccaggtgtcttgttgcgattggttgctgaagatcatttgtggagtcgtcaccatccgtactgtgtatgcatcgcataaacaggccaaggcatgcttggtgagtcgggtttcttgtgagcggacgggaactagattccatacacgaggtgtgaacgatgatggccacgtgtctaactttgttgagacagaacaaatgatctacatggacgatggagtctcgtccttcgtgcagatccgaggtagtgtaccgctgttttgggagcagcccgggttgcaggtcggatcccaccacctgagactgcaccgcggcctggaagccaacgccccagcatttgataggcacatggtcctccttaaggaacagtacggccaacaggtcgtcgtgaacttactcggtagcaggggaggggaggaggtgttaaaccgtgctttcaaaaagttactctgggcctcgtgccatgctggagacacaccaatgatcaactttgatttccatcagttcgcgaaaggcggcaaactggagaagctcgagacactcctccggccccaactgaagcttcactgggaggacttcgacgtcttcactaagggcgagaatgtcagtcccagattccagaagggtacgctccggatgaactgcctggattgcttggatcgaactaacacggtccagagtttcatcgcactcgaggtgttgcatttgcaacttaagactctaggactcagctctaaaccaattgtggaccggttcgttgagagttttaaggcaatgtggagtcttaatggccactccctgagcaaagtatttacaggatcacgggctttagaaggcaaagccaaggtcggcaagctgaaggacggagcaagatctatgtcccggacaatccagtcaaatttctttgatggtgtcaaacaggaagcaataaaattgctcctggtgggagatgtgtatggggaagaggtcgcggacaagggggggatgctgttagatagcacagctctcttggtgacccccagaatccttaaagccatgaccgagaggcagagtgaattcaccaattttaaacggattcgaatcgccatggggacatggaacgtcaacggcggaaaacagtttcgctcaaatgtccttagaaccgccgagctcaccgactggctgttggacagcccccagctgtccggagctactgactcacaggacgattctagtcccgccgacattttcgcagtggggtttgaggagatggttgagctttctgccggtaatattgtgaacgcctctacaacaaataagaaaatgtggggagaacagcttcagaaggccatctcccggtcacatcggtatatcttactgacttccgcccagttggtcggtgtctgcttgtatatttttgttcggccatatcacgttccttttatacgcgacgtggccatcgacactgtgaagacaggaatgggcgggaaagcggggaacaagggtgctgtcggaatcagattccaatttcacagcacatcattttgttttatctgtagtcatctgacagcagggcagagtcaagtcaaggaacgcaacgaagattataaggaaataactcagaaactgtgtttcccaatgggccggaacgtttttagccacgactacgtgttctggtgtggtgacttcaactaccggatcgacctgacttatgaggaagttttctactttgtcaagcgtcaggactggaaaaaactattggaattcgatcagctgcagctgcagaagtcctcaggtaagatcttcaaagactttcacgaaggggcaattaattttggcccaacttataaatacgacgtaggtagtgccgcatacgataccagtgataagtgtaggactccggcctggactgatagagtgctatggtggaggaaaaagcacccgttcgacaaaacagccggggaactgaacctgctggattcagaccttgacgtagacaccaaggtcagacatacctggtcaccgggcgcattgcaatactacggaagagccgagttacaagcctctgatcatagacccgtgctggctatcgtggaggtggaggtgcaggaggtcgacgttggcgcccgggagcgcgtgtttcaggaagtgtcatcattccagggcccccttgacgcaactgttgtggtgaaccttcaatctcctactttagaggagaaaaacgaattccccgaggaccttaggactgagctcatgcagacactgggatcttatggcacaattgtgttagttaggattaatcagggccagatgctggtgacgtttgcagattctcatagcgctctcagtgtacttgatgttgatggcatgaaagtcaagggcagagcagtgaagattcgacccaaaacgaaggactggctgaaaggcctaagggaggaaatcatccggaaaagagattccatggcgccagtgagcccaacagcgaacagctgcctgctggaagagaactttgactttacttccctagattacgagagcgagggggatatcttggaggacgatgaagattatttggtggacgagtttaaccagcccggagttagtgatagcgagctgggtggggacgacctttcagacgtccccgggcccaccgcactggcacctccaagcaagtccccagccttgaccaagaaaaagcagcaccccacctacaaagacgacgcggacttagtcgaattaaagcgcgaactggaagccgtgggcgagttccgacatcgcagtcccagtaggtccctgtccgtgcctaataggccccgcccaccacagccgccccaaaggccacccccccctacaggacttatggttaagaaaagtgcaagtgatgcctctataagttccggcactcatgggcagtattcaattctccaaacagcacgtctgcttcctggtgccccccaacagccccctaaagcccgcacgggaatcagtaaaccctacaatgtgaaacaaatcaagactacaaacgcccaggaggccgaagccgcaatccgatgcctgctcgaggctaggggcggggcttctgaagaagccctgagtgccgtagccccgcgcgacttggaggcctcctcagaaccagaaccaactcccggagctgccaaaccagaaaccccacaggcccctcccctgctcccaagacgaccaccaccccgcgttcctgcgattaagaaacccactcttcggcggaccggcaagattgtcttttgttccaggtctcaagcttcccagccctgtttactgcttcagcggcatgaattcgtgaggacagtggcagcccaacggttggctagtgtggatacgtctgggtcctccgtctag

SEQ ID NO: 289691 - DNA, 3867 bp, Artificial Sequence
  derived and/or modified sequence
atggccctgagcaagggcctgcggctgctgggccgcctgggcgctgagggggactgcagcgtgctgctggaggcccggggcagagatgactgcctgctgtttgaggccggcaccgtggccaccctggcccctgaggagaaggaggtgatcaagggccagtatggcaagctgacagatgcctacggctgcctgggggagctgcggctgaagagcggcggcaccagcctgtccttcctggtgctggtgacaggctgcacctctgtgggccgcatcccagatgctgagatctacaagatcacagccacagacttctaccccctgcaggaggaggccaaggaggaggagcggctcatcgccctgaagaagatcctgagcagcggggtcttctacttctcctggcccaatgatggcagcagatttgacctgactgtgaggacccagaagcagggagatgacagcagcgagtggggcaacagcttcttctggaaccagctgctgcacgtgcccctgcggcagcaccaggtgtcctgctgtgactggctgctgaagatcatctgtggggtggtgaccatcagaacagtgtatgccagccacaagcaggccaaggcctgcctggtgtcccgggtgtcctgtgagaggacaggcacccgcttccacacccggggcgtgaatgatgatggccacgtgagcaactttgtggagacagagcagatgatctacatggatgatggagtgtcctcctttgtgcagatccggggctctgtgcccctcttctgggagcagcccggcctgcaggtgggcagccaccacctgcggctgcaccggggcctggaggccaatgccccagcctttgacagacacatggtgctgctgaaggagcagtatggccagcaggtggtggtgaacctgctgggcagccggggcggggaggaggtgctgaacagagccttcaagaagctgctgtgggccagctgccacgccggggacacccccatgatcaactttgacttccaccagtttgccaagggcggcaagctggagaagctggagaccctgctgcggccccagctgaagctgcactgggaggactttgatgtgttcaccaagggagaaaatgtgagcccccgcttccagaagggcaccctgaggatgaactgcctggactgcctggacaggaccaacacagtgcagagcttcatcgccctggaggtgctgcacctgcagctgaagaccctgggcctgagcagcaagcccatcgtggacagatttgtggagagcttcaaggccatgtggagcctgaatggccacagcctgagcaaggtgttcaccggcagccgggccctggagggcaaggccaaggtgggcaagctgaaggatggagcccgctccatgagcaggaccatccagagcaacttctttgatggagtgaagcaggaggccatcaagctgctgctggtgggagatgtgtatggagaggaggtggccgacaagggcggcatgctgctggacagcacagccctgctggtgaccccccgcatcctgaaggccatgacagagcggcagagcgagttcaccaacttcaagaggatccgcatcgccatgggcacctggaatgtgaatggaggcaagcagttccgcagcaatgtgctgaggacagctgagctgacagactggctgctggacagcccccagctgagcggggccacagacagccaggatgacagcagccctgctgacatctttgctgtgggctttgaggagatggtggagctgtctgctggcaacatcgtgaatgccagcaccaccaacaagaagatgtggggcgagcagctgcagaaggccatcagccgcagccaccgctacatcctgctgaccagcgcccagctggtgggcgtgtgcctgtacatctttgtgcggccctaccacgtgcccttcatcagagatgtggccatcgacacagtgaagacaggcatgggcggcaaggccggcaacaagggagctgtgggcatccgcttccagttccacagcaccagcttctgcttcatctgcagccacctgacagctggccagagccaggtgaaggagagaaatgaagactacaaggagatcacccagaagctgtgcttccccatgggcagaaatgtgttcagccatgactatgtgttctggtgtggggacttcaactacagaattgacctgacctatgaggaggtgttctactttgtgaagaggcaggactggaagaagctgctggagtttgaccagctgcagctgcagaagagcagcggcaagatcttcaaggacttccacgagggcgccatcaactttggccccacctacaagtatgatgtgggcagcgctgcctatgacaccagtgacaagtgcaggaccccagcctggacagacagagtgctgtggtggaggaagaagcacccctttgacaagacagctggggagctgaacctgctggacagcgacctggatgtggacaccaaggtgcgccacacctggagccctggggccctgcagtactacggccgggcagagctgcaggccagtgaccacaggcctgtgctggccatcgtggaggtggaggtgcaggaggtggatgtgggcgcccgggagagggtcttccaggaggtgtcctccttccagggccccctggatgccaccgtggtggtgaacctgcagagccccaccctggaggagaagaatgagttccctgaggacctgaggacagagctgatgcagaccctgggcagctatggcaccatcgtgctggtgcgcatcaaccagggccagatgctggtgacctttgctgacagccacagcgccctgtctgtgctggatgtggatggcatgaaggtgaagggccgggctgtgaagatccggcccaagaccaaggactggctgaagggcctgcgggaggagatcatcaggaagagggacagcatggcccctgtgagccccacagccaacagctgcctgctggaggagaactttgacttcaccagcctggactatgagagcgagggggacatcctggaggatgatgaggactacctggtggatgagttcaaccagcccggggtgtctgacagcgagctgggcggagatgacctgagtgatgtgcccggccccacagccctggccccacccagcaagagccctgccctgaccaagaagaagcagcaccccacctacaaggatgatgctgacctggtggagctgaagcgggagctggaggccgtgggggagttccgccacaggagccccagccgcagcctgtctgtgcccaaccggccccggcccccccagcccccccagaggcctcctccacccaccggcctgatggtgaagaagagcgccagtgatgccagcatcagcagcggcacccacggccagtacagcatcctgcagacagcccggctgctgcccggggccccccagcagccccccaaggccaggacaggcatcagcaagccctacaacgtgaagcagatcaagaccaccaatgcccaggaggccgaggccgccatccgctgcctgctggaggcccggggcggggccagcgaggaggccctgtctgctgtggccccccgggacctggaggccagcagcgagcctgagcccaccccaggagctgccaagccagagaccccccaggccccacccctgctgccccggcggcccccaccccgggtgcctgccatcaagaagcccaccctgcggaggacaggcaagatcgtgttctgcagccgcagccaggccagccagccctgcctgctgctgcagagacatgaatttgtgaggacagtggccgcccagaggctggcctctgtggacaccagcggcagctctgtgtag

SEQ ID NO: 289692 - DNA, 3867 bp, Artificial Sequence
  derived and/or modified sequence
atggccctgagcaagggcctgcggctgctgggccggctgggcgccgagggagactgtagcgtcttgctggaggcccgaggaagggatgactgcttgctgttcgaggccggaacagtggctactttggccccagaggaaaaagaggtgatcaagggtcagtacggcaagttaactgatgcatatggttgtctgggggagctgagactgaagtccggcggaacttccctgtctttcctggttctggttactggctgtacttccgtggggagaatcccggacgccgagatttacaaaattacagccacggatttctaccctttgcaggaagaggctaaagaggaggaaagactgatcgcccttaagaagattctgagctccggcgtgttttattttagttggcccaacgacggatcaaggtttgacctgaccgtgcgcacacagaaacagggggatgattcgtctgagtggggcaatagctttttctggaaccagctcctacacgttccattaagacaacaccaggtatcttgctgtgattggctcttgaagattatttgcggtgtggtcacgatccggactgtgtatgctagccacaaacaagcgaaggcatgcttagtgagtcgtgtgtcctgcgaacggactggcacacggttccacacaagaggagttaatgacgacgggcacgtgagcaactttgtcgaaactgagcagatgatttacatggatgacggcgtgagctctttcgttcagatcagggggagcgtcccgctgttttgggagcaacccgggttacaagtcggatctcaccacctacgcttacaccgcggtctggaggcaaatgccccagcgttcgatcggcatatggtactgctaaaagaacaatacggccaacaggtggtagttaatctgctgggcagccgagggggcgaggaagtcttgaatagggcgttcaaaaagctgctctgggctagctgtcacgcaggcgatacccccatgatcaacttcgactttcaccagttcgcaaagggaggcaagcttgaaaaactggaaaccctcctgcgtccacagttaaagctccattgggaagactttgacgtgttcaccaagggagaaaatgtgtctccaagattccagaaaggtactctgagaatgaactgcctcgactgtctggaccggactaacacagtccagtcattcatcgcactagaagtccttcacctacagctgaagaccctggggctgagctcaaagcccatcgtggatagatttgttgagtctttcaaggcgatgtggagtctgaacggccactctctgtctaaagtgttcacagggtccagggcacttgagggcaaagctaaagtggggaaactgaaggacggcgctcgttccatgtcacggacgatccagtctaacttctttgacggggtgaagcaagaagcaatcaaactgctactggtgggcgacgtttacggtgaggaagtcgctgacaagggagggatgcttctcgactcaaccgcccttctggtgacaccgcggattttgaaagctatgacagagcgacagtctgaattcaccaattttaagcgtattcgtatcgctatggggacgtggaatgtgaacggtggtaaacagtttcggtccaacgtgctgcgaacagccgaactaacagactggctattggacagtccacagttatctggtgcgacggacagccaggacgattcgagccccgcggatatatttgcggtcggcttcgaggaaatggtcgaactgtccgctggaaatatcgtgaacgcatccaccactaacaaaaagatgtggggcgagcagctgcagaaagctatatccaggtcacaccgctacattctcctcacctccgctcagcttgtaggggtatgtctctatattttcgtgagaccataccacgtcccctttattagagacgtggccatcgacacagtgaagactggcatgggcgggaaggccggcaataagggtgcagtgggcatcagattccagttccattcaacgagtttctgcttcatttgttctcacctcaccgcaggccaatcccaggttaaagaacggaacgaagattacaaagagatcacccagaaactctgttttcctatgggcagaaacgtgttctcacatgactacgtgttctggtgcggggacttcaattatcggatcgacttaacttacgaggaagtgttctacttcgtcaagcggcaagactggaagaagctgctcgaatttgaccagttgcaactccagaagtccagtgggaaaatcttcaaggacttccatgaaggcgcaattaactttgggcccacatacaagtatgatgtcggatccgcagcctacgacacttccgacaagtgtcgcacgccagcatggactgacagggtgctgtggtggaggaagaagcacccctttgacaaaaccgcaggagagctgaatctgttggactctgatctggacgtcgataccaaggtgcgacatacctggtcccctggggcactgcaatattatgggagggctgaattacaggcctccgaccatcggccagttctcgcgatagtggaagtggaagtgcaggaagtggacgtgggtgcccgagagagagtgttccaggaagtgtcatcctttcaaggccccctcgacgccaccgtagtggtcaacttgcagtcgccgacactggaggaaaaaaatgagttccccgaagacctgcgcaccgagctgatgcagaccctgggatcttatggtaccatcgtgcttgttcgaattaatcagggccagatgctcgtcacctttgccgatagccacagcgccctcagcgtgctggacgtcgatggaatgaaggtgaaaggcagagctgtgaagatacggcccaaaacgaaggactggcttaagggcctgcgcgaagagatcattcgcaagcgagattctatggctccagtaagccccacagccaacagctgcctgctggaagagaatttcgatttcacttccctagactatgaatctgagggagacatcttggaggatgacgaggattacctggtggatgagtttaatcaacccggcgtgtccgatagtgagctggggggagatgacctttctgatgtgccaggacctacagctctggcaccaccatcaaagtcccctgctcttactaaaaagaagcagcacccaacttataaggatgacgctgatctggtcgagctgaaacgtgagcttgaggctgtgggagagttccgccatcggagcccatcccgaagcctgagcgtgccaaaccggcctcgccccccacagcctccccagcgaccccctccaccgaccggactcatggtgaagaaaagtgcctccgacgcttccatcagcagcggtacacacggccaatatagcattctgcagactgccagactactccctggggcacctcagcaaccacccaaagctcggaccggcatcagcaagccatataacgttaaacagattaaaactacgaatgctcaggaagcagaagcggccatccggtgtctgctggaggcacgcggcggcgcctccgaagaagctctgtccgccgtggccccacgagacctggaggcatcctctgaacccgagcctacaccaggggccgccaagcccgagactccgcaggctcccccattgctaccacggcgaccacccccgcgtgtaccggccattaaaaagccaacactaaggagaacaggtaagattgttttctgctcacggtctcaggcttcacaaccatgcctgttgctgcagcgccacgaattcgtacgaaccgttgctgctcaacgtttagcttcggtagacacctcaggttcatcagtctag

SEQ ID NO: 289693 - DNA, 3867 bp, Artificial Sequence
  derived and/or modified sequence
atggccctgtctaaggggctgaggctgctcgggagactcggtgcagagggggattgttccgtgctcctggaagccagggggagagatgattgtttactctttgaggctggcacagttgcaaccctggctcctgaggagaaagaggtgattaaaggccaatacggcaaactgacagatgcctacggatgcctgggtgagttacgccttaaaagtgggggtacctccctttcatttcttgtgctggtcaccggatgcacctccgtgggacggatacctgacgctgaaatctataagatcactgccaccgacttctatccattgcaggaggaggccaaggaggaggagcggctcatcgccctaaagaagatactgtcaagcggggtgttctattttagttggccgaacgatgggtcccgttttgatttgacagtccgtactcagaagcagggagatgattcctcagaatggggcaatagcttcttttggaaccagttgctacacgtgccactaagacagcaccaggtctcctgttgcgactggctacttaaaatcatctgcggggtcgtcaccattagaaccgtctacgcctcccataagcaggccaaggcgtgcctggtctctagagtgagttgcgagcgtactgggacgcggttccacacccgcggagttaatgacgacgggcacgtctcaaattttgtggagaccgaacagatgatctacatggatgacggggttagcagcttcgtgcagattagaggaagtgtcccactgttctgggaacagcccggactgcaggtaggatctcatcacctccgccttcatcgcggattggaagcgaatgccccagcatttgacagacatatggtcctcctgaaggagcaatatggccagcaggtggtggtcaatctgttaggtagtaggggtggcgaggaggtccttaacagggccttcaaaaagttgctgtgggcatcctgtcacgccggagatacaccaatgatcaattttgacttccatcagttcgccaaaggcggaaaactggagaagcttgagacgttgctgaggcctcagttgaagttgcactgggaggattttgacgtgtttactaagggcgagaacgtgtctcctcgctttcaaaagggcacgctgaggatgaactgtctggactgccttgatcggacaaacaccgtgcagagcttcatcgccttagaagtgctgcacctgcagttaaagactcttgggcttagttcaaagcccatcgttgatcgcttcgtggaatcctttaaagctatgtggagcctgaacggccactcattgagcaaggtattcacagggagccgagcattagaggggaaagctaaggttggtaaattaaaggacggcgctcgctccatgtctcgaaccatccaatctaacttcttcgatggtgtgaagcaagaggctattaaactacttctggtcggcgatgtgtacggtgaggaggttgctgacaaaggcggtatgttattggattccactgccctcctcgttacacccagaatcctgaaagcgatgacagagagacagagtgagtttaccaacttcaagcggatacggattgccatgggcacctggaatgttaacggtggcaagcaatttcggtctaatgtgctcagaacagctgaactgaccgattggctccttgactccccccagctctccggtgcgacggacagccaggacgactcatctcccgctgacatcttcgctgtggggttcgaggagatggtcgagctgagtgctggcaatattgtcaatgcaagcaccaccaataagaagatgtggggggagcagctgcagaaagccattagccggtcccatcggtacatcctcctaacgtcagcacagctggttggcgtctgcctctacatattcgttcgaccgtatcatgtgccctttatacgtgatgtggcaatcgacacagttaaaacgggcatgggtggtaaggctgggaataagggagctgtggggatccgctttcagttccacagcacttccttctgttttatttgttcacatttaactgctgggcagtctcaggtcaaggaacgcaacgaagactacaaagagatcacccaaaaactgtgtttcccgatgggaagaaacgtcttctcccacgactacgtattttggtgcggcgacttcaactacagaatcgatctcacttacgaggaagttttttattttgtgaaacgtcaggattggaagaaactgctagaatttgaccaactccagctacagaagtcctccgggaaaattttcaaggattttcacgaaggggcaatcaactttgggccaacgtacaagtacgatgtaggcagtgcggcttatgatacatctgataagtgtcgaaccccagcttggaccgacagagtgctgtggtggcggaagaaacacccattcgacaaaaccgctggagagctgaaccttctggattctgacttggatgtggacaccaaggtcagacacacatggtctcccggagcactccagtactacggacgggcagagctgcaagcatcagaccataggcctgtgctggccattgtcgaggttgaggtccaggaggtggatgtgggtgcccgtgaacgcgtcttccaggaggttagtagtttccagggaccccttgacgcaacagtcgtggtcaacttgcagtcgcctaccttggaggagaaaaatgagttcccagaggacttgcgcacggaacttatgcagaccttaggtagctacggtacgatcgtacttgtccgcatcaatcagggccaaatgctggtcacttttgccgactcacattccgccctcagcgtcctggatgtagacggcatgaaggtcaagggaagggcggtaaagatcagacctaagaccaaggactggctgaaaggtctgcgagaggaaatcataagaaagcgtgactcaatggcacccgtgagtcctaccgcaaattcttgtttgctggaggaaaattttgattttacaagcttggactatgaatccgagggtgacatcttagaagacgatgaggattaccttgtagatgagttcaaccagcccggtgttagcgacagcgaacttgggggagatgacctgtcggatgttcctgggccaaccgccctcgcgcctccttccaaaagccctgcactgactaaaaagaagcaacaccccacctataaggatgatgcggacttggttgagcttaagagagaactggaggccgtgggcgagtttaggcatagatcacccagcagaagcctcagcgtgccgaatcgccctcgtccacctcagcctccacagagacccccaccacctactggacttatggtgaagaaaagcgcgtccgatgcctcaatatcctcgggtacacatggtcagtattccatcttgcagaccgccaggctattacctggcgctccacagcagcctcccaaggcccgtaccggcatctcaaagccctacaacgtaaaacagataaagaccacgaatgcccaagaggcagaagccgcaatccggtgtctgcttgaagccagaggaggagcttccgaggaggccctgagtgccgtagctccgcgagacttggaagcatcttctgagccagagcctacccccggagccgctaagcccgagacgcctcaggcaccacctttactgcctcgaaggccacccccaagggtgcccgcaatcaagaaaccaacactgcgtcgcacagggaaaattgtgttttgttcgcggtcgcaggcctcacagccttgcttgctactgcagaggcacgagtttgtgcggacagtcgccgcacagaggctagccagtgtcgatacgtctggttcgtccgtgtag

SEQ ID NO: 289694 - DNA, 3973 bp, Artificial Sequence
  derived and/or modified sequence
gcaaagtgaaactctggcaagttgcgggcgcgcggggagctgtcgcgggcagcgcgccctcgggaggacgtggccccggcccccgcccgcagtgggcccgaccctcatggccctgagcaaagggctgcggctgctggggcgcctgggggccgagggggactgtagcgtgctgctggaggcgcgcggccgcgacgactgcctgctgttcgaggccggcacggtggccacgctggctccagaagaaaaggaagtcattaaaggacagtatggcaagctcacggacgcgtacggctgcctgggggagctgaggctgaaatctggtggcacgtctctgagcttcctggtgttggtgacaggctgcacatctgtgggcagaattccagatgctgaaatctacaaaatcactgccactgacttttaccctcttcaggaagaggccaaggaggaggaacgcctcatagctttgaagaaaatcctcagctcgggggtgttctatttctcatggccaaacgatgggtctcgctttgacctgactgtccgcacgcagaagcagggggatgacagctctgaatgggggaactccttcttctggaaccagctgttgcacgtgcccttgaggcagcaccaggtgagctgctgtgactggctgctgaagatcatctgcggggtggtcaccatccgcaccgtgtatgcctcccacaagcaggccaaggcctgcctcgtctctcgcgttagctgtgagcgcacaggcactcgcttccacacccgtggcgtgaacgacgacggccatgtgtccaacttcgtggagacagagcagatgatttacatggacgatggagtgtcatcttttgtccagatcagaggctccgttccgctgttctgggaacagccagggcttcaggttggctcccatcatctgagactccacagaggcctggaagccaatgcccctgctttcgacaggcacatggtgcttctgaaggagcagtacgggcagcaggtggtcgtgaaccttctgggaagcagaggcggagaggaggtgctcaacagagccttcaagaagctgctctgggcttcttgccacgcgggcgacacgcctatgatcaattttgacttccatcagtttgccaaaggtgggaagctagagaaattggagaccctcttgaggccacagttaaagctgcactgggaagacttcgatgtgttcacaaagggggagaacgtcagtccacgttttcagaaaggcactttgcggatgaactgtcttgactgcctggaccgaaccaacactgtgcagagcttcatcgcgctcgaggtcctgcatctgcagctcaagaccctggggctgagttcaaaacccatcgttgaccgctttgtggagtccttcaaagccatgtggtctctgaatggccacagcctgagcaaggtgttcacaggcagcagagccctggaagggaaggccaaggtggggaagctgaaggatggagcccggtccatgtctcgaaccatccagtccaacttcttcgacggggtgaagcaggaggccatcaagctgctgctggttggggacgtctacggcgaggaggtggcagacaaagggggcatgctgctggacagcacggcgctcctggtgactcccaggatcctgaaagctatgactgagcgtcagtccgaattcacaaatttcaagcggatccggattgctatggggacctggaacgtgaacggaggaaagcagttccggagcaacgtgctcaggacggcggagctgacagactggctgctcgactcgccccagctctcgggagctaccgactcccaggatgacagcagcccagctgacatatttgctgtggggtttgaagagatggtggaattgagcgcagggaatattgtcaatgccagtactaccaacaagaagatgtggggtgaacagcttcagaaagccatctcacgctctcatagatacattctgttgacttcggcacagctggtgggcgtctgtctttatatctttgtacgtccataccatgtcccgttcatcagggacgtagccatcgacacagtgaagacgggcatggggggcaaggcggggaacaagggcgccgtcggcatccgcttccagttccacagcaccagcttctgcttcatatgtagtcacctgacggccgggcagtcccaggtgaaggagcggaatgaagactacaaggagatcacccagaaactctgcttcccaatggggagaaatgttttttctcatgattatgtattttggtgtggcgatttcaactaccgcattgatcttacttatgaagaagtcttctattttgttaaacgccaagactggaagaaacttctggaatttgatcaactacagctacagaaatcaagtggaaaaatttttaaggactttcacgaaggagccattaactttggacccacctacaagtatgacgttggctcagccgcctacgatacaagcgacaaatgccgcacccccgcctggacagacagggtgctgtggtggaggaagaaacatccctttgataaaacagctggagaactcaaccttctagacagtgatctagatgttgacaccaaagtcagacacacctggtctcctggtgccctgcagtattatggtcgtgcggagctacaagcgtctgatcacagacctgtgctggcgatcgtggaggtggaagttcaggaagtcgatgtgggtgctcgggagagggttttccaggaagtgtcctccttccagggccccctggatgccactgttgtagtaaaccttcaatcaccgaccttagaagagaaaaacgagtttccagaggacctgcgtactgagctcatgcagaccttggggagttatgggacaattgttcttgtcaggatcaaccaagggcagatgctggtaacttttgcagacagtcactcggctctcagtgtcctggacgtggacggtatgaaggtgaaaggcagagcagtgaagattagaccgaagaccaaggactggctgaaaggtttgcgagaggagatcattcggaaacgagacagcatggcccccgtgtctcccactgccaactcctgtttgctggaggaaaactttgacttcacaagtttggactatgagtcagaaggggatattcttgaagacgatgaagactacttggtggatgaattcaatcagcctggagtctcggacagtgaactcgggggagacgacctctctgatgtccccggccccacagcactggctcctcccagcaagtcacctgctctcaccaaaaagaagcagcatccaacgtacaaagatgacgcggacctggtggagctcaagcgggagctggaagccgtcggggagttccgccaccgttctccgagcaggtctctgtcggtccccaaccggcctcggccacctcaacccccgcagagacccccccctccaaccggtttaatggtgaaaaagtcggcttcagatgcgtccatctcctccggcacccatggacagtattcaattttgcagacggcaagacttctaccaggagcacctcagcaacctcccaaggctcggactggaataagtaaaccttataatgtcaagcagatcaaaaccaccaatgcccaggaggcagaagcagcaatccggtgtctcctggaagccagaggaggtgcctccgaagaagccctaagtgccgtggccccaagggaccttgaagcatcctctgaaccagagcccacaccgggggcagccaaaccagagaccccacaggcgcccccactccttccccgtcggcccccacccagagttcctgccatcaagaagccaaccttgagaaggacaggaaagattgttttttgctctcgctctcaagcttctcagccttgcttactgcttcaaagacatgagtttgtaaggacagtagcagcccaaagactggcatctgtagacacatctggatcttccgtttga

SEQ ID NO: 289695 - DNA, 1404 bp, Artificial Sequence
  derived and/or modified sequence
atgaacgagaacatcgacatcctggagaccgccatcaagcaggccgccgagcagggcgccagaatcatcgtgacccccgaggacgccctgtacggctggaagttcaccagagagaccgtgttcccctacctggaggacatccccgacccccaggtgaactggatcccctgccaggacccccacagattcggccacacccccgtgcaggccagactgagctgcctggccaaggacaacagcatctacgtgctggccaacctgggcgacaagaagccctgcaacagcagagacagcacctgcccccccaacggctacttccagtacaacaccaacgtggtgtacaacaccgagggcaagctggtggccagataccacaagtaccacctgtacagcgagccccagttcaacgtgcccgagaagcccgagctggtgaccttcaacaccgccttcggcagattcggcatcttcacctgcttcgacatcttcttctacgaccccggcgtgaccctggtgaaggacttccacgtggacaccatcctgttccccaccgcctggatgaacgtgctgcccctgctgaccgccatcgagttccacagcgcctgggccatgggcatgggcgtgaacctgctggtggccaacacccaccacgtgagcctgaacatgaccggcagcggcatctacgcccccaacggccccaaggtgtaccactacgacatgaagaccgagctgggcaagctgctgctgagcgaggtggacagccaccccctgagcagcctggcctaccccaccgccgtgaactggaacgcctacgccaccaccatcaagcccttccccgtgcagaagaacaccttcagaggcttcatcagcagagacggcttcaacttcaccgagctgttcgagaacgccggcaacctgaccgtgtgccagaaggagctgtgctgccacctgagctacagaatgctgcagaaggaggagaacgaggtgtacgtgctgggcgccttcaccggcctgcacggcagaagaagaagagagtactggcaggtgtgcaccctgctgaagtgcaagaccaccaacctgaccacctgcggcagacccgtggagaccgccagcaccagattcgagatgttcagcctgagcggcaccttcggcaccgagtacgtgttccccgaggtgctgctgaccgagatccacctgagccccggcaagttcgaggtgctgaaggacggcagactggtgaacaagaacggcagcagcggccccatcctgaccgtgagcctgttcggcagatggtacaccaaggacagcctgtacagcagctgcggcaccagcaacagcgccatcacctacctgctgatcttcatcctgctgatgatcatcgccctgcagaacatcgtgatgctgtag

SEQ ID NO: 289696 - DNA, 1404 bp, Artificial Sequence
  derived and/or modified sequence
atgaatgaaaacatcgacatcctggagacggccataaaacaggctgccgagcagggggcacggattatcgtgacccccgaggacgctctgtacggatggaagttcacccgagagacagtcttcccttacctcgaggacatcccggacccccaagtcaactggattccttgccaagacccacaccgttttggtcacacccccgtgcaggcccggctgagctgcctagccaaggacaatagcatctatgtgttggccaacctgggtgacaagaagccgtgcaacagtagggattctacctgccccccaaacggctactttcagtacaatactaatgttgtttataacaccgaggggaaactggtggcccgctatcacaaatatcacctatactcggaaccgcagtttaacgtgccggagaaaccagaactggtgactttcaacactgcttttgggcgttttgggatcttcacatgctttgacattttcttttacgatccaggcgtgacgctggtgaaagatttccatgttgacacaatccttttccccactgcctggatgaatgttctgcccctgctgacagcgattgaatttcattccgcatgggccatgggcatgggagtgaacctgttggtggccaacacccatcacgtgtctcttaacatgactggttctgggatttacgcgcctaatggccctaaggtgtaccactacgacatgaagacagaactggggaagctgttactgtcggaggtagattctcaccccttaagctcgcttgcataccccacagccgtgaattggaacgcttacgcaacgacaattaaaccgttccccgtgcagaaaaatactttcaggggctttatctcaagggatgggttcaattttactgagttattcgagaacgccggtaatttaactgtctgccagaaagagttgtgctgccacctcagctacagaatgctccagaaggaagagaatgaagtgtacgtacttggggcctttacagggttgcacggccgccggcggagagagtactggcaagtttgtaccctgttgaaatgcaagacaacaaatctgactacgtgcggacgcccagtcgagaccgcatctactcggttcgagatgttctcactgtccggcacattcggcacagaatacgtgttccccgaggtgttacttactgagatccatctgtccccgggcaagttcgaagtcttaaaggatggacgactcgtcaataagaatggatcaagtggcccaatcctgactgtaagcctgttcggcagatggtataccaaggatagcttatatagctcttgcggcacctccaatagcgcgattacttatctcctgatctttattctgctcatgattatagccctgcagaatattgtgatgctgtag

SEQ ID NO: 289697 - DNA, 1404 bp, Artificial Sequence
  derived and/or modified sequence
atgaatgaaaatattgacatcctggagacagccatcaagcaggccgctgagcagggcgcccgcatcatcgtgaccccagaagatgccctgtatggctggaagttcacccgggagaccgtcttcccctacctggaggacatcccagacccccaggtgaactggatcccctgccaggacccccacagatttggccacacccctgtgcaggcccggctgagctgcctggccaaggacaacagcatctacgtgctggccaacctgggggacaagaagccctgcaacagccgggacagcacctgccccccaaatggctacttccagtacaacaccaacgtggtgtacaacacagagggcaagctggtggcccgctaccacaagtaccacctgtacagcgagccccagttcaacgtgcctgagaagccagagctggtgaccttcaacacagccttcggccgcttcggcatcttcacctgctttgacatcttcttctatgaccccggggtgaccctggtgaaggacttccacgtggacaccatcctcttccccacagcctggatgaatgtgctgcccctgctgacagccatcgagttccacagcgcctgggccatgggcatgggcgtgaacctgctggtggccaacacccaccacgtgtccctgaacatgacaggcagcggcatctatgcccccaacggccccaaggtgtaccactatgacatgaagacagagctgggcaagctgctgctgtctgaggtggacagccaccccctgagcagcctggcctaccccacagctgtgaactggaatgcctatgccaccaccatcaagcccttccctgtgcagaagaacaccttccggggcttcatcagcagagatggcttcaacttcacagagctgtttgaaaatgccggcaacctgactgtgtgccagaaggagctgtgctgccacctgagctacaggatgctgcagaaggaggagaatgaggtgtatgtgctgggcgccttcaccggcctgcacggcagaagaagaagagagtactggcaggtgtgcaccctgctgaagtgcaagaccaccaacctgaccacctgtggccggcctgtggagacagccagcaccaggtttgagatgttcagcctgagcggcaccttcggcacagaatatgtgtttcctgaggtgctgctgacagagatccacctgagccctgggaagtttgaggtgctgaaggatggccgcctggtgaacaagaatggcagcagcggccccatcctgactgtgtccctgtttggccgctggtacaccaaggacagcctgtacagcagctgtggcaccagcaacagcgccatcacctacctgctgatcttcatcctgctgatgatcatcgccctgcagaacatcgtgatgctgtag

SEQ ID NO: 289698 - DNA, 1404 bp, Artificial Sequence
  derived and/or modified sequence
atgaacgagaacatcgacatcctggagaccgccatcaagcaggccgcagagcagggcgctcggattatcgtaactccagaggacgccctgtatgggtggaaattcactagggaaactgtgtttccgtatctcgaggatatcccggatcctcaggtcaactggattccatgtcaggacccgcaccgattcggacacacgcccgtccaggcacggctctcctgcttggccaaggacaactcaatctatgtacttgccaatctcggcgataaaaagccttgtaactctagagattcgacctgtcctcctaacggctacttccaatataatactaatgtggtgtacaacactgaggggaagttagtcgcccgctaccacaagtatcacctctacagcgaaccccagttcaatgttccagaaaagcccgagctcgtgacattcaacaccgcgttcggccgttttgggatttttacttgtttcgacattttcttctacgatcctggtgttactctggtgaaagattttcacgtcgacaccatcttgttccccacggcctggatgaacgtcctgcccctgctgacggcaattgagttccactcggcctgggcaatgggtatgggcgtaaatttgctggtggcaaacacgcaccacgtgagcctaaatatgactggatccggcatatacgctccaaacgggcccaaagtctatcactacgacatgaaaaccgagctcggaaagctcttactgagtgaagtggactcccaccccctctcgtccttagcttatcccacagcagtcaattggaatgcttatgccaccaccatcaagccttttcctgtccagaagaacacttttaggggttttataagtagagatggctttaacttcaccgagctgttcgagaacgccggtaaccttactgtctgccaaaaagaattgtgctgtcatctgagttaccggatgttgcagaaggaagaaaacgaagtgtacgtgctgggcgcattcaccggtctgcatggacggcgaaggcgggagtactggcaagtgtgcacccttctcaagtgtaaaaccactaatctgacgacctgtggcagaccagtggagacggccagtaccagattcgaaatgttttctctctcagggacatttggcaccgaatatgtgtttccagaggttcttctcacagagatccatctgtcaccaggaaagtttgaggttctgaaagacgggcgtctcgtcaataagaacggatcgagcggacctatcctgacggttagcttgttcggcaggtggtacactaaggattccctctacagctcctgcggaacctcaaacagcgcgatcacatatctgttgatcttcatcttgctcatgatcatcgcactgcagaatatcgtgatgctgtag

SEQ ID NO: 289699 - DNA, 1404 bp, Artificial Sequence
  derived and/or modified sequence
atgaatgaaaacatagacatccttgagacagccataaagcaggcagcagaacagggtgcacggattattgtgacgcctgaggacgctctgtacgggtggaagttcaccagggaaacggtctttccctatctggaggatattcctgaccctcaggttaactggattccttgtcaggatccacacaggtttggccatactcctgttcaagcgagattgtcgtgtctggcaaaagacaattctatctacgtgctcgccaacctaggggataaaaaaccctgcaattctcgggatagcacctgccctccgaatgggtacttccaatacaacactaacgttgtttacaacactgaaggcaaattagtcgcacggtaccacaaataccatctttactcggaaccccaattcaacgttcctgagaagcctgaactggtcacatttaatactgcctttggtagattcgggatttttacatgcttcgatatttttttctacgatccaggcgtgacactggtgaaggactttcacgtcgacaccatcctattccctaccgcctggatgaatgtactgccattattgacagccatcgaatttcattccgcctgggcaatgggtatgggcgtcaaccttctcgtggccaatacccaccacgtgagtcttaatatgaccggcagtggaatctacgccccaaacggacctaaggtctaccattacgacatgaagaccgagctcggtaagctgttactgtcagaagtcgacagccacccactttccagtctggcctacccaaccgccgttaactggaacgcttatgcgactaccatcaagcctttcccggtgcagaagaatacatttagaggctttatctcccgagacggatttaattttacagagctgttcgaaaatgctggtaatcttaccgtatgtcagaaagagctgtgctgtcacctgtcttaccgaatgctgcaaaaagaagagaacgaggtgtacgtgttgggggcttttaccggtctccacgggcgacgccgacgggaatactggcaggtttgcactctcttgaagtgcaagaccacaaatctcacaacttgcggcagaccggtagagaccgcctcaacaaggttcgagatgttttctttgtctggtacatttggcaccgaatatgtgttccctgaggttctgcttactgagatacatttgtcccccggtaagtttgaagtcctgaaagacggacggttagttaataagaacggctcttccggtcccatcttgacggtttctctatttgggcgatggtacaccaaggattccctgtatagttcctgcggtacatccaactcagccattacgtatctcctgatcttcatccttctcatgatcattgccttgcagaacatcgtcatgctctag

SEQ ID NO: 289700 - DNA, 759 bp, Artificial Sequence
  derived and/or modified sequence
cggattcttggtttagctaggccgcggggggtcggatagagtgggcacagtttgcaatggattttggataaacaagatctgttgaaggagcgccaaaaggatttaaagtttctctcagaggaagaatattggaagttacaaatattttttacaaatgttatccaagcattaggtgaacatcttaaattaagacaacaagttattgccactgctacggtatatttcaagagattctatgccaggtattctctgaaaagtatagatcctgtattaatggctcctacatgtgtgtttttggcatccaaagtagaggaatttggagtagtttcaaatacaagattgattgctgctgctacttctgtattaaaaactagattttcatatgcctttccaaaggaatttccttataggatgaatcatatattagaatgtgaattctatctgttagaactaatggattgttgcttgatagtgtatcatccttatagacctttgctccagtatgtgcaggacatgggccaagaagacatgttgcttccccttgcatggaggatagtgaatgatacctacagaacggatctttgcctactgtatcctcctttcatgatagctttagcttgcctacatgtagcctgtgttgtacagcagaaagatgccaggcaatggtttgctgagctttctgtggatatggaaaagattttggaaataatcagggttattttaaaactatatgagcagtggaagaatttcgatgagaga

SEQ ID NO: 289701 - DNA, 545 bp, Artificial Sequence
  derived and/or modified sequence
ctctggaagcgctttcatgagataggcactgagatgatcatcaccaaggccggcaggcgcatgtttccagcaatgagagtgaagatctctggattagatcctcaccagcaatattacattgccatggatattgtaccagtggacaacaaaagatacaggtatgtttaccacagttcgaaatggatggtggcaggtaatgctgactcgcctgtgccaccccgtgtgtacattcatccagactcgcctgcctcgggggagacttggatgagacaagttatcagcttcgacaagctgaagctcaccaacaatgaactggatgaccaaggccatattattcttcattctatgcacaaataccaaccgcgagtgcacgtcatccgtaaagactgtggagacgatctttctcccatcaagcctgttccatccggggaaggagtaaaggcattctcctttccagaaactgtcttcacaaccgtcactgcctatcagaatcagcagattactcgcctgaagatagataggaatccatttgctaaaggcttccg

SEQ ID NO: 289702 - DNA, 1428 bp, Artificial Sequence
  derived and/or modified sequence
atggagactcagttgcaatctatctttgaggaagtagtaaagaccgaggtcatcgaggaggcttttcccggaatgttcatggatacccccgaggacgagaagaccaagttaatcagctgcctcggcgccttccgccaattctggggtggtttgtctcaggaatctcatgagcaatgtattcagtggatagtcaaattcattcacggccagcactctccaaagaggatttcgtttctgtatgactgcttagcaatggctgtggagaccggactgctccccccacgcctggtgtgcgagtcactgattaatagcgatacactagagtgggaacggactcagttgtgggccctgaccttcaagcttgtacgcaaaatcataggcggagtcgactacaagggggtgcgcgaccttctcaaagtgatcctggaaaagatcttgactattcccaatacagtgtcttcagctgtggtgcagcagctgcttgcagcacgcgaggttattgcgtacatcctcgagagaaacgcttgtctgttacctgcatacttcgccgtgaccgagataagaaaactgtacccagaaggcaagctgccgcattggctcctcggcaacttggtgtcggactttgtggatacatttcgccccacagccaggataaatagtatctgtggcaggtgcagcctgcttcccgtggtgaacaacagcggggcaatttgtaacagctggaagctggatcccgccacccttcgtttcccacttaaggggttgttgccatatgacaaggacttgtttgaacctcaaactgctctccttaggtatgttctcgagcagccttattctagggatatggtttgcaatatgctggggctgaacaagcagcacaaacagagatgcccggtgcttgaagaccagctggtggatctagttgtgtatgctatggagcgtagcgaaaccgaggaaaaatttgatgatggcggcacaagtcaacttctatggcaacacctttcatcacagctgatttttttcgtgctgtttcaattcgcttcattccctcacatggtactatcactccaccaaaagttggcaggcaggggactgattaaaggacgggatcacctgatgtgggttcttctgcagttcattagtgggagcattcagaaaaatgcccttgccgattttttgcctgttatgaagctgtttgatttattataccccgagaaggagtacatcccagtcccagatattaacaagccccaaagtactcatgcctttgcaatgacatgtatatggatccaccttaatcgaaaggcccaaaatgacaatagtaagctgcagataccgatccctcacagtctgagactgcaccatgaatcagcgtttgcgaactgtttccagatcacctgtatgggcgacttgactcacactccatag

SEQ ID NO: 289703 - DNA, 429 bp, Artificial Sequence
  derived and/or modified sequence
atgcatcatattcagcctcactaccgcgtgcagttactgtcccacctgcatacccttgccgccgtggcccagaccaatcaaaaccagcttcacctctgcgtggagagtactgcattgcggctgattacagcattgggctcctccgaggtgcagcctcagtttacgaggttcctgagcgaccccaagacagtactctcagccgagtccgaggaactcaacagggcactcattcttaccctggcgcgcgctactcacgtgacagacttcttcaccgggtccgacagcatccagggtacatggtgcaaggacatcttgcagactatcatgtccttcactcctcataattgggcaagtcacaccctctcgtgcttccccggcccactacagacactcctgattttgggagagctggctctccgcaagacttag

SEQ ID NO: 289704 - DNA, 1428 bp, Artificial Sequence
  derived and/or modified sequence
atggagacccagctgcagagcatctttgaggaggtggtgaagacagaggtgattgaggaggccttccctggcatgttcatggacaccccagaagatgagaagaccaagctgatcagctgcctgggcgccttccggcagttctggggcggcctgagccaggagagccatgagcagtgcatccagtggatcgtgaagttcatccacggccagcacagccccaagaggatctccttcctgtatgactgcctggccatggctgtggagaccggcctgctgcccccccggctggtgtgtgagagcctcatcaacagcgacaccctggagtgggagaggacccagctgtgggccctgaccttcaagctggtgaggaagatcatcggcggcgtggactacaagggcgtgcgggacctgctgaaggtgatcctggagaagatcctgaccatccccaacacagtgagcagcgctgtggtgcagcagctgctggccgcccgggaggtgattgcctacatcctggagagaaatgcctgcctgctgcctgcctactttgctgtgacagagatcaggaagctgtacccagagggcaagctgccccactggctgctgggcaacctggtgtctgactttgtggacaccttccggcccacagcccgcatcaacagcatctgtggccgctgcagcctgctgcctgtggtgaacaacagcggggccatctgcaacagctggaagctggaccctgccaccctgcgcttccccctgaagggcctgctgccctatgacaaggacctgtttgagccccagacagccctgctgcgctacgtgctggagcagccctacagccgggacatggtgtgcaacatgctgggcctgaacaagcagcacaagcagcgctgccctgtgctggaggaccagctggtggacctggtggtgtatgccatggagaggagtgaaacagaggagaagtttgatgatggcggcaccagccagctgctgtggcagcacctgagcagccagctgatcttctttgtgctcttccagtttgccagcttcccccacatggtgctgagcctgcaccagaagctggccggccggggcctcatcaagggccgggaccacctgatgtgggtgctgctgcagttcatcagcggcagcatccagaagaatgccctggccgacttcctgcctgtgatgaagctgtttgacctgctgtacccagagaaggagtacatccctgtgcctgacatcaacaagccccagagcacccacgcctttgccatgacctgcatctggatccacctgaacaggaaggcccagaatgacaacagcaagctgcagatccccatcccccacagcctgcggctgcaccatgaaagtgcctttgccaactgcttccagatcacctgcatgggagacctgacccacaccccctag

SEQ ID NO: 289705 - DNA, 429 bp, Artificial Sequence
  derived and/or modified sequence
atgcaccacatccagccccactacagagtgcagctgctgagccacctgcacaccctggccgctgtggcccagaccaaccagaaccagctgcacctgtgtgtggagagcacagccctgcggctcatcacagccctgggcagcagcgaggtgcagccccagttcacccgcttcctgagtgaccccaagacagtgctgtctgctgagagcgaggagctgaacagagccctgatcctgaccctggcccgggccacccacgtgacagacttcttcaccggcagtgacagcatccagggcacctggtgcaaggacatcctgcagaccatcatgtccttcaccccccacaactgggccagccacaccctgagctgcttccctggccccctgcagaccctgctgatcctgggggagctggccctgaggaagacctag

SEQ ID NO: 289706 - DNA, 641 bp, Artificial Sequence
  derived and/or modified sequence
tgatagtacagatggagacgcaactgcagagcattttcgaagaggtggtgaaaacggaagttatagaagaggcttttcctggcatgtttatggatactcctgaagatgagaaaacaaaactatttatggaaatggaattatgaggatacctctccctggaacaaactgtatggcttcaggatctattacccccttacctatgaacctcctggattcactgacagttcatgccaaaatgagccttattcacagcattgcaaccagggtgataaaacttgctcatgcaaagtccagtgtggccttggctccagccctagtggaaacttacagtcgtttattggtctatatggaaatagagtctttgggcatcaaaggatttatcagtcagcttttgccaactgttttcaaatcacatgcatgggggatcttacacacactccttgagatgtttagctaccggatgcatcatattcagcctcattacagagttcagctcctgagtcatcttcatactttggctgcagttgcacaaacaaaccagaaccagctccatctttgtgtcgagagcactgctctcaggcttataacagcattaggtagctcagaggtacaaccgcagtttacacgcttccttagtgatc

SEQ ID NO: 289707 - DNA, 1636 bp, Artificial Sequence
  derived and/or modified sequence
tgatagtacagatggagacgcaactgcagagcattttcgaagaggtggtgaaaacggaagttatagaagaggcttttcctggcatgtttatggatactcctgaagatgagaaaacaaaactaattagctgtttgggggccttcagacagttttggggtggtctttctcaggagtctcatgaacagtgtatccagtggattgttaagtttattcatggtcagcatagtcctaaaagaatttcttttctttatgactgcttagcaatggcagttgagactggtctccttccacccaggctggtttgtgaatccctgataaactctgacactcttgagtgggaaagaacacagctttgggccttaacatttaaactggttcggaaaataattgggggagtggattacaagggtgttcgagatctcttaaaagtgattttggagaagattttgacaattcctaatacagtgagctctgctgttgtacagcagcttctggcagcaagagaggttatagcatatatcttggaaagaaatgcctgcttattaccagcctattttgcagtcactgagatcaggaaactgtatcctgaaggcaaacttccacactggttacttggaaacctagtatcagactttgtggataccttcaggcccacagcaaggataaactccatttgtggtcgctgtagtcttctgccagttgtaaataattcgggtgccatttgtaattcatggaaactggatcctgctactcttcgttttcctttgaaaggccttttgccatatgataaggatctgtttgaaccacagactgctttgttgagatatgtattggagcagccttattccagggatatggtctgcaatatgctaggtttaaataagcagcacaagcagcgctgccctgtgctggaggaccagttggtggatctggttgtttatgccatggagcgatctgagaccgaggagaagtttgacgatgggggaacaagccaactcctgtggcagcatctctcaagtcagctcattttctttgtgcttttccagtttgcaagttttccacatatggtgctttctcttcatcagaagttagcagggcgaggactgattaaaggcagagatcatcttatgtgggttctcctgcaattcatttctggaagtattcagaaaaatgcactagctgattttctccctgtgatgaagctcttcgacttgctatacccagaaaaagaatatatcccagttcctgatattaacaaaccccagtcaacccatgcctttgcaatgacctgtatttggattcatctcaatagaaaagctcaaaatgacaactccaagctacagattccaatacctcattccctaagacttcaccatgagtcagcttttgccaactgttttcaaatcacatgcatgggggatcttacacacactccttgagatgtttagctaccggatgcatcatattcagcctcattacagagttcagctcctgagtcatcttcatactttggctgcagttgcacaaacaaaccagaaccagctccatctttgtgtcgagagcactgctctcaggcttataacagcattaggtagctcagaggtacaaccgcagtttacacgcttccttagtgatc

SEQ ID NO: 289708 - DNA, 1428 bp, Artificial Sequence
  derived and/or modified sequence
atggagacccagctgcagagcatcttcgaggaggtggtgaagaccgaggtgattgaagaagcattcccaggaatgttcatggatacaccagaagatgagaagacaaagctgatttcatgtcttggcgctttcagacagttttggggcggcctctcacaggagagccacgagcaatgcattcagtggattgtgaagttcatacacgggcaacattcccccaagaggattagttttctgtacgactgcctcgccatggctgtggagactggccttctccccccccgcctggtttgtgaatccctcataaatagcgacacactggagtgggagcgcacacagctctgggccctgacgttcaaactggttcgaaaaatcataggtggagtcgactacaagggggtgcgggacctattgaaagtgatcctcgaaaaaatcctcaccatccccaacacggtatcttcagccgtcgtgcagcaactcctggccgcccgggaagttattgcttacatactggagagaaacgcatgcctgttaccagcctactttgccgtgaccgaaattagaaagctgtaccctgaggggaagctgccccactggctgctagggaatctagtctccgattttgtggacaccttcaggcctacggcaaggataaactccatttgcggacggtgttctctgctcccagtcgttaacaactccggtgcaatctgtaattcctggaaactcgaccccgctacgctgcgttttcctctgaaggggttgctcccttacgataaggatctcttcgaaccccaaacagctctgcttcggtacgtgctggagcagccgtactcaagggacatggtttgtaacatgcttggcctcaataagcaacacaagcagcgatgtcccgtcctggaggaccagcttgttgatctggttgtttacgccatggagaggtcagagacagaagaaaagtttgacgatggcggcacttcccagttactatggcagcacttgtcttctcagttgatattttttgtgctttttcaatttgctagttttccacacatggtattatccctacaccaaaagctcgccgggcgcggactgatcaaaggacgcgaccatctcatgtgggtgcttctgcagtttattagtggtagcatccaaaagaatgcacttgcagactttctgccggtgatgaagcttttcgatttgctctacccggaaaaagaatatatccccgttccggacatcaacaaacctcagagtacacacgcttttgccatgacgtgcatctggattcaccttaaccgcaaggctcagaatgataattcaaagctgcagatccccattccgcatagccttagactccaccacgagtctgcttttgccaactgtttccagatcacctgtatgggggatttaactcatactccttag

SEQ ID NO: 289709 - DNA, 429 bp, Artificial Sequence
  derived and/or modified sequence
atgcaccacatccagccccactaccgggtgcagctgctgagccacctgcatacactggccgctgtggcacagacaaatcagaatcagctccacctgtgcgtagagtcaaccgccttgcggctcattaccgccctggggagcagcgaggtgcagccacaattcactcggttcttgagtgacccaaagactgtcttgtccgctgagagcgaagagctgaacagagccttaatactgactttggcccgtgccacccatgtaacggacttcttcacggggtctgattccattcaaggaacctggtgcaaagacattcttcagacaatcatgtcctttacgccacataattgggcctcccacacactctcttgcttccccggacctctgcagacattattaattttaggcgagcttgccctccggaagacatag

SEQ ID NO: 289710 - DNA, 1428 bp, Artificial Sequence
  derived and/or modified sequence
atggagacgcagctgcagagcattttcgaagaggttgtcaagaccgaggtgattgaagaagcattccccggtatgttcatggacacgccagaagatgagaaaaccaagctcatttcgtgcctcggcgcatttagacagttctgggggggtttgtcacaggaatcacacgaacaatgcatccagtggatcgtgaaattcatccacggacagcacagcccaaagcgtatctctttcctgtacgactgtctggccatggctgtggagacggggctgctccctccgcgactggtctgcgaaagcttaatcaatagtgataccttagaatgggagagaacgcagttgtgggccctcacctttaagctggtgcgtaagataatcggcggtgtcgattataagggagtccgtgacctgttgaaggtcattctggaaaaaatcctgaccattccaaacactgtgtcctccgcagtcgtgcaacagctgttggccgctcgggaagttatcgcctatattctagagaggaacgcttgcctattgcccgcttattttgccgtgaccgaaataaggaagctctaccctgaaggaaagctgccccattggctgctcggcaacctggtctccgattttgtagacaccttcaggcccacggcgaggattaacagcatatgtggtaggtgctccttgctgcccgttgtcaacaattccggagcaatctgtaacagctggaagctggaccccgctactctcaggtttccgttgaaaggcctgctgccatatgacaaggacctgtttgagcctcagacagcacttctgcggtacgttctggagcaaccttactcgagagacatggtttgtaacatgctcggcttgaacaagcagcacaaacagcggtgtccggtactcgaggaccagcttgtggacctggtggtgtatgccatggagcgtagcgaaaccgaggaaaagtttgacgacgggggaacctctcaattgctgtggcaacacctgagctctcaattaattttctttgttctgttccagttcgcctcctttccacatatggttctgtcactccatcagaaattggccggaagagggctgatcaaggggagagaccacctgatgtgggttttgttgcagttcatatctgggagtatacaaaaaaatgccctcgcagatttcctccctgtgatgaaactttttgatcttctctatcccgagaaggaatacatcccagtgccagatatcaataaacctcaaagcactcacgctttcgccatgacctgtatctggatccatctgaatagaaaagcccaaaacgataacagcaagctacagatacccattcctcattctctgaggctgcaccacgaaagtgccttcgccaactgctttcaaatcacctgcatgggcgatctgacccacaccccctag

SEQ ID NO: 289711 - DNA, 429 bp, Artificial Sequence
  derived and/or modified sequence
atgcaccatatccaaccccactacagagtgcagttgctttctcacctgcacaccttggcggctgtcgcccaaaccaaccaaaatcagctgcacttgtgcgttgagtcgacagctctgcgactcattaccgccctaggcagctctgaggtgcagccccagttcacacggttcctatccgatccaaaaacagtgctctcagccgagagcgaggagctaaatcgagccctcatcctcactctagctagagcaacacacgtgacagacttcttcaccggatccgactctattcagggcacatggtgcaaagatatcctgcagacaattatgagctttacccctcacaactgggcttcccatactctgtcttgctttccaggccctctccagacactgcttatactgggagagctcgccttacggaagacctag

SEQ ID NO: 289712 - DNA, 1428 bp, Artificial Sequence
  derived and/or modified sequence
atggagacccagctgcagagcatcttcgaggaggtggtgaagaccgaggtgatcgaggaggccttccccggcatgttcatggacacccccgaggacgagaagaccaagctgatcagctgcctgggcgccttcagacagttctggggcggcctgagccaggagagccacgagcagtgcatccagtggatcgtgaagttcatccacggccagcacagccccaagagaatcagcttcctgtacgactgcctggccatggccgtggagaccggcctgctgccccccagactggtgtgcgagagcctgatcaacagcgacaccctggagtgggagagaacccagctgtgggccctgaccttcaagctggtgagaaagatcatcggcggcgtggactacaagggcgtgagagacctgctgaaggtgatcctggagaagatcctgaccatccccaacaccgtgagcagcgccgtggtgcagcagctgctggccgccagagaggtgatcgcctacatcctggagagaaacgcctgcctgctgcccgcctacttcgccgtgaccgagatcagaaagctgtaccccgagggcaagctgccccactggctgctgggcaacctggtgagcgacttcgtggacaccttcagacccaccgccagaatcaacagcatctgcggcagatgcagcctgctgcccgtggtgaacaacagcggcgccatctgcaacagctggaagctggaccccgccaccctgagattccccctgaagggcctgctgccctacgacaaggacctgttcgagccccagaccgccctgctgagatacgtgctggagcagccctacagcagagacatggtgtgcaacatgctgggcctgaacaagcagcacaagcagagatgccccgtgctggaggaccagctggtggacctggtggtgtacgccatggagagaagcgagaccgaggagaagttcgacgacggcggcaccagccagctgctgtggcagcacctgagcagccagctgatcttcttcgtgctgttccagttcgccagcttcccccacatggtgctgagcctgcaccagaagctggccggcagaggcctgatcaagggcagagaccacctgatgtgggtgctgctgcagttcatcagcggcagcatccagaagaacgccctggccgacttcctgcccgtgatgaagctgttcgacctgctgtaccccgagaaggagtacatccccgtgcccgacatcaacaagccccagagcacccacgccttcgccatgacctgcatctggatccacctgaacagaaaggcccagaacgacaacagcaagctgcagatccccatcccccacagcctgagactgcaccacgagagcgccttcgccaactgcttccagatcacctgcatgggcgacctgacccacaccccctag

SEQ ID NO: 289713 - DNA, 429 bp, Artificial Sequence
  derived and/or modified sequence
atgcaccacatccagccccactacagagtgcagctgctgagccacctgcacaccctggccgccgtggcccagaccaaccagaaccagctgcacctgtgcgtggagagcaccgccctgagactgatcaccgccctgggcagcagcgaggtgcagccccagttcaccagattcctgagcgaccccaagaccgtgctgagcgccgagagcgaggagctgaacagagccctgatcctgaccctggccagagccacccacgtgaccgacttcttcaccggcagcgacagcatccagggcacctggtgcaaggacatcctgcagaccatcatgagcttcaccccccacaactgggccagccacaccctgagctgcttccccggccccctgcagaccctgctgatcctgggcgagctggccctgagaaagacctag

SEQ ID NO: 289714 - protein, 284 aa, Artificial Sequence
  derived and/or modified sequence
MTTAHFYCQYCTASLLGKKYVLKDDSPYCVTCYDRVFSNYCEECKKPIESDSKDLCYKDRHWHEGCFKCTKCNHSLVEKPFAAKDERLLCTECYSNECSSKCFHCKRTIMPGSRKMEFKGNYWHETCFVCENCRQPIGTKPLISKESGNYCVPCFEKEFAHYCNFCKKVITSGGITFCDQLWHKECFLCSGCRKDLCEEQFMSRDDYPFCVDCYNHLYANKCVACSKPISGLTGAKFICFQDSQWHSECFNCGKCSVSLVGKGFLTQNKEIFCQKCGSGMDTDI

SEQ ID NO: 289715 - protein, 210 aa, Artificial Sequence
  derived and/or modified sequence
MTTAHFYCQYCTASLLGKKYVLKDDSPYCVTCYDRVFSNYCEECKKPIESDSKDLCYKDRHWHEGCFKCTKCNHSLVEKPFAAKDERLLCTECYSNECSSKCFHCKRTIMPGSRKMEFKGNYWHETCFVCENCRQPIGTKPLISKESGNYCVPCFEKEFAHYCNFCKKVITSGGITFCDQLWHKECFLCSGCRKDLCEEQFMSRDDYPFC

SEQ ID NO: 289716 - DNA, 2135 bp, Artificial Sequence
  derived and/or modified sequence
aggaagcaggcagagcggggaaggctgagtccacactgcaagtccagagagcagggaactaccttgagtattctactcaaacttatgtctcagagttccccaatttcccaagaagggagagatagaggccacaatccagggggccatctcttaaggtaccaataattttgcagcccagtaggagtcatgtacacggtataagacttggaggaaatgcagggacccttctgttttctcctgcaaagttgaaaaagctgcatgcagttggaagggatcttcagatggtgctggtgactttctgttccttttggagttgacatgcatgtggattggaggaaaaataatcaacatatattctcctttcgtactgtttaaatcacaggaagaagcggctttaagacaaagatcaaaccaaaatgacaactgctcacttttactgtcaatactgcacagcatcacttcttgggaagaaatatgtactaaaggatgacagtccatactgtgttacatgttatgatcgtgtattttctaactattgcgaggaatgcaaaaaaccaattgaatctgattctaaggatctttgttacaaagaccggcactggcatgaaggatgcttcaagtgcaccaaatgcaatcactctttggtggaaaagccttttgctgccaaggatgagcgcctgctgtgcacggagtgctattctaacgagtgctcctccaagtgcttccactgcaagaggaccatcatgcctggttcccgcaaaatggaatttaagggaaactactggcatgaaacctgttttgtgtgtgagaattgccgacaacctatagggacaaagcctttgatctccaaagagagtggcaattattgtgtgccatgttttgagaaggagtttgctcactactgcaacttttgtaagaaggtgataacttcaggtgggataacattttgtgaccagctatggcataaagagtgttttctgtgtagtggctgtaggaaagatctctgtgaagaacagttcatgtccagagacgactatccattctgcgtggactgctacaaccatctttatgccaacaagtgtgtagcctgttccaaacccattagtggtctcacaggtgccaagtttatctgctttcaagacagccagtggcatagcgaatgctttaactgcgggaaatgctctgtctccttggtgggtaaaggcttcctgacccagaacaaggaaatcttctgccaaaaatgtggctccggaatggacactgacatctaggagacagtccttgcccacctaaaatccattttgccttcgttgtcactaaagccagaactcagttgcggtcttatttttgacttaagttttagaaaatattcatgtagtttagagtggaaaagtttttgcacacattttgatcgaactatattctaagcacacaaaaagcacagtagaacagaaatgaatatatgctaaatcacaaagacaactctccttgcaaaatactgcactctgctgttagaagcagaggaaaatatctcttcataatcaaatatatgacatatacctaggagctgtggatgtaattactgaagaatgaggtttttcatacctgaagagtaaaagaaaaactaagagatcaaactgagaggtatacatgaggctagtgtttgcattcctggttatatgtaatgtgataaattagctatgaatggtaaaagaacaaaactgatcagagtaaattcattagcaattatcacatttaagaattgttatcatttaaaaatcatcctttttttcacacatactgactgtagaattaaaaaacaaagctacaatttgccctcatacacactgcttccacagcttgctagttctgtgtttactcaatggaatatgagaactgaggacattatggctctcataatctgcataggtataaagaggatcatttctacctagggatagccaaagcatgggtttcaacacgttttgtattaaatatattttcaaagtccacagtgatttttctaaacgcttacagattccatgaaataaaagtctattctttcaagtggagctaaccaggataatctttgtccccaaaggcaaacctttaaaataaatagatcattaaatctt

SEQ ID NO: 289717 - DNA, 2031 bp, Artificial Sequence
  derived and/or modified sequence
tgcaagtccagagagcagggaactaccttgagtattctactcaaacttatgtctcagagttccccaatttcccaagaagggagagatagaggccacaatccagggggccatctcttaaggtaccaataattttgcagcccagtaggagtcatgtacacggtataagacttggaggaaatgcagggacccttctgttttctcctgcaaagttgaaaaagctgcatgcagttggaagggatcttcagatggtgctggtgactttctgttccttttggagttgacatgcatgtggattggaggaaaaataatcaacatatattctcctttcgtactgtttaaatcacaggaagaagcggctttaagacaaagatcaaaccaaaatgacaactgctcacttttactgtcaatactgcacagcatcacttcttgggaagaaatatgtactaaaggatgacagtccatactgtgttacatgttatgatcgtgtattttctaactattgcgaggaatgcaaaaaaccaattgaatctgattctaaggatctttgttacaaagaccggcactggcatgaaggatgcttcaagtgcaccaaatgcaatcactctttggtggaaaagccttttgctgccaaggatgagcgcctgctgtgcacggagtgctattctaacgagtgctcctccaagtgcttccactgcaagaggaccatcatgcctggttcccgcaaaatggaatttaagggaaactactggcatgaaacctgttttgtgtgtgagaattgccgacaacctatagggacaaagcctttgatctccaaagagagtggcaattattgtgtgccatgttttgagaaggagtttgctcactactgcaacttttgtaagaaggtgataacttcaggtgggataacattttgtgaccagctatggcataaagagtgttttctgtgtagtggctgtaggaaagatctctgtgaagaacagttcatgtccagagacgactatccattctgcgtggactgctacaaccatctttatgccaacaagtgtgtagcctgttccaaacccattagtggtctcacaggtgccaagtttatctgctttcaagacagccagtggcatagcgaatgctttaactgcgggaaatgctctgtctccttggtgggtaaaggcttcctgacccagaacaaggaaatcttctgccaaaaatgtggctccggaatggacactgacatctaggagacagtccttgcccacctaaaatccattttgccttcgttgtcactaaagccagaactcagttgcggtcttatttttgacttaagttttagaaaatattcatgtagtttagagtggaaaagtttttgcacacattttgatcgaactatattctaagcacacaaaaagcacagtagaacagaaatgaatatatgctaaatcacaaagacaactctccttgcaaaatactgcactctgctgttagaagcagaggaaaatatctcttcataatcaaatatatgacatatacctaggagctgtggatgtaattactgaagaatgaggtttttcatacctgaagagtaaaagaaaaactaagagatcaaactgagaggtatacatgaggctagtgtttgcattcctggttatatgtaatgtgataaattagctatgaatggtaaaagaacaaaactgatcagagtaaattcattagcaattatcacatttaagaattgttatcatttaaaaatcatcctttttttcacacatactgactgtagaattaaaaaacaaagctacaatttgccctcatacacactgcttccacagcttgctagttctgtgtttactcaatggaatatgagaactgaggacattatggctctcataatctgcataggtataaagaggatcatttctacctagggatagccaaagcatgggtttcaacacgttttgtattaaatatattttcaaagtccacagtgatttttctaaacgcttacagattccatgaaataaaagtctattctttcaa

SEQ ID NO: 289718 - DNA, 779 bp, Artificial Sequence
  derived and/or modified sequence
tgcaagtccagagagcagggaactaccttgagtattctactcaaacttatgtctcagagttccccaatttcccaagaagggagagatagaggccacaatccagggggccatctcttaaggtaccaataattttgcaggatcaaaccaaaatgacaactgctcacttttactgtcaatactgcacagcatcacttcttgggaagaaatatgtactaaaggatgacagtccatactgtgttacatgttatgatcgtgtattttctaactattgcgaggaatgcaaaaaaccaattgaatctgattctaaggatctttgttacaaagaccggcactggcatgaaggatgcttcaagtgcaccaaatgcaatcactctttggtggaaaagccttttgctgccaaggatgagcgcctgctgtgcacggagtgctattctaacgagtgctcctccaagtgcttccactgcaagaggaccatcatgcctggttcccgcaaaatggaatttaagggaaactactggcatgaaacctgttttgtgtgtgagaattgccgacaacctatagggacaaagcctttgatctccaaagagagtggcaattattgtgtgccatgttttgagaaggagtttgctcactactgcaacttttgtaagaaggtgataacttcaggtgggataacattttgtgaccagctatggcataaagagtgttttctgtgtagtggctgtaggaaagatctctgtgaagaacagttcatgtccagagacgactatccattctgc

SEQ ID NO: 289719 - DNA, 1904 bp, Artificial Sequence
  derived and/or modified sequence
aggaagcaggcagagcggggaaggctgagtccacactgcaagtccagagagcagggaactaccttgagtattctactcaaacttatgtctcagagttccccaatttcccaagaagggagagatagaggccacaatccagggggccatctcttaaggtaccaataattttgcaggatcaaaccaaaatgacaactgctcacttttactgtcaatactgcacagcatcacttcttgggaagaaatatgtactaaaggatgacagtccatactgtgttacatgttatgatcgtgtattttctaactattgcgaggaatgcaaaaaaccaattgaatctgattctaaggatctttgttacaaagaccggcactggcatgaaggatgcttcaagtgcaccaaatgcaatcactctttggtggaaaagccttttgctgccaaggatgagcgcctgctgtgcacggagtgctattctaacgagtgctcctccaagtgcttccactgcaagaggaccatcatgcctggttcccgcaaaatggaatttaagggaaactactggcatgaaacctgttttgtgtgtgagaattgccgacaacctatagggacaaagcctttgatctccaaagagagtggcaattattgtgtgccatgttttgagaaggagtttgctcactactgcaacttttgtaagaaggtgataacttcaggtgggataacattttgtgaccagctatggcataaagagtgttttctgtgtagtggctgtaggaaagatctctgtgaagaacagttcatgtccagagacgactatccattctgcgtggactgctacaaccatctttatgccaacaagtgtgtagcctgttccaaacccattagtggtctcacaggtgccaagtttatctgctttcaagacagccagtggcatagcgaatgctttaactgcgggaaatgctctgtctccttggtgggtaaaggcttcctgacccagaacaaggaaatcttctgccaaaaatgtggctccggaatggacactgacatctaggagacagtccttgcccacctaaaatccattttgccttcgttgtcactaaagccagaactcagttgcggtcttatttttgacttaagttttagaaaatattcatgtagtttagagtggaaaagtttttgcacacattttgatcgaactatattctaagcacacaaaaagcacagtagaacagaaatgaatatatgctaaatcacaaagacaactctccttgcaaaatactgcactctgctgttagaagcagaggaaaatatctcttcataatcaaatatatgacatatacctaggagctgtggatgtaattactgaagaatgaggtttttcatacctgaagagtaaaagaaaaactaagagatcaaactgagaggtatacatgaggctagtgtttgcattcctggttatatgtaatgtgataaattagctatgaatggtaaaagaacaaaactgatcagagtaaattcattagcaattatcacatttaagaattgttatcatttaaaaatcatcctttttttcacacatactgactgtagaattaaaaaacaaagctacaatttgccctcatacacactgcttccacagcttgctagttctgtgtttactcaatggaatatgagaactgaggacattatggctctcataatctgcataggtataaagaggatcatttctacctagggatagccaaagcatgggtttcaacacgttttgtattaaatatattttcaaagtccacagtgatttttctaaacgcttacagattccatgaaataaaagtctattctttcaagtggagctaaccaggataatctttgtccccaaaggcaaacctttaaaataaatagatcattaaatctt

SEQ ID NO: 289720 - DNA, 855 bp, Artificial Sequence
  derived and/or modified sequence
atgacaacagctcacttttactgccagtattgtaccgcaagcctcttgggtaagaaatacgtgctcaaggacgactccccatattgcgttacctgctacgatcgggtgttttcaaactactgcgaggaatgcaaaaagccgattgaatccgactccaaggacctatgctataaggaccggcactggcacgaggggtgctttaaatgcaccaagtgtaatcattcactcgtagaaaagccttttgctgccaaggatgaacgcctactatgcacagaatgttattccaacgaatgctcgtctaagtgtttccactgtaaacggaccatcatgccaggaagccgcaaaatggagttcaagggaaattattggcacgaaacctgttttgtgtgtgagaactgtagacagcctataggcaccaaaccgctgatcagtaaagaaagtggaaattattgcgtcccatgctttgagaaagagtttgcccactattgcaacttttgcaaaaaagttatcaccagtggcggcattacgttttgcgaccagttgtggcataaggaatgcttcctatgtagtggatgtcgcaaggacttgtgcgaggaacagttcatgagccgggacgactatccattctgcgttgactgttataatcatttatacgctaacaagtgcgtcgcctgctctaagcctatttccggactcacaggcgccaagttcatttgttttcaggactctcagtggcatagtgagtgttttaactgtggcaagtgcagcgttagcctggttggaaagggctttcttacccagaacaaagagatattttgtcaaaagtgtggaagcggcatggataccgatatatag

SEQ ID NO: 289721 - DNA, 633 bp, Artificial Sequence
  derived and/or modified sequence
atgacgacggctcatttctactgccagtactgcactgcctccctcctggggaaaaagtacgtcctgaaagatgattccccgtattgcgttacctgctacgatcgggtgttttccaactactgcgaggaatgcaaaaagcctattgagagtgacagcaaggacctttgttataaagaccggcactggcacgagggttgcttcaagtgcaccaaatgcaaccactccctggtggagaagcctttcgccgcaaaggatgaacggctcctttgcacagagtgctattccaatgagtgcagtagcaagtgcttccactgcaagaggaccatcatgccaggcagtcgaaaaatggaatttaaaggcaattactggcacgagacttgctttgtatgcgagaactgcaggcagccaattgggaccaagcctctgatttctaaggagtcaggcaactactgtgttccttgttttgagaaggagtttgcgcactactgcaatttttgcaagaaggtgatcacctctgggggcattacattctgcgaccaactatggcataaggagtgcttcctgtgttccggctgtaggaaggatctgtgtgaggagcaatttatgagccgcgatgattaccccttctgctag

SEQ ID NO: 289722 - DNA, 855 bp, Artificial Sequence
  derived and/or modified sequence
atgaccactgctcacttctactgccagtattgtaccgcctctctgcttgggaagaaatatgtgctcaaagacgatagcccatactgtgtgacctgctatgaccgcgtattttctaattattgcgaggagtgtaaaaagcccatcgaaagcgactcaaaggatctgtgttacaaggataggcactggcatgagggctgctttaagtgcaccaagtgtaaccattcccttgttgagaagccctttgctgccaaggacgaaagacttctttgtactgaatgttatagtaatgaatgctcttccaaatgctttcactgcaaaaggaccataatgccagggtctaggaaaatggagttcaagggaaactactggcatgaaacttgctttgtgtgcgagaactgccggcaaccaattggaacgaaacctctgatttctaaagagtcagggaactactgcgtgccctgttttgaaaaggagtttgcacactattgtaacttttgtaaaaaggtcatcacctccggaggcataacattctgcgatcagctatggcacaaggagtgcttcctttgcagcgggtgccggaaggacctctgtgaagaacaattcatgtcacgggacgattatccattctgtgttgactgctataatcacctgtacgcaaacaagtgtgtcgcctgttcaaagcctattagcggcctgaccggcgccaagtttatttgtttccaggatagccagtggcactcagagtgttttaactgcggtaagtgctccgtcagtctagtcggcaaaggattcttgacccaaaacaaagaaattttctgtcagaaatgcggaagcggaatggataccgacatctag

SEQ ID NO: 289723 - DNA, 855 bp, Artificial Sequence
  derived and/or modified sequence
atgaccacagcccacttctactgccagtactgcacagccagcctgctgggcaagaagtatgtgctgaaggatgacagcccctactgtgtgacctgctatgacagagtcttcagcaactactgtgaggagtgcaagaagcccatcgagagtgacagcaaggacctgtgctacaaggacagacactggcatgagggctgcttcaagtgcaccaagtgcaaccacagcctggtggagaagccctttgctgccaaggatgagcggctgctgtgcacagagtgctacagcaatgaatgtagcagcaagtgcttccactgcaagaggaccatcatgcctggcagcaggaagatggagttcaagggcaactactggcatgagacctgctttgtgtgtgagaactgccggcagcccatcggcaccaagcccctcatcagcaaggagagcggcaactactgtgtgccctgctttgagaaggagtttgcccactactgcaacttctgcaagaaggtgatcaccagcggcggcatcaccttctgtgaccagctgtggcacaaggagtgcttcctgtgcagcggctgcaggaaggacctgtgtgaggagcagttcatgagcagagatgactaccccttctgtgtggactgctacaaccacctgtatgccaacaagtgtgtggcctgcagcaagcccatcagcggcctgactggagccaagttcatctgcttccaggacagccagtggcacagcgagtgcttcaactgtgggaagtgcagcgtgtccctggtgggcaagggcttcctgacccagaacaaggagatcttctgccagaagtgtggcagcggcatggacacagacatctag

SEQ ID NO: 289724 - DNA, 633 bp, Artificial Sequence
  derived and/or modified sequence
atgaccacagcccacttctactgccagtactgcacagccagcctgctgggcaagaagtatgtgctgaaggatgacagcccctactgtgtgacctgctatgacagagtcttcagcaactactgtgaggagtgcaagaagcccatcgagagtgacagcaaggacctgtgctacaaggacagacactggcatgagggctgcttcaagtgcaccaagtgcaaccacagcctggtggagaagccctttgctgccaaggatgagcggctgctgtgcacagagtgctacagcaatgaatgtagcagcaagtgcttccactgcaagaggaccatcatgcctggcagcaggaagatggagttcaagggcaactactggcatgagacctgctttgtgtgtgagaactgccggcagcccatcggcaccaagcccctcatcagcaaggagagcggcaactactgtgtgccctgctttgagaaggagtttgcccactactgcaacttctgcaagaaggtgatcaccagcggcggcatcaccttctgtgaccagctgtggcacaaggagtgcttcctgtgcagcggctgcaggaaggacctgtgtgaggagcagttcatgagcagagatgactaccccttctgctag

SEQ ID NO: 289725 - DNA, 855 bp, Artificial Sequence
  derived and/or modified sequence
atgaccaccgcccacttctactgccagtactgcaccgccagcctgctgggtaagaagtacgttctgaaggatgactccccatactgtgtgacctgctacgatagggtgttttctaactattgtgaagaatgcaagaagccaattgaatctgactctaaagacttgtgttacaaagacagacactggcatgagggttgttttaaatgtacaaagtgcaaccatagtcttgtagagaagcctttcgcggcgaaagatgaaagattgctgtgcactgaatgctacagcaatgaatgctcctccaaatgttttcattgcaaaagaacaatcatgccaggcagccggaaaatggaattcaagggcaattattggcatgaaacatgttttgtgtgtgaaaattgccgacagcccataggtactaaaccgctgatttccaaagaatccggaaactactgtgtcccttgctttgaaaaagagttcgcccattattgcaatttctgtaaaaaagtgattaccagcggcggtataacgttttgcgaccaactgtggcataaagagtgttttttatgtagcggctgcaggaaggatctgtgtgaagaacagtttatgagccgcgacgattatccattctgcgtggactgttataaccacctgtatgcaaataaatgtgttgcctgcagcaagcctatctccgggcttacaggcgccaaattcatttgttttcaggattcccagtggcacagcgagtgttttaattgtgggaagtgttctgtgtctcttgtggggaaaggatttctgactcaaaacaaggaaattttttgccagaaatgcggtagcgggatggataccgatatttag

SEQ ID NO: 289726 - DNA, 633 bp, Artificial Sequence
  derived and/or modified sequence
atgaccaccgcccacttctactgccagtactgcaccgccagcctgctcggaaagaagtacgtattgaaggatgacagtccatactgtgtgacgtgctacgacagagtattttctaattattgcgaagaatgtaaaaaacccattgaaagcgactctaaagacctgtgctataaggacagacattggcacgaggggtgtttcaaatgcactaaatgcaaccattccctcgttgagaagcccttcgcagccaaagacgagaggctgctgtgcacagagtgttattctaatgagtgctcatcgaagtgtttccattgtaagcgcacaatcatgcccggttcgagaaagatggaatttaaaggcaattattggcacgagacttgttttgtctgcgaaaactgccggcagccaatcggcacaaagcccttaattagtaaagagtcagggaattattgtgtgccatgtttcgagaaggagtttgctcattactgtaacttctgtaagaaagtgataactagtggcggcatcacattctgcgaccagctttggcacaaagagtgttttctgtgcagtgggtgtagaaaggatctctgcgaggagcaattcatgtctcgagatgattaccccttttgttag

SEQ ID NO: 289727 - DNA, 855 bp, Artificial Sequence
  derived and/or modified sequence
atgaccaccgcccacttctactgccagtactgcaccgccagcctgttagggaagaaatacgttttaaaggacgattctccatactgtgtgacttgctatgaccgggtattctccaactactgtgaggagtgcaagaagccgatagaatcagattccaaagatctgtgctataaggatcgccactggcacgaaggctgttttaaatgtacgaaatgcaatcattctctggtagagaaaccttttgccgccaaggacgaacgcctgctctgtacagaatgctacagcaatgagtgtagcagtaaatgtttccactgcaagcggacaatcatgcccggcagtcgcaagatggaatttaagggaaattactggcacgagacctgctttgtttgtgagaattgccgacagccaattggtacaaagcccttaatctctaaggagtcagggaattactgcgtcccatgcttcgagaaggagttcgcccattactgcaatttctgtaagaaagtaataacaagtggcggtattactttttgcgaccagctgtggcacaaggagtgttttctgtgctccgggtgccgaaaagatttgtgcgaggagcagttcatgtcccgggatgattatcctttctgcgttgattgctacaatcacctttatgcgaacaaatgcgttgcatgcagcaagcctatttctggattaaccggagctaagttcatttgttttcaggacagccagtggcactctgaatgtttcaattgcggaaaatgtagcgtctccttggtcggcaaaggttttttgacacagaacaaggaaatcttttgtcagaaatgcggctccgggatggacacagatatatag

SEQ ID NO: 289728 - DNA, 855 bp, Artificial Sequence
  derived and/or modified sequence
atgactaccgcccacttttactgtcagtattgtaccgcctcactgctcgggaaaaagtatgtcctcaaggacgatagcccctactgcgtgacttgctacgacagagtgttctcaaactattgtgaggaatgtaagaaacccatcgaatcagatagcaaagacctgtgttataaggataggcactggcatgaaggttgctttaagtgcaccaagtgcaatcatagtctggtggaaaagcccttcgctgccaaagatgaacggctgctttgtacggaatgctacagcaacgagtgcagctctaagtgtttccattgtaagagaactatcatgcctggctctcgcaagatggagtttaagggcaactattggcatgagacctgtttcgtgtgcgagaattgtcggcaaccgatagggactaaacctctaatatcaaaagaatcgggtaattattgtgttccctgctttgaaaaggagttcgcacactattgtaatttctgcaagaaagttatcacctccggtggcattacattctgcgatcagttatggcacaaggaatgtttcctatgttcaggttgccggaaggacctgtgtgaagagcaatttatgtccagagacgactaccctttttgtgtggactgctataaccatctctacgcaaacaagtgtgtggcttgcagtaaaccgatatccggtttgactggtgccaaattcatatgctttcaagatagccagtggcatagcgagtgcttcaattgtggtaaatgcagcgtatctttagtgggcaagggctttctgacccagaacaaggagattttttgtcagaaatgtgggtctggcatggatactgacatatag

SEQ ID NO: 289729 - DNA, 633 bp, Artificial Sequence
  derived and/or modified sequence
atgaccaccgcccacttttattgtcaatactgcacagcgtctcttctgggcaagaagtatgtgctaaaggatgattctccttattgcgtgacgtgctatgaccgagtttttagcaactattgtgaagaatgcaagaagccaattgaatcagattcaaaggacttatgttacaaggatcggcactggcatgaaggctgtttcaaatgtaccaaatgcaaccactccctagtagagaaacctttcgctgctaaagacgaacggttgttatgtaccgagtgttactccaatgaatgctcctcaaagtgcttccattgtaaacggaccatcatgcccggtagtagaaagatggaatttaaggggaactattggcatgagacatgctttgtgtgcgaaaactgcagacagccaatcggtacaaagccactgatttccaaggagtccgggaattactgtgtcccttgtttcgaaaaagaatttgctcattattgcaacttttgtaagaaagttattacatccggcggaatcacattctgtgatcagttgtggcataaagaatgctttttgtgttcgggctgcaggaaagatctttgcgaggaacagtttatgtcccgggacgactacccgttttgctag

SEQ ID NO: 289730 - DNA, 855 bp, Artificial Sequence
  derived and/or modified sequence
atgaccaccgcccatttctactgtcagtactgtaccgcatccctgttaggcaagaaatacgtgctgaaggatgatagcccctactgtgtgacttgttacgaccgagtgttttctaattactgcgaagagtgtaaaaagcccatagagtctgactccaaggacctctgttacaaggatcggcactggcatgagggctgttttaagtgcaccaagtgtaatcactctctggtggagaaaccattcgccgcaaaagacgagagactgctgtgtactgagtgctactcaaacgagtgttctagcaagtgctttcactgtaagagaaccatcatgcccggatcccgaaagatggaattcaaaggcaattattggcatgaaacgtgctttgtgtgtgagaattgtcgccagcccatcggaaccaagcctttgattagcaaagagtctgggaactactgcgtgccgtgcttcgagaaagagtttgcccactactgtaatttctgtaagaaagtcataacaagtggtgggatcactttctgtgaccagctgtggcacaaagaatgctttctgtgctccgggtgcagaaaggacctgtgtgaagaacagttcatgagcagagacgattacccgttctgtgtcgactgctataaccatctatacgcaaataagtgtgtggcttgttccaaacccatctcggggctgacgggggctaaattcatttgctttcaagattctcagtggcactccgagtgttttaactgtggaaagtgttctgtgtcattagtaggcaaggggttcctgacccagaacaaggagatattttgccagaaatgcggctcaggcatggatactgatatttag

SEQ ID NO: 289731 - DNA, 855 bp, Artificial Sequence
  derived and/or modified sequence
atgaccaccgcccacttctactgccagtactgcaccgccagcctgctgggcaagaagtacgtgctgaaggacgacagcccctactgcgtgacctgctacgacagagtgttcagcaactactgcgaggagtgcaagaagcccatcgagagcgacagcaaggacctgtgctacaaggacagacactggcacgagggctgcttcaagtgcaccaagtgcaaccacagcctggtggagaagcccttcgccgccaaggacgagagactgctgtgcaccgagtgctacagcaacgagtgcagcagcaagtgcttccactgcaagagaaccatcatgcccggcagcagaaagatggagttcaagggcaactactggcacgagacctgcttcgtgtgcgagaactgcagacagcccatcggcaccaagcccctgatcagcaaggagagcggcaactactgcgtgccctgcttcgagaaggagttcgcccactactgcaacttctgcaagaaggtgatcaccagcggcggcatcaccttctgcgaccagctgtggcacaaggagtgcttcctgtgcagcggctgcagaaaggacctgtgcgaggagcagttcatgagcagagacgactaccccttctgcgtggactgctacaaccacctgtacgccaacaagtgcgtggcctgcagcaagcccatcagcggcctgaccggcgccaagttcatctgcttccaggacagccagtggcacagcgagtgcttcaactgcggcaagtgcagcgtgagcctggtgggcaagggcttcctgacccagaacaaggagatcttctgccagaagtgcggcagcggcatggacaccgacatctag

SEQ ID NO: 289732 - DNA, 633 bp, Artificial Sequence
  derived and/or modified sequence
atgaccaccgcccacttctactgccagtactgcaccgccagcctgctgggcaagaagtacgtgctgaaggacgacagcccctactgcgtgacctgctacgacagagtgttcagcaactactgcgaggagtgcaagaagcccatcgagagcgacagcaaggacctgtgctacaaggacagacactggcacgagggctgcttcaagtgcaccaagtgcaaccacagcctggtggagaagcccttcgccgccaaggacgagagactgctgtgcaccgagtgctacagcaacgagtgcagcagcaagtgcttccactgcaagagaaccatcatgcccggcagcagaaagatggagttcaagggcaactactggcacgagacctgcttcgtgtgcgagaactgcagacagcccatcggcaccaagcccctgatcagcaaggagagcggcaactactgcgtgccctgcttcgagaaggagttcgcccactactgcaacttctgcaagaaggtgatcaccagcggcggcatcaccttctgcgaccagctgtggcacaaggagtgcttcctgtgcagcggctgcagaaaggacctgtgcgaggagcagttcatgagcagagacgactaccccttctgctag

SEQ ID NO: 289733 - protein, 148 aa, Artificial Sequence
  derived and/or modified sequence
  misc_feature (1)..(1): Xaa can be any naturally occurring amino acid
XATLRLYFDDTGCWDMNDSTALWWVIKGPVVGSIMVNFVLFIGIIVILVQKLQSPDMGGNESSIYLTNLSPRVPKKAREDPLPVPSDQHSLPFLRLARSTLLLIPLFGIHYTVFAFSPENVSKRERLVFELGLGSFQGFVVAVLYCFL

SEQ ID NO: 289734 - DNA, 447 bp, Artificial Sequence
  derived and/or modified sequence
taggcaacgttaagactctatttcgatgacactggatgttgggacatgaatgattccactgccctctggtgggtcatcaaaggaccggttgtaggtagcatcatggtgaattttgtcctcttcatcgggatcatagtgattctggtgcaaaaactgcagtcacctgacatgggcggcaatgagagttccatctaccttacaaacctcagcccgcgtgtgcccaaaaaggcacgggaggatcctttgcctgtgccatccgaccagcacagtcttccatttttacgtttagctcgcagcactctgctgctcatccccctgttcgggatccactacaccgtgttcgcattttccccagagaatgtatcaaaacgggagcgattggtattcgaactgggtctcgggtcctttcaaggtttcgtggttgctgtcctgtactgttttctgtag

SEQ ID NO: 289735 - DNA, 441 bp, Artificial Sequence
  derived and/or modified sequence
ggctacgctgagactctactttgatgacacaggctgctgggatatgaatgacagcacagctctgtggtgggtgatcaaaggccctgtggttggctctatcatggttaactttgtgctttttattggcattatcgtcatccttgtgcagaaacttcagtctccagacatgggaggcaatgagtccagcatctacttaacaaatttaagcccgcgagtccccaagaaagcccgagaggaccccctgcctgtgccctcagaccagcattcactccctttcctgcgactggcccggtccaccctgctgctcatcccactattcggaatccactacacagtatttgccttctccccagagaatgtcagcaaaagggaaagactcgtgtttgagctggggctgggctccttccagggctttgtggtggctgttctctactgttttct

SEQ ID NO: 289736 - DNA, 447 bp, Artificial Sequence
  derived and/or modified sequence
tgagccaccctgcggctgtactttgatgacaccggctgctgggacatgaatgacagcacagccctgtggtgggtgatcaagggccctgtggtgggcagcatcatggtgaactttgtgctcttcatcggcatcatcgtcatcctggtgcagaagctgcagagcccagacatgggcggcaatgaaagcagcatctacctgaccaacctgagcccccgggtgcccaagaaggcccgggaggaccccctgcctgtgcccagcgaccagcacagcctgcccttcctgcggctggcccggagcaccctgctgctgatccccctgtttggcatccactacacagtgtttgccttctccccagaaaatgtgtccaagcgggagcggctggtgtttgagctgggcctgggcagcttccagggctttgtggtggccgtgctgtactgcttcctgtag

SEQ ID NO: 289737 - DNA, 447 bp, Artificial Sequence
  derived and/or modified sequence
tgagccaccctgcggctgtacttcgacgacaccggctgctgggacatgaacgattccacggcattgtggtgggtgatcaagggacctgtggtgggctctatcatggttaactttgtgctctttataggcatcattgtcatccttgtacaaaaacttcagagcccggacatgggtggtaacgaatcctccatctacctgacaaatctgtctccccgcgtgcctaagaaagccagggaggatcctcttccagtaccatccgaccagcacagcctacctttcctgaggctagctaggtcaaccctcctccttatacctttatttgggatccactacaccgtctttgccttttctcccgaaaatgtgagtaaacgtgaacgacttgtctttgagttgggattggggtcttttcaggggtttgtcgtagctgtgctgtattgctttctgtag

SEQ ID NO: 289738 - DNA, 447 bp, Artificial Sequence
  derived and/or modified sequence
taggcgacactccgactatatttcgacgacactggttgttgggacatgaatgattccacggcgctttggtgggtgatcaaaggcccagtggtgggctctatcatggtcaactttgtgctcttcatcggtatcatcgtcattctggtgcagaagctgcaatccccagacatgggagggaacgagtcctccatctaccttactaacctgtcacctcgcgttcccaagaaagctagagaagatccactaccagtaccctcagatcagcatagcctgcccttcttgaggctcgctaggagcaccctgctgctcatacccttgtttggtatccattatactgtgtttgcattcagtcctgagaatgtctctaagcgggagcgtctggtcttcgagctaggtctcggttcgttccagggcttcgtggtagcagtgctgtactgtttcctgtag

SEQ ID NO: 289739 - DNA, 447 bp, Artificial Sequence
  derived and/or modified sequence
tgagccaccctgagactgtacttcgacgacaccggctgctgggacatgaacgacagcaccgccctgtggtgggtgatcaagggccccgtggtgggcagcatcatggtgaacttcgtgctgttcatcggcatcatcgtgatcctggtgcagaagctgcagagccccgacatgggcggcaacgagagcagcatctacctgaccaacctgagccccagagtgcccaagaaggccagagaggaccccctgcccgtgcccagcgaccagcacagcctgcccttcctgagactggccagaagcaccctgctgctgatccccctgttcggcatccactacaccgtgttcgccttcagccccgagaacgtgagcaagagagagagactggtgttcgagctgggcctgggcagcttccagggcttcgtggtggccgtgctgtactgcttcctgtag

SEQ ID NO: 289740 - protein, 530 aa, Artificial Sequence
  derived and/or modified sequence
MGSVGSQRLEEPSVAGTPDPGVVMSFTFDSHQLEEAAEAAQGQGLRARGVPAFTDTTLDEPVPDDRYHAIYFAMLLAGVGFLLPYNSFITDVDYLHHKYPGTSIVFDMSLTYILVALAAVLLNNVLVERLTLHTRITAGYLLALGPLLFISICDVWLQLFSRDQAYAINLAAVGTVAFGCTVQQSSFYGYTGMLPKRYTQGVMTGESTAGVMISLSRILTKLLLPDERASTLIFFLVSVALELLCFLLHLLVRRSRFVLFYTTRPRDSHRGRPGLGRGYGYRVHHDVVAGDVHFEHPAPALAPNESPKDSPAHEVTGSGGAYMRFDVPRPRVQRSWPTFRALLLHRYVVARVIWADMLSIAVTYFITLCLFPGLESEIRHCILGEWLPILIMAVFNLSDFVGKILAALPVDWRGTHLLACSCLRVVFIPLFILCVYPSGMPALRHPAWPCIFSLLMGISNGYFGSVPMILAAGKVSPKQRELAGNTMTVSYMSGLTLGSAVAYCTYSLTRDAHGSCLHASTANGSILAGL

SEQ ID NO: 289741 - protein, 163 aa, Artificial Sequence
  derived and/or modified sequence
MGSVGSQRLEEPSVAGTPDPGVVMSFTFDSHQLEEAAEAAQGQGLRARGVPAFTDTTLDEPVPDDRYHAIYFAMLLAGVGFLLPYNSFITDVDYLHHKYPGTSIVFDMSLTYILVALAAVLLNNVLVERLTLHTRITAGYLLALGPLLFISICDVWLQLFSRD

SEQ ID NO: 289742 - DNA, 1593 bp, Artificial Sequence
  derived and/or modified sequence
atgggcagcgtgggcagccagagactggaggagcccagcgtggccggcacccccgaccccggcgtggtgatgagcttcaccttcgacagccaccagctggaggaggccgccgaggccgcccagggccagggcctgagagccagaggcgtgcccgccttcaccgacaccaccctggacgagcccgtgcccgacgacagataccacgccatctacttcgccatgctgctggccggcgtgggcttcctgctgccctacaacagcttcatcaccgacgtggactacctgcaccacaagtaccccggcaccagcatcgtgttcgacatgagcctgacctacatcctggtggccctggccgccgtgctgctgaacaacgtgctggtggagagactgaccctgcacaccagaatcaccgccggctacctgctggccctgggccccctgctgttcatcagcatctgcgacgtgtggctgcagctgttcagcagagaccaggcctacgccatcaacctggccgccgtgggcaccgtggccttcggctgcaccgtgcagcagagcagcttctacggctacaccggcatgctgcccaagagatacacccagggcgtgatgaccggcgagagcaccgccggcgtgatgatcagcctgagcagaatcctgaccaagctgctgctgcccgacgagagagccagcaccctgatcttcttcctggtgagcgtggccctggagctgctgtgcttcctgctgcacctgctggtgagaagaagcagattcgtgctgttctacaccaccagacccagagacagccacagaggcagacccggcctgggcagaggctacggctacagagtgcaccacgacgtggtggccggcgacgtgcacttcgagcaccccgcccccgccctggcccccaacgagagccccaaggacagccccgcccacgaggtgaccggcagcggcggcgcctacatgagattcgacgtgcccagacccagagtgcagagaagctggcccaccttcagagccctgctgctgcacagatacgtggtggccagagtgatctgggccgacatgctgagcatcgccgtgacctacttcatcaccctgtgcctgttccccggcctggagagcgagatcagacactgcatcctgggcgagtggctgcccatcctgatcatggccgtgttcaacctgagcgacttcgtgggcaagatcctggccgccctgcccgtggactggagaggcacccacctgctggcctgcagctgcctgagagtggtgttcatccccctgttcatcctgtgcgtgtaccccagcggcatgcccgccctgagacaccccgcctggccctgcatcttcagcctgctgatgggcatcagcaacggctacttcggcagcgtgcccatgatcctggccgccggcaaggtgagccccaagcagagagagctggccggcaacaccatgaccgtgagctacatgagcggcctgaccctgggcagcgccgtggcctactgcacctacagcctgaccagagacgcccacggcagctgcctgcacgccagcaccgccaacggcagcatcctggccggcctgtag

SEQ ID NO: 289743 - DNA, 492 bp, Artificial Sequence
  derived and/or modified sequence
atgggcagcgtgggcagccagagactggaggagcccagcgtggccggcacccccgaccccggcgtggtgatgagcttcaccttcgacagccaccagctggaggaggccgccgaggccgcccagggccagggcctgagagccagaggcgtgcccgccttcaccgacaccaccctggacgagcccgtgcccgacgacagataccacgccatctacttcgccatgctgctggccggcgtgggcttcctgctgccctacaacagcttcatcaccgacgtggactacctgcaccacaagtaccccggcaccagcatcgtgttcgacatgagcctgacctacatcctggtggccctggccgccgtgctgctgaacaacgtgctggtggagagactgaccctgcacaccagaatcaccgccggctacctgctggccctgggccccctgctgttcatcagcatctgcgacgtgtggctgcagctgttcagcagagactag

SEQ ID NO: 289744 - DNA, 1593 bp, Artificial Sequence
  derived and/or modified sequence
atgggatcagttgggtcacagagactcgaggaacctagtgtggccggcactcccgatcccggcgtagtaatgagcttcacattcgactcgcatcagctggaggaggctgcagaggcggcccagggtcaggggttgagggctaggggagttcccgcatttacagataccacccttgacgagcccgtacccgacgacaggtatcacgccatctactttgccatgcttctcgcaggcgtcgggtttctgttgccctataacagctttattacagatgtggactacctccatcataaatatccagggacctctattgtcttcgacatgtctctaacgtatatacttgtggcactcgccgctgtattgctcaacaacgtgttggtggaacggctcaccctgcacacacggatcaccgccggctatttgctggccttgggtccactgttgttcatttccatttgcgacgtgtggcttcagctgttttcgagagaccaagcctacgccatcaatttggcagcggtcggaacagtggcctttgggtgtactgtgcagcagagctcattttatggctacaccggaatgttaccaaaaagatacacccaaggcgtcatgaccggagaatccacagcgggcgtaatgattagcctctccaggatattgactaagctgctcctgccagacgagcgtgccagcacacttatattctttctggtgtctgtagccctggaactgctgtgttttctactgcatcttctcgtgaggcgatcccgattcgtgctgttctataccacccggcctagagactctcacagggggcggccaggactgggccgggggtatggctatcgggtgcaccacgacgtggtcgcaggcgatgtgcactttgagcatcctgcccctgctctcgcccccaacgaatcccccaaagactcgcccgctcacgaagtcactggcagcgggggcgcctatatgaggttcgacgtcccaagaccgagagttcagagaagttggccgaccttccgtgccttgctgctgcatcggtatgtcgtcgctcgggtgatctgggctgacatgctatctatcgccgtaacttattttataactttatgtctgttccccggtctcgagtccgagatcagacactgcatactcggagaatggttgcccattcttatcatggcggtttttaacctatccgatttcgtggggaagatccttgcagctctgcccgtcgactggaggggtacacaccttttggcgtgttcatgcctgagagtggtctttatcccactgtttatcctgtgtgtttatccttcggggatgcccgcactgcgccaccctgcctggccctgcatcttctcattgttgatggggatctccaacgggtacttcggatccgtgcctatgatcctcgccgcagggaaggtgtctcccaagcagagggagctcgccggcaacactatgactgtgagctacatgtcaggattgaccctcggctccgccgtggcctactgcacctacagcctgactcgcgacgcgcatggttcttgtttgcatgcatccactgcaaatgggagcattctcgccgggctctag

SEQ ID NO: 289745 - DNA, 1593 bp, Artificial Sequence
  derived and/or modified sequence
atgggctcggtggggagccaacgcctggaggagcccagcgtggcaggaaccccggatccaggagtcgtaatgagctttaccttcgattctcaccagctcgaagaggccgccgaagctgcacaaggccaagggttaagagcaagaggggttccagctttcactgacaccacacttgacgaaccagttccagacgatagataccacgccatatattttgcgatgctgcttgctggggttgggttcttgcttccttataacagtttcattaccgacgtggattacctgcatcacaaataccccgggaccagtatcgtatttgacatgtcgttgacatatattctggtggctcttgccgcggtgctgctcaataatgtgttggtggaacggctgactctgcatacccgcatcactgcgggttatctacttgctttaggcccactgctctttatcagcatatgcgatgtgtggctgcagttatttagcagggaccaggcatatgctatcaatctggccgccgtcggcactgtcgctttcggctgcacggtccagcagagctccttctacgggtatacgggtatgctgcctaagcgctatacacaaggagtaatgactggtgagtctaccgcaggcgtgatgatctctctctctcgaatcctcacaaagctgctactccccgatgaaagggccagcaccctgatctttttcctcgtctccgtggcactggaactgttatgtttcctcctgcatctgctcgtgcgcaggtcaaggttcgtgttgttttatactacgaggccaagagattcccacaggggcagaccagggcttggccgggggtacggttatcgcgtacaccacgacgtggtggctggcgatgtccattttgagcatccagctcctgccctggctcccaatgaatctccaaaggacagtcccgcacacgaggtaaccggcagcgggggcgcctacatgagatttgacgtccctcgcccaagggtgcagagatcttggcccacatttcgggccttattgctccaccgatacgttgttgcacgcgtgatatgggcagacatgctgagcatcgcagtgacttacttcatcacactctgtctgttcccgggcttagagtctgagatccgccactgtattctgggggaatggttgcctatcctgattatggcggtgtttaatctgtctgacttcgttggaaagatcctggcagccctgcccgtcgactggcgtggaacgcaccttctggcttgttcatgtctgcgcgtggtgttcatccccctgttcatcctctgtgtctatcccagcggtatgcctgcactccgtcacccagcttggccgtgcatcttctccctcctcatgggcataagtaacggctattttggctctgtgccaatgattttagcagctggcaaggtctcacctaaacaacgggagctcgctggcaatacaatgacagtttcttatatgtccgggttaaccctgggaagcgccgtggcttactgcacttattccttgacccgggacgcccacgggagttgtctacatgccagcacagctaacggaagcatcctggcggggctctag

SEQ ID NO: 289746 - DNA, 492 bp, Artificial Sequence
  derived and/or modified sequence
atggggtctgtcggcagccagcggctggaggaacccagcgtagccggaactcccgaccccggagtggtgatgagttttacctttgactctcatcagcttgaggaggcggccgaagccgcacagggccaggggctcagagcaagaggtgtgccggcatttacagatactacgctagatgaaccagtaccggacgaccgataccatgcaatttactttgccatgctgttagcgggcgtcggattcttgctgccatacaatagtttcatcaccgacgttgattatttgcaccataaatatcccgggacctccatcgtatttgatatgtctctgacctacattcttgtagctctggcagccgtgctactgaacaacgtgcttgtagaacgcctaacccttcacactcggatcaccgcaggctacctcttggccctcggtccattgctcttcatttcaatctgtgacgtatggctccagttgttctccagagattag

SEQ ID NO: 289747 - DNA, 1593 bp, Artificial Sequence
  derived and/or modified sequence
atgggctctgtgggcagccagaggctggaggagcccagcgtggccggcaccccagaccccggggtggtgatgtccttcacctttgacagccaccagctggaggaggccgctgaggccgcccagggccagggcctgcgggcccggggcgtgcctgccttcacagacaccaccctggatgagcctgtgcctgatgaccgctaccacgccatctactttgccatgctgctggccggcgtgggcttcctgctgccctacaacagcttcatcacagatgtggactacctgcaccacaagtacccaggcaccagcatcgtgtttgacatgagcctgacctacatcctggtggccctggccgctgtgctgctgaacaacgtgctggtggagcggctgaccctgcacacccgcatcacagctggctacctgctggccctgggccccctgctcttcatcagcatctgtgatgtgtggctgcagctgttcagccgggaccaggcctatgccatcaacctggccgctgtgggcaccgtggccttcggctgcaccgtgcagcagagcagcttctacggctacacaggcatgctgcccaagcgctacacccagggcgtgatgaccggggagagcacagctggggtgatgatcagcctgagccgcatcctgaccaagctgctgctgcctgatgagcgggccagcaccctcatcttcttcctggtgtctgtggccctggagctgctgtgcttcctgctgcacctgctggtgagaagaagcagatttgtgctcttctacaccacccggccccgggacagccaccggggccggcccggcctgggccggggctacggctacagagtgcaccatgatgtggtggccggagatgtgcactttgagcacccagccccagccctggccccaaatgaaagccccaaggacagccctgcccacgaggtgacaggcagcggcggggcctacatgagatttgatgtgccccggccccgggtgcagaggtcctggcccaccttccgggccctgctgctgcacagatatgtggtggcccgggtcatctgggccgacatgctgagcattgctgtgacctacttcatcaccctgtgcctcttccctggcctggagagcgagatccgccactgcatcctgggggagtggctgcccatcctgatcatggctgtgttcaacctgagtgactttgtgggcaagatcctggccgccctgcctgtggactggaggggcacccacctgctggcctgcagctgcctgcgggtggtgttcatccccctcttcatcctgtgtgtgtaccccagcggcatgcctgccctgcggcacccagcctggccctgcatcttcagcctgctgatgggcatcagcaatggctactttggatctgtgcccatgatcctggccgccggcaaggtgagccccaagcagcgggagctggccggcaacaccatgacagtgtcctacatgagcggcctgaccctgggcagcgctgtggcctactgcacctacagcctgaccagagatgcccacggcagctgcctgcacgccagcacagccaacggcagcatcctggccggcctgtag

SEQ ID NO: 289748 - DNA, 492 bp, Artificial Sequence
  derived and/or modified sequence
atgggctctgtgggcagccagaggctggaggagcccagcgtggccggcaccccagaccccggggtggtgatgtccttcacctttgacagccaccagctggaggaggccgctgaggccgcccagggccagggcctgcgggcccggggcgtgcctgccttcacagacaccaccctggatgagcctgtgcctgatgaccgctaccacgccatctactttgccatgctgctggccggcgtgggcttcctgctgccctacaacagcttcatcacagatgtggactacctgcaccacaagtacccaggcaccagcatcgtgtttgacatgagcctgacctacatcctggtggccctggccgctgtgctgctgaacaacgtgctggtggagcggctgaccctgcacacccgcatcacagctggctacctgctggccctgggccccctgctcttcatcagcatctgtgatgtgtggctgcagctgttcagccgggactag

SEQ ID NO: 289749 - DNA, 1593 bp, Artificial Sequence
  derived and/or modified sequence
atgggcagcgtgggcagccagcggctggaggagcccagcgtggccggcacccccgaccccggcgtggtaatgagctttacctttgactcccaccagcttgaggaggctgcagaagcggcgcagggacagggcttgagagcgcggggcgtaccggcattcacagataccaccctcgatgagcctgtacccgatgatagataccatgctatctacttcgccatgttgctggctggcgttggcttcctgttgccctacaactctttcattacggatgtcgattacctccaccataagtaccctgggacatccatcgttttcgacatgtcactaacctacatcctggtcgccctagccgccgttctgctcaacaacgttttggtggaacggctcaccctgcacacaagaatcaccgcaggctatctgctggcgctggggccattgctgtttatttccatttgcgacgtctggctgcagctattttcccgcgaccaggcctacgcgataaaccttgctgctgtgggcacagtcgcattcgggtgcacagtgcaacagtccagcttttacggctacacaggaatgctccctaagagatacactcagggcgtgatgaccggggaaagcacagcgggtgtgatgatcagcctctcccgcattctgacaaagctgttgctccctgacgaaagagcctcaacgctgattttctttctggtgtcagtcgcccttgaactcctgtgtttcttgctgcacctgctggtgagacgcagccgcttcgttttgttttacacgacgcgccctcgcgactcacaccgcggccggcccggactgggtcgaggatacgggtaccgcgtccaccatgacgtggtggccggcgacgtacacttcgagcacccagctccagcgctcgctccaaacgagtctcctaaggatagcccagcacacgaggtcacaggaagtggcggcgcatacatgcgcttcgatgtccccaggccccgcgtacaacgctcgtggcctacttttagggccctactcctacaccggtatgtggtggcccgcgttatctgggccgatatgctaagtattgccgtaacttactttattaccctttgtctcttccccgggcttgagagcgagatcaggcactgcatcctcggagagtggctgcctatccttataatggcggtttttaacctgtctgacttcgtaggaaagatccttgccgccctcccagtcgattggagaggcacacacctcctggcctgttcatgcctgcgcgtcgtgtttatccctcttttcattctgtgtgtgtacccaagcggaatgcccgcccttagacacccagcatggccttgtatcttctctcttctgatgggaatctccaatggatactttggttctgtgcccatgattcttgccgccgggaaggtgtcaccaaaacaacgcgaattggccggaaatactatgacagttagctacatgtcaggcctgacacttggtagtgccgttgcttactgcacgtattcactcacgagagacgctcacgggagctgtttgcacgcatccacggcaaatgggtccatcttagccggcctgtag

SEQ ID NO: 289750 - DNA, 1593 bp, Artificial Sequence
  derived and/or modified sequence
atgggcagcgtgggcagccagcggctggaggagcccagcgtggccggaacacctgatcccggggttgtgatgagtttcacctttgactcacaccagttggaggaagccgccgaggctgcccaaggtcagggcctgagagcgcggggggtcccagcgtttacagacacaacactggatgaaccagtgccggacgaccggtaccacgcgatttattttgcaatgctgttggccggtgtcgggttcctattgccctataactccttcatcaccgatgtcgattacctccaccataaataccccggcaccagtatagtgtttgatatgagtttaacctatatcctcgtggccctggctgcagtgctcttgaataacgtcttagtagaacggctgactttgcatacaaggatcacggccggctatcttttggctctgggtccgctgttatttatatcaatctgtgacgtatggttacagttgttcagcagggatcaggcatatgctatcaatctcgccgctgtggggactgtcgcttttggctgcacggtccagcaatcatccttctacgggtacacagggatgttacctaaaagatacacacaaggcgtgatgaccggagaatcaaccgcaggcgtaatgatatcccttagccggattctgaccaagctcctcctccctgacgagagggcttctactctgatcttcttcctagtgagtgtggctctcgagctgctctgctttctgcttcacctcttggttcggaggtctcgatttgtgctattttacaccacaaggccgcgggactcacaccgcggccgccccggattaggcagaggatacggatacagagtgcaccacgatgtagttgccggcgatgtgcacttcgaacatcctgcgcccgcactcgcccccaatgagtccccaaaagacagccccgctcatgaggtaaccgggagtggcggagcatacatgcggtttgatgttcccagaccacgcgtacagagatcatggccaacattcagagccctcctcctgcaccgttacgtggtggcccgggttatctgggctgatatgctaagcatcgccgtcacctacttcatcaccctgtgtctttttccaggcctggaatccgagatccgccattgtatactgggggaatggctgcccattctgatcatggctgtgtttaacctatccgactttgtgggtaagatcctggcagcgctgcccgtggattggcgcggaactcatctgttggcctgttcatgcctcagggtcgtcttcataccgctgttcatcttgtgcgtctacccctcgggtatgcctgctctgcgacaccctgcctggccctgtattttcagtcttctgatgggcattagtaatgggtacttcggatcagtgcccatgatcctggcggctggcaaagtcagccccaagcagagagagctagctggtaacacaatgaccgtttcctacatgtccgggctcacactcggcagcgccgtggcctactgcacctactctttaacgagagatgcacatggcagttgtcttcacgcatccaccgccaacgggtctatactggcgggattatag

SEQ ID NO: 289751 - DNA, 492 bp, Artificial Sequence
  derived and/or modified sequence
atgggcagcgtgggcagccagcggctggaggagcccagcgtggccggaacccctgacccaggagtagtcatgagcttcaccttcgactcacatcagctggaggaagccgctgaggccgcccagggtcaggggctgcgggcccgaggggttcccgcattcacggataccactctcgacgagccggttccagacgacaggtatcatgctatctacttcgccatgctgttagccggcgtgggtttcctcctgccctacaattccttcatcactgacgtggactacctccaccacaaatatcccggaacgagtatcgttttcgatatgtcactgacttatatattggtcgccctggcagcagtactgctgaataatgttttagtcgaacgcctgaccctacatactcgcattaccgcgggttaccttctcgcgctcggccccttgctctttatctccatatgcgacgtttggttacagctgttttctcgggattag

SEQ ID NO: 289752 - DNA, 1593 bp, Artificial Sequence
  derived and/or modified sequence
atggggagtgtggggtcacagcggcttgaagagccgagcgttgccggaaccccagatccaggcgtcgtcatgagtttcacttttgatagtcatcagctggaagaagccgctgaggcagctcagggacaggggctgcgcgctcggggtgtgcctgcctttaccgacaccacccttgatgagcctgttcccgacgatcggtaccacgccatttacttcgcaatgcttttggccggtgttggttttctgcttccttacaacagtttcatcacagacgtggattacttgcatcacaaatacccaggcacaagtatcgtctttgacatgtcccttacttatatactggtagcccttgctgccgttctgctgaataatgttctggtagaacgtctgactcttcacacccgaattacagccggatatcttttagctctgggccctctgctgtttatctccatttgcgatgtttggctgcagctgttctcacgagaccaggcctacgcaattaacctggctgctgtgggcaccgtagcatttgggtgtactgtccagcagtcatctttttatggttacacaggcatgctgccgaagcgctatacccagggagtgatgaccggggaaagtaccgccggtgtaatgatcagccttagcagaattctcacgaagttgctgctccctgacgagcgcgcaagcaccctgatcttttttctggtctctgtggccctggaactgctgtgcttcctcctgcacctgttggtccgcaggtccagatttgttctcttttacactaccagacccagagactctcacagggggcgtcccggactgggaagaggatatggctatcgggtgcatcatgacgttgtggcgggagatgtgcatttcgagcatcctgcccctgccctggcccctaacgagagccctaaggattcccccgcacacgaggtaaccgggtccggtggtgcctatatgaggttcgatgtacccagaccgagggtacagcggagttggccaacttttcgagcactgctgctccacaggtacgtcgtggcccgagtaatctgggctgatatgctttcgattgctgtgacctacttcatcactctttgtcttttcccgggtctggagagcgaaattaggcattgtatcctaggagagtggctgcctattctcattatggccgtgttcaatctgtctgatttcgtgggtaagatcctagccgctctaccagtggactggcgtggcacacacctgctggcttgttcttgtcttcgcgtggtttttatccccctgtttatcctgtgtgtgtaccccagtggtatgcctgctctcaggcatccggcatggccctgcatcttctcgctgctgatggggatttcaaatggctatttcggttctgtgcccatgatcctagcggcaggcaaggttagcccgaagcagcgcgaacttgctggaaatacaatgaccgtgagttatatgtcaggactgaccctgggaagcgcagtcgcatattgtacctactctcttacccgggacgcacacgggagctgtctgcacgcctccactgcgaacggatctatattggccggactctag

SEQ ID NO: 289753 - DNA, 1593 bp, Artificial Sequence
  derived and/or modified sequence
atggggagcgtcgggtcccagcgcctcgaagagccaagcgtggcgggaacacccgaccccggtgtagtgatgtcctttaccttcgatagccaccagctggaggaggccgcagaggctgcacaggggcaaggcctgcgcgcaaggggagttccagctttcaccgacacaactctcgacgaacccgtgcctgatgatcgctaccatgctatctactttgctatgttgctggctggggtaggtttcctcctgccatataacagtttcattacggatgttgattacctccaccataagtatcctggcacttccatcgtttttgatatgtccctgacatatattctggtggcattggccgcagtcctgctcaataacgttctggttgagagactgacactccacacccgcatcactgctggttatctcctcgcactggggccacttctttttatatccatctgcgacgtttggctgcagttgttcagccgggaccaggcctatgctatcaaccttgctgcggtgggcaccgtggccttcgggtgcacggtgcaacagagttctttctacggctatacaggtatgcttcccaaaagatatactcagggcgtgatgacaggcgagtcaaccgctggcgtaatgatatccttgtccagaattctgaccaaattacttttaccagatgagcgcgcttcaacactaatcttcttcctggtgtcagtagccttagagctcctgtgctttctgctccatttacttgttaggagatcccggtttgtgctattttacaccaccaggcctagggactctcataggggccgtccaggactcggcaggggttacggctaccgcgtgcaccacgacgtggttgccggtgacgtgcatttcgaacaccccgctcccgctttggcccctaatgagagcccaaaggattcacctgcccatgaggtgacgggtagtgggggagcctacatgcgcttcgatgtccctcgacctcgagtccagaggtcctggcctacgttccgcgcactgctgctgcaccgatacgtggtggccagagtgatctgggctgatatgttgagcattgcggtcacttactttatcacactatgtctgttccctgggctggaatcagagatcaggcactgcattctcggggagtggctgccaatacttattatggccgtgtttaacttaagcgattttgtggggaaaatcctggctgccctgccagttgattggagaggaacccaccttctggcatgtagttgtttgcgcgtggtttttattcccctgtttatcctctgtgtctacccttccggtatgcccgctctcagacaccctgcttggccctgcatcttctccctcctcatgggcatctctaatggatatttcggatccgtcccgatgattctggcggcaggcaaagtgagtccaaagcagagagagctcgctggaaatacaatgactgttagttacatgagcggcctgactctcggcagcgctgtcgcatactgtacctatagcctgacgcgagacgcccatggctcctgtcttcacgccagtaccgcaaatggcagcatactggctggcctgtag

SEQ ID NO: 289754 - DNA, 492 bp, Artificial Sequence
  derived and/or modified sequence
atgggctccgtaggatcgcagcggctggaggagccatctgtcgctggcacccctgaccctggggttgttatgtccttcacgttcgatagccatcagctcgaggaagctgccgaggctgctcaagggcaggggctccgcgctagaggggtaccggcatttactgacaccacgctcgatgaaccagttcccgatgatcggtaccacgcaatctattttgccatgcttctggccggagtaggtttccttctcccctataactcttttattacagatgtagattatctgcaccataagtatccagggacttctattgtgttcgacatgtctctcacgtatattttagtcgcgctggctgccgtgttgctgaacaacgttttggtggagcgcctgaccttacacactcggataacagcaggttacctgttagccctcggacctttgctgtttatttctatatgtgacgtgtggcttcagttgtttagcagggactag

SEQ ID NO: 289755 - DNA, 2839 bp, Artificial Sequence
  derived and/or modified sequence
ggggccgggcggactcggggaccggcggaggacgccgggcgcgcccggcccgaggctgggggagcggggcggcgtggcgggcgcgccgaggaccccaggccgggccgggccgagcagaggctgccatgggctccgtggggagccagcgccttgaggagcccagcgtggcaggcacaccagacccgggcgtagtgatgagcttcaccttcgacagtcaccagctggaggaggcggcggaggcggctcagggccagggccttagggccaggggcgtcccagctttcacggatactacattggacgagccagtgcccgatgaccgttatcacgccatctactttgcgatgctgctggctggcgtgggcttcctgctgccatacaacagcttcatcacggacgtggactacctgcatcacaagtacccagggacctccatcgtgtttgacatgagcctcacctacatcttggtggcactggcagctgtcctcctgaacaacgtcctggtggagagactgaccctgcacaccaggatcaccgcaggctacctcttagccttgggccctctcctttttatcagcatctgcgacgtgtggctgcagctcttctctcgggaccaggcctacgccatcaacctggccgctgtgggcaccgtggccttcggctgcacagtgcagcaatccagcttctacgggtacacggggatgctgcccaagcggtacacgcagggggtgatgaccggggagagcacggcgggcgtgatgatctctctgagccgcatcctcacgaagctgctgctgcccgacgagcgcgccagcacgctcatcttcttcctggtgtcggtggcgctggagctgctgtgtttcctgctgcacctgttagtgcggcgcagccgcttcgtgctcttctataccacacggccgcgtgacagccaccggggcaggccaggcctgggcaggggctatggctaccgcgtgcaccacgacgttgtcgccggggacgtccacttcgagcacccagccccggccctggcccccaacgagtccccaaaggacagcccagcccacgaggtgaccggcagcggcggggcctacatgcgctttgatgtgccgcggccaagggtccagcgcagctggcccaccttcagagccctgttactgcaccgctacgtggtggcgcgggtgatctgggccgacatgctctccatcgccgtgacctacttcatcacgctgtgcctgttccccggcctcgagtctgagatccgccactgcatcctgggcgagtggctgcccatcctcatcatggctgtgttcaacctgtcagacttcgtgggcaagatcctggcagccctgcccgtggactggcggggcacccacctgctggcctgctcctgcctgcgtgtggtcttcatccccctcttcatcctgtgcgtctaccccagcggcatgcccgccctccgtcaccccgcctggccctgcatcttctcactgctcatgggcatcagcaacggctacttcggcagcgtgcccatgatcctggcggcaggcaaagtgagccccaagcagcgggagctggcagggaacaccatgaccgtgtcctacatgtcagggctgacgctggggtccgccgtggcctactgcacctacagcctcacccgcgacgctcacggcagctgcctgcacgcctccaccgccaatggttccatcctcgcaggcctctgagccagccccgcccactgccagggacgccgagggcctgaccaggggccccgaggcctgagggcccctcccctgtccccacctcagtgcctgcggggccctgagcctccccctgtgccagcagccccactccctcagggtccagccatgccccaccctggactgaagttctgcaaagtcctccgaggaccggaacacgtttctgcgacccggggctctggccagcactgtgttctgcgtttggtctcatacctgcgtctaccttccatctgtgtccagcggccccggctccagcccagccagcactctgcagggtcacacgcaccgtgtccccacccaggacagcagacacccgccagagtgtgcgcgcccagtgactgcaccccggccctcatcacccaccggcactgatcggggcaccgcctggcccagcctccaccagggacccctcctcatgaactctggagccctgagaggagaggggcagccccccaccttgtcaccctcagggcttccccttctgtcctcattcttagagactgcttctcccaaacataacgcgttagccatgaaggagtcggagccctgggtccgaatggacccgcctgcggtctgcatcagcctctgggaaaccacagcagtgatgccagctgggcacgtcaggacctccccacacacccacacgatgccacaggtcagggggctgtgcctgactagggagccctcccattgccttcctggcccgggatagaagaggggaggtaagtctgggggctacgaagccgggcccccacaccctggctgaagtcagcttgacctaggtcttgaccctcatccagcaagggactcgacagacccaagggtccctggaacgtagggaggggctgggggtcagtccagcccgggcctcccagaacaccaggcccgtgtgggtggcaccctgaggtcaggggatcctaagggtgtccttccagagacggtgtttccagggggaggaccgcccccgcttccagatccccggccccggctgtgactgccctgtttcacccctgctgtgtcccatcccccgtctgtccactaactgtaccgcaccggccattaaaagatgaaggcagaccgctgca

SEQ ID NO: 289756 - DNA, 2880 bp, Artificial Sequence
  derived and/or modified sequence
tggtggcctgggctgtgctcgtcgccgcgctcgtggaccggggccgggcggactcggggaccggcggaggacgccgggcgcgcccggcccgaggctgggggagcggggcggcgtggcgggcgcgccgaggaccccaggccgggccgggccgagaggctgccatgggctccgtggggagccagcgccttgaggagcccagcgtggcaggcacaccagacccgggcgtagtgatgagcttcaccttcgacagtcaccagctggaggaggcggcggaggcggctcagggccagggccttagggccaggggcgtcccagctttcacggatactacattggacgagccagtgcccgatgaccgttatcacgccatctactttgcgatgctgctggctggcgtgggcttcctgctgccatacaacagcttcatcacggacgtggactacctgcatcacaagtacccagggacctccatcgtgtttgacatgagcctcacctacatcttggtggcactggcagctgtcctcctgaacaacgtcctggtggagagactgaccctgcacaccaggatcaccgcaggctacctcttagccttgggccctctcctttttatcagcatctgcgacgtgtggctgcagctcttctctcgggaccaggcctacgccatcaacctggccgctgtgggcaccgtggccttcggctgcacagtgcagcaatccagcttctacgggtacacggggatgctgcccaagcggtacacgcagggggtgatgaccggggagagcacggcgggcgtgatgatctctctgagccgcatcctcacgaagctgctgctgcccgacgagcgcgccagcacgctcatcttcttcctggtgtcggtggcgctggagctgctgtgtttcctgctgcacctgttagtgcggcgcagccgcttcgtgctcttctataccacacggccgcgtgacagccaccggggcaggccaggcctgggcaggggctatggctaccgcgtgcaccacgacgttgtcgccggggacgtccacttcgagcacccagccccggccctggcccccaacgagtccccaaaggacagcccagcccacgaggtgaccggcagcggcggggcctacatgcgctttgatgtgccgcggccaagggtccagcgcagctggcccaccttcagagccctgttactgcaccgctacgtggtggcgcgggtgatctgggccgacatgctctccatcgccgtgacctacttcatcacgctgtgcctgttccccggcctcgagtctgagatccgccactgcatcctgggcgagtggctgcccatcctcatcatggctgtgttcaacctgtcagacttcgtgggcaagatcctggcagccctgcccgtggactggcggggcacccacctgctggcctgctcctgcctgcgtgtggtcttcatccccctcttcatcctgtgcgtctaccccagcggcatgcccgccctccgtcaccccgcctggccctgcatcttctcactgctcatgggcatcagcaacggctacttcggcagcgtgcccatgatcctggcggcaggcaaagtgagccccaagcagcgggagctggcagggaacaccatgaccgtgtcctacatgtcagggctgacgctggggtccgccgtggcctactgcacctacagcctcacccgcgacgctcacggcagctgcctgcacgcctccaccgccaatggttccatcctcgcaggcctctgagccagccccgcccactgccagggacgccgagggcctgaccaggggccccgaggcctgagggcccctcccctgtccccacctcagtgcctgcggggccctgagcctccccctgtgccagcagccccactccctcagggtccagccatgccccaccctggactgaagttctgcaaagtcctccgaggaccggaacacgtttctgcgacccggggctctggccagcactgtgttctgcgtttggtctcatacctgcgtctaccttccatctgtgtccagcggccccggctccagcccagccagcactctgcagggtcacacgcaccgtgtccccacccaggacagcagacacccgccagagtgtgcgcgcccagtgactgcaccccggccctcatcacccaccggcactgatcggggcaccgcctggcccagcctccaccagggacccctcctcatgaactctggagccctgagaggagaggggcagccccccaccttgtcaccctcagggcttccccttctgtcctcattcttagagactgcttctcccaaacataacgcgttagccatgaaggagtcggagccctgggtccgaatggacccgcctgcggtctgcatcagcctctgggaaaccacagcagtgatgccagctgggcacgtcaggacctccccacacacccacacgatgccacaggtcagggggctgtgcctgactagggagccctcccattgccttcctggcccgggatagaagaggggaggtaagtctgggggctacgaagccgggcccccacaccctggctgaagtcagcttgacctaggtcttgaccctcatccagcaagggactcgacagacccaagggtccctggaacgtagggaggggctgggggtcagtccagcccgggcctcccagaacaccaggcccgtgtgggtggcaccctgaggtcaggggatcctaagggtgtccttccagagacggtgtttccagggggaggaccgcccccgcttccagatccccggccccggctgtgactgccctgtttcacccctgctgtgtcccatcccccgtctgtccactaactgtaccgcaccggccattaaaagatgaaggcagaccgctgcaccgcc

SEQ ID NO: 289757 - protein, 385 aa, Artificial Sequence
  derived and/or modified sequence
MADIKTGIFAKNVQKRLNRAQEKVLQKLGKADETKDEQFEEYVQNFKRQEAEGTRLQRELRGYLAAIKGMQEASMKLTESLHEVYEPDWYGREDVKMVGEKCDVLWEDFHQKLVDGSLLTLDTYLGQFPDIKNRIAKRSRKLVDYDSARHHLEALQSSKRKDESRISKAEEEFQKAQKVFEEFNVDLQEELPSLWSRRVGFYVNTFKNVSSLEAKFHKEIAVLCHKLYEVMTKLGDQHADKAFTIQGAPRQYLDSGPLRIAKTPSPPEEPSPLPSPTASPNHTLAPASPAPARPRSPSQTRKGPPVPPLPKVTPTKELQQENIISFFEDNFVPEISVTTPSQNEVPEVKKEETLLDLDFDPFKPEVTPAGSAGVTHSPMSQTVGW

SEQ ID NO: 289758 - protein, 597 aa, Artificial Sequence
  derived and/or modified sequence
MTKLGDQHADKAFTIQGAPSDSGPLRIAKTPSPPEEPSPLPSPTASPNHTLAPASPAPARPRSPSQTRKGPPVPPLPKVTPTKELQQENIISFFEDNFVPEISVTTPSQNEVPEVKKEETLLDLDFDPFKPEVTPAGSAGVTHSPMSQTLPWDLWTTHTFNDDITDSSESLSLCNLIMEETPDSGLAEEIQRSQNDIGAFTWGPDASTDRVSQEVTSGGFGEDSACPSETEQDIRLSTSLLSSADWPTVAEESEHAPGPAFPGGNEQLPPKPAPEAGVAIAACVEMEQLYDPLDSDMPAMDTAGLFKESHEDMKKSDEEEEKQKMEDSLWAGVEACQKASGGSFNGFTQPQDTSLFTMQTDQSMICNLIIPGADADAAVGTLVSAAEGAPGEEAEAEKATVPAGEGVSLEEAKIGTETTEGAESAQPEAEELEATVPQEKVIPSVVIEPASNHEEEGENEITIGAEPKETTEDAAPPGPTSETPELATEQKPIQDPQPTPSAPAMGAADQLASAREASQELPPGFLYKVETLHDFEAANSDELTLQRGDVVLVVPSDSEADQDAGWLVGVKESDWLQYRDLATYKGLFPENFTRRLD

SEQ ID NO: 289759 - protein, 196 aa, Artificial Sequence
  derived and/or modified sequence
MEETPDSGLAEEIQRSQNDIGAFTWGPDASTDRVSQEVTSGGFGEDSACPSETEQDIRLSTSLLSSADWPTVAEESEHAPGPAFPGGNEQLPPKPAPEAGVAIAACVEMEQLYDPLDSDMPAMDTAGLFKESHEDMKKSDEEEEKQKMEDSLWAGVEACQKASGGSFNGFTQPQDTSLFTMQTDQSMICNLEITVN

SEQ ID NO: 289760 - DNA, 1794 bp, Artificial Sequence
  derived and/or modified sequence
atgacaaagctgggcgatcagcacgccgacaaagcatttaccatacagggggccccatcagatagtggccctctgcgtattgctaagaccccatctcctcccgaagagccttcccctctcccatcaccgacagcgtcgcccaatcataccctggcgccagcatccccggcacctgcacgtccacgatcgccatctcaaactcggaaggggccacctgtgcccccgctccccaaggtcacacctactaaggagctgcagcaggaaaatatcatctcgttcttcgaggacaattttgtgcctgaaatttctgtgactaccccttctcaaaatgaggtccccgaagtgaagaaagaggaaacgcttctcgaccttgacttcgaccctttcaaacccgaggtgacacctgccggatccgcaggtgtcacacactccccaatgtcacaaaccctcccatgggatctgtggactactcatacattcaatgacgacatcactgattctagtgagagtctgagcttatgcaacctcattatggaggagaccccagattccggcttagctgaggaaatccagaggtctcagaacgatattggtgccttcacttggggtccggatgcttccactgatcgggtaagccaggaagtcactagcggcgggtttggtgaggattccgcttgtccctccgaaactgagcaggacatccgtctgagtacatctcttctctctagcgccgactggccaacagttgcagaagagtctgagcatgctcctggcccagcattccctggcggcaacgagcaactgcctcccaaaccagcccctgaggcgggagtggctatcgctgcatgtgtcgagatggagcagctgtatgatccgctcgatagtgacatgccagcaatggacacagccggcctgttcaaggaaagccacgaagatatgaaaaaatctgacgaggaggaggagaagcaaaaaatggaggatagcctgtgggccggagtagaagcctgtcaaaaagcctctggtggtagcttcaacggctttacccagccgcaggatacctccctgttcactatgcagactgatcaaagtatgatttgcaacctcattattccaggcgcggacgctgacgctgcagtgggaaccctcgtctcggccgccgagggggcccccggagaggaggccgaagcagaaaaagctaccgtgcctgcaggtgagggggtgtccctggaagaagcaaagattggcaccgagaccaccgagggggccgagtcagcccagcccgaggctgaagagttggaggctactgtccctcaggaaaaggtgataccttccgtggtcatcgagcctgcctcaaatcatgaggaagaaggagaaaacgagatcacaatcggggcggagccaaaagagacaaccgaggacgccgcccctccagggcctacatctgaaacaccggagctggctaccgagcaaaagcccatccaggatccccagccaacaccaagcgctcccgccatgggagcagccgatcagctggctagcgcaagggaggccagccaagaactccccccagggtttctctacaaggtggaaaccctgcatgatttcgaagccgctaattcagatgaactgacactccagagaggggatgtggtgctggtggtgccttccgactccgaagcagaccaagatgccggctggctggtaggcgtcaaggaatctgattggcttcagtatagggatttggccacttataaggggctcttcccggagaattttactcggaggttggactag

SEQ ID NO: 289761 - DNA, 591 bp, Artificial Sequence
  derived and/or modified sequence
atggaagaaacccctgactctggattggcagaagagatccagcgaagtcagaatgacattggagctttcacttgggggccagatgcatccactgatagagttagccaggaagtcacttctggcggctttggggaagattctgcctgtccctcagaaaccgaacaggatatcagactcagcacttccttgctctcatccgctgactggccaaccgtcgccgaggaatctgaacatgcacctggccccgcatttcccggcggaaacgaacagctaccccccaaaccagcgccagaggcaggggtggctatcgccgcttgcgtcgaaatggagcaactctacgacccgctggacagtgacatgccagcaatggacaccgccggcctgttcaaggagtcccacgaagacatgaagaagagcgatgaagaagaggaaaaacagaagatggaggattccctttgggccggagttgaggcgtgtcaaaaagcttctggaggcagctttaacggatttacccagccacaggatacgtctctgtttacaatgcagactgatcagagtatgatctgtaacctggaaatcacagttaactag

SEQ ID NO: 289762 - DNA, 1794 bp, Artificial Sequence
  derived and/or modified sequence
atgaccaagctgggggaccagcacgccgacaaggccttcaccatccagggcgcccccagcgacagcggccccctgagaattgccaagacccccagccccccagaggagcccagccccctgcccagccccacagccagccccaaccacaccctggccccagccagccctgccccagcccggcccaggagccccagccagaccaggaaaggacctcctgtgccccccctgcccaaggtgacccccaccaaggagctgcagcaggagaacatcatctccttctttgaggacaactttgtgcctgagatctctgtgaccacccccagccagaatgaggtgcctgaggtgaagaaggaggagaccctgctggacctggactttgaccccttcaagccagaggtgaccccagctggcagcgctggggtgacccacagccccatgagccagaccctgccctgggacctgtggaccacccacaccttcaatgatgacatcacagacagcagcgagagcctgagcctgtgcaacctgatcatggaggagaccccagacagcggcctggccgaggagatccagaggagccagaatgacattggagccttcacctggggcccagatgccagcacagacagagtgtcccaggaggtgaccagcggcggctttggagaggacagcgcctgccccagcgagacagagcaggacatccggctgagcaccagcctgctgagcagcgctgactggcccaccgtggccgaggagagcgagcacgcccctggccctgccttccctggaggaaatgagcagctgccccccaagccagcccctgaggccggcgtggccatcgccgcctgtgtggagatggagcagctgtatgaccccctggacagcgacatgcctgccatggacacagctggcctcttcaaggagagccatgaggacatgaagaagagtgatgaggaggaggagaagcagaagatggaggacagcctgtgggccggcgtggaggcctgccagaaggccagcggcggcagcttcaacggcttcacccagccccaggacaccagcctcttcaccatgcagacagaccagagcatgatctgcaacctgatcatccctggagcagatgctgatgctgctgtgggcaccctggtgtctgctgctgagggcgcccctggagaggaggccgaggccgagaaggccaccgtgcctgctggggagggcgtgtccctggaggaggccaagattggaacagagaccacagaaggagctgagagcgcccagcctgaggccgaggagctggaggccaccgtgccccaggagaaggtgatccccagcgtggtgattgaaccagccagcaaccacgaggaggagggggagaatgagatcaccatcggggctgagcccaaggagaccacagaagatgctgcccctcctggccccaccagcgagaccccagagctggccacagagcagaagcccatccaggacccccagcccaccccatctgccccagccatgggcgctgctgaccagctggccagcgcccgggaggccagccaggagctgcccccaggcttcctgtacaaggtggagaccctgcatgactttgaagctgccaacagtgatgagctgaccctgcagagaggagatgtggtgctggtggtgcccagcgacagcgaggccgaccaggatgctggctggctggtgggcgtgaaggagagtgactggctgcagtacagagacctggccacctacaagggcctcttccctgagaacttcacccggcggctggactag

SEQ ID NO: 289763 - DNA, 591 bp, Artificial Sequence
  derived and/or modified sequence
atggaggagaccccagattctggcctggccgaggagatccagaggagccagaatgacatcggggccttcacctggggcccagatgccagcacagacagagtgtcccaggaggtgaccagcggcggctttggagaagattctgcctgccccagcgagacagagcaggacatccggctgagcaccagcctgctgagcagcgctgactggcccaccgtggccgaggagagcgagcacgcccctggccctgccttccctggaggaaatgagcagctgccccccaagccagcccctgaggccggcgtggccatcgccgcctgtgtggagatggagcagctgtatgaccccctggacagcgacatgcctgccatggacacagctggcctcttcaaggagagccatgaggacatgaagaagagtgatgaggaggaggagaagcagaagatggaggacagcctgtgggccggcgtggaggcctgccagaaggccagcggcggcagcttcaacggcttcacccagccccaggacaccagcctcttcaccatgcagacagaccagagcatgatctgcaacctggagatcaccgtgaactag

SEQ ID NO: 289764 - DNA, 1794 bp, Artificial Sequence
  derived and/or modified sequence
atgaccaagctgggcgaccagcacgccgacaaggccttcaccatccaaggagcacctagcgacagcggacccctaagaatcgctaagacaccctcccccccagaggaaccgtcacccctgcccagcccaactgcctcccccaatcatactttagcccccgcctcccccgcacccgcgcgcccaaggagcccttcgcagacaaggaaaggacctccggtgccgcctctgccaaaggtgacaccaacaaaagaactccaacaagaaaacattattagtttctttgaggacaacttcgtgccagaaatatcagttaccacccccagtcagaatgaggtccctgaagtgaagaaagaagaaactctcctcgatttggacttcgacccttttaagccagaggtcactccggcagggtcagctggcgtgacacactccccaatgtctcagaccctgccatgggatctatggactacacatacttttaacgatgacattactgattcctcagagtcgttaagcctttgtaacctgatcatggaggagactcctgactccggccttgcagaggaaattcagcgttctcagaacgatatcggcgcgtttacctgggggccagacgcctccaccgatagagtgtcccaggaggtcacgagtggtggctttggtgaagattctgcatgtcccagcgaaactgaacaagatattcggctgtcaacaagtctcctttcctcagccgactggccaactgtggccgaagagtcagagcatgccccaggcccggcattcccaggcggtaatgaacagcttccaccgaaacctgccccggaggccggagtggctatagccgcatgtgtcgaaatggagcagctgtacgaccccctcgatagtgacatgcccgccatggacaccgcggggctgtttaaagagagccacgaggatatgaagaagtccgacgaggaggaggaaaagcaaaagatggaggactctctgtgggcaggcgttgaagcatgccagaaggcctccggcggctccttcaatgggtttacacagccacaggacacttctttattcactatgcagacagatcagagcatgatttgtaacctgatcattcccggcgcggatgccgacgctgcagttgggaccctcgtatcagccgcagagggggctccaggagaggaggcagaagcggagaaagctacggtgcccgccggggagggagtttctctggaggaggcgaaaatcggaactgagactacagaaggggctgagtccgctcagccagaagccgaagaacttgaagcaactgtgccccaggaaaaggttatcccttcagtcgtcattgagcctgcttctaaccacgaggaggaaggggagaatgagattacgattggggccgaaccaaaagagaccaccgaagacgctgctcccccgggtcccacttctgagacccccgagctggcgaccgaacagaaacccattcaagatcctcagccaaccccatcagcacccgcaatgggagctgccgaccagctggcatctgcaagagaagcctcccaggaactccctcctggtttcctttacaaggttgagaccctccacgatttcgaagctgccaactcagacgagcttaccctacaaaggggagatgtcgtactggttgttccttcagactctgaagcggatcaggacgcaggctggctggtgggtgtgaaggagagtgactggctgcagtatagagacctggcgacgtacaaaggtctattccctgaaaacttcacaaggagactggactag

SEQ ID NO: 289765 - DNA, 591 bp, Artificial Sequence
  derived and/or modified sequence
atggaggagacccccgacagcggcctggccgaggagatccagcggtctcagaacgacattggtgctttcacctggggccccgatgcctcgacggatcgcgtgagccaggaagtgaccagcggcggatttggagaggattcagcttgtccttctgagactgagcaggatatccgactgagcacgtctctgctgagtagcgccgattggccgaccgtggcggaagagagtgagcatgcgcccggcccggcgttccctggaggtaacgaacagctcccccccaagccagctcccgaggctggagtggcaattgcagcctgcgttgagatggagcaactttacgatcctctggactccgatatgcccgcaatggacaccgctggattgttcaaggagtctcatgaagacatgaaaaaatcagacgaggaggaagagaaacagaagatggaagattcactctgggcgggcgtggaagcctgtcagaaagcaagtggaggttccttcaacggatttacacaacctcaggatacgtcgctgttcactatgcagactgaccagtccatgatatgtaatctggagataaccgtgaactag

SEQ ID NO: 289766 - DNA, 3665 bp, Artificial Sequence
  derived and/or modified sequence
cccgctcctccgcgccgccgccagccccgctgcgcgctctgctcttcgcagctccccggacccgcagccatggccgacatcaagacgggcatcttcgccaagaacgtccagaagcgactcaaccgcgcgcaggaaaaggtcctccaaaagctggggaaagctgatgagacaaaagacgaacagttcgaagaatatgtccagaacttcaaacggcaagaagcagagggtaccagacttcagcgagaactccgaggatatttagcagcaatcaaaggcatgcaggaggcctccatgaagctcacagagtcgctgcatgaagtctatgagcctgactggtatgggcgggaagatgtgaaaatggttggtgagaaatgtgatgtgctgtgggaagacttccatcaaaaactcgtggatgggtccttgctaacactggatacctacctggggcaatttcctgacataaagaatcgcatcgccaagcgcagcaggaagctagtggactatgacagtgcccgccaccatctggaagctctgcagagctccaagaggaaggatgagagtcgaatctctaaggcagaagaagaatttcagaaagcacagaaagtgtttgaagagtttaacgttgacttacaagaagagttaccatcattatggtcaagacgagttggattttatgttaatactttcaaaaacgtctccagccttgaagccaagtttcataaggaaattgcggtgctttgccacaaactgtatgaagtgatgacaaaactgggtgaccagcacgccgacaaggccttcaccatccaaggagcgcccagtgattcgggtcctctccgcattgcaaagacaccatcaccgcctgaggagccttcacccctcccgagcccgacagcaagtccaaatcatacattagcacctgcgtctcccgcaccagcacggcctcggtcaccttcacagacaaggaaagggcctcctgtcccacctctacctaaagtcaccccgacaaaggaactgcagcaggagaacatcatcagtttctttgaggacaactttgttccagaaatcagtgtgacaacaccttcccagaatgaagtccctgaggtgaagaaagaggagactttgctggatctggactttgatcctttcaagcccgaggtgacacctgcaggttctgctggagtgacccactcacccatgtctcagacattgccctgggacctatggacgacacatacatttaatgatgatataactgactcttcagaaagtctttccttgtgtaacctgatcatggaggaaactccagacagtgggttggccgaagaaattcaaagatctcaaaatgatataggtgcatttacttggggccctgacgctagtacagacagggtcagccaagaagttacctcaggtgggtttggagaagactctgcatgtccctccgaaacagagcaagacataagattatccaccagcctgctttcgtctgctgactggcccactgtagctgaagagagtgagcatgccccggggccagcctttccaggtggaaatgaacaactgcccccaaagcctgcgccggaggctggagttgccattgctgcttgtgtggagatggagcagctgtatgacccacttgactcagacatgccagccatggacacagctggcctgttcaaagaaagtcatgaagatatgaagaagtcagatgaagaggaagagaaacagaagatggaagattctctgtgggcaggtgtggaggcgtgtcaaaaggcttctggtggttcatttaatggattcacacagccccaggatacttcattattcacaatgcagacagaccagagtatgatctgcaacttgatcatacctggagctgatgctgatgcagctgttggaaccttggtgtcagcagctgagggggccccaggagaggaagcagaggcggagaaggccactgtccctgccggggaaggagtaagtttagaggaggccaaaattggaactgaaaccactgagggtgcagagagtgcccaacctgaagcagaggagctcgaagcaacagtgcctcaggagaaggtcattccttcggtggtcatagagcctgcctccaaccatgaagaggaaggagaaaacgaaataactataggtgcagagcccaaggagaccaccgaggacgcggctcctccgggccccaccagcgagacaccggagctggctacggagcagaagcctatccaggaccctcagcccacgccttctgcaccagccatgggggctgctgaccagctagcatctgcaagggaggcctctcaggaattgcctcctggctttctctacaaggtggaaacactgcatgattttgaggcagcaaattctgatgaacttaccttacaaaggggtgatgtggtgctggtggtcccctcagattcagaagctgatcaggatgcaggctggctggtgggagtgaaggaatcagactggcttcagtacagagaccttgccacctacaaaggcctctttccagagaacttcacccgacgcttagattagggcaacaagtactgcaagaaggagctcagttacggggtttttaaaccttcatgaaaacctgaagagttcacttttgttattatgctcttaatgatttacagactgatgccagacaaaccttgggaagatgtatcaatggagcatgtgtgcaaaaaaatgtaagaggaaaaaaagtaaattaaggaaaaaatcctcactcattcccatgttgtcaataacaggtttgtttgtgctttgtccaagctgtggagactcttgtacttgatcccctcccaccaattctaaagtagctttctccagatcagactttaatttctctgcatcaggtgtatcgtattgagtggctgccctgcagaagatgtgatgaattatcctgtagtacaagattatcttattcccctgcccaggtgtgagcacgtgctctcgctccctttcaggtttactatgtttaaaactaaactgctgcaaaagttctcaatgttcttttccaacacatctatatatatatggacacacagtcacgcaagctagttcccatgactcctggatctatgtgtatgcagaaggctacatatacatagttgcttctttcctttccattgtagctctttgcctctcaattgtcattgatacatgcattgctcttattctgtctggcattacaattgcagttttgcctaatggcaaaaccagccatcccattggcaaaagagtcaacagtatctgtgtttgtactgtgcagttttcaggatgagatgacagatagcacgactacactgaggcaccctcagagaaggcagggcctgatttatctagctgtccagccgctgtggctggaggtaggctagttgggatgggcagctaagcagtcttctcttctgcctttatgagattgggtagaaagatggggcatattcatctacccccaaaagaacactataaaaacagctcctctatatttccacctctttctatttatgcaactcatcttcacagattgttctaaagtaaaatagatggtgtatgctgtatccacaaatcatctgtaacaattatgttttcagtgctgtgtcattccaaataaacctttggtaatcttcaacgattaccct

SEQ ID NO: 289767 - DNA, 1064 bp, Artificial Sequence
  derived and/or modified sequence
gtgattcgggtcctctccgcattgcaaagacaccatcaccgcctgaggagccttcacccctcccgagcccgacagcaagtccaaatcatacattagcacctgcgtctcccgcaccagcacggcctcggtcaccttcacagacaaggaaagggcctcctgtcccacctctacctaaagtcaccccgacaaaggaactgcagcaggagaacatcatcagtttctttgaggacaactttgttccagaaatcagtgtgacaacaccttcccagaatgaagtccctgaggtgaagaaagaggagactttgctggatctggactttgatcctttcaagcccgaggtgacacctgcaggttctgctggagtgacccactcacccatgtctcagacattgccctgggacctatggacgacaagcactgatttggtacagccgactgactcttcagaaagtctttccttgtgtaacctgatcatggaggaaactccagacagtgggttggccgaagaaattcaaagatctcaaaatgatataggtgcatttacttggggccctgacgctagtacagacagggtcagccaagaagttacctcaggtgggtttggagaagactctgcatgtccctccgaaacagagcaagacataagattatccaccagcctgctttcgtctgctgactggcccactgtagctgaagagagtgagcatgccccggggccagcctttccaggtggaaatgaacaactgcccccaaagcctgcgccggaggctggagttgccattgctgcttgtgtggagatggagcagctgtatgacccacttgactcagacatgccagccatggacacagctggcctgttcaaagaaagtcatgaagatatgaagaagtcagatgaagaggaagagaaacagaagatggaagattctctgtgggcaggtgtggaggcgtgtcaaaaggcttctggtggttcatttaatggattcacacagccccaggatacttcattattcacaatgcagacagaccagagtatgatctgcaacttggaaatcacagtgaactga

SEQ ID NO: 289768 - DNA, 1794 bp, Artificial Sequence
  derived and/or modified sequence
atgaccaaactgggcgaccagcacgctgacaaagcatttacgatccaaggcgctcctagcgactccggaccactgagaatcgccaagaccccttcaccccctgaagaaccgagtcccttgccttccccaactgcatctccaaaccacactttagcaccagctagccccgcacctgctcgccctcggagccctagtcagacccgcaaaggacccccagtgccacccctgcccaaggtcacgccgacgaaagagctccagcaggagaacatcatttcctttttcgaagataacttcgtgcccgagatatctgtcactaccccctcccagaatgaagtcccagaagtcaagaaggaggagaccctgctggacctggatttcgacccctttaaacccgaggtgacccccgctggaagtgcaggagttacgcatagccccatgtcccagaccctgccgtgggacctttggacaactcacactttcaacgacgatattactgacagcagcgaatcactctctttgtgtaacttgatcatggaggagactcccgacagcggtctggctgaagagatccaacggtcccaaaacgacatcggtgcctttacatggggacctgatgccagcaccgatagagtgagccaggaggttacctccggcggtttcggcgaagactctgcatgcccgtctgagactgagcaggatatcaggctgagtacttcccttctgagcagtgcagattggcccaccgtcgccgaagaatcagagcatgccccaggccctgctttccccggtgggaacgagcaactcccacctaagccagccccagaggcgggagttgcgattgccgcatgcgtggaaatggagcagctgtatgatcctctcgacagcgatatgccggctatggatactgcgggactttttaaggaatcacatgaggatatgaagaagtccgacgaagaggaggaaaagcagaagatggaggacagcctatgggcgggagtggaagcctgccaaaaggctagtggtggctctttcaacggctttacacagccacaggacacttcactgtttactatgcagactgaccagtcaatgatctgcaatctaattatcccaggggcagacgcagatgctgcagtcggaacacttgtaagcgctgccgagggtgcccctggtgaagaagccgaggctgaaaaggctactgtcccagctggcgagggggtctccttggaggaagcaaaaattggaacagagaccactgagggggctgagtcagcacagcccgaggctgaggagttggaggcaacagtgccacaggagaaggttatacccagtgtcgtcattgagccggcaagtaaccacgaagaggagggcgagaacgagataaccataggtgcggagccaaaggaaactactgaagacgccgctccccctggcccaaccagcgagacaccggagcttgccacagagcaaaagccaatccaggatccacagccaacaccctcggcaccggcaatgggcgcagccgatcagctggcatcggcgagagaggcctcccaagaactgccaccagggttcctgtataaagtcgagactctacacgactttgaggcagcaaatagcgatgagctgaccctacagcggggtgacgtagtgctggttgtgccttccgattccgaagccgaccaggatgctggttggctggtgggcgtcaaggagtccgattggctccagtaccgggacctggccacctacaaggggctgttccccgaaaacttcacccgaaggttagactag

SEQ ID NO: 289769 - DNA, 591 bp, Artificial Sequence
  derived and/or modified sequence
atggaggagaccccagactctggattggcagaggaaatccagcggtcccagaacgatatcggagcctttacttggggtcctgacgcttccacagatcgcgtgtcccaggaggtcacaagcggtgggtttggtgaggacagtgcatgcccctctgaaaccgagcaggatatacgccttagtacatcacttctgagcagcgcagattggcccactgtcgctgaggagagtgagcacgctcctgggcctgccttccccggaggaaatgagcaattgccccctaaaccagcccctgaagcaggggttgcgattgctgcctgtgtggaaatggagcaactctacgatcccctcgatagcgatatgccggctatggacacagccggattatttaaggagagtcacgaagacatgaagaagagcgacgaggaggaggagaaacagaaaatggaagactctttgtgggccggtgtagaagcttgtcaaaaggccagtggcggtagctttaacggctttacacagcctcaggatacctccctctttactatgcagacagatcagtctatgatctgcaatctggaaattacagtcaactag

SEQ ID NO: 289770 - DNA, 1794 bp, Artificial Sequence
  derived and/or modified sequence
atgaccaagctgggcgaccagcacgccgacaaggccttcaccatccagggcgcccccagcgacagcggccccctgagaatcgccaagacccccagcccccccgaggagcccagccccctgcccagccccaccgccagccccaaccacaccctggcccccgccagccccgcccccgccagacccagaagccccagccagaccagaaagggcccccccgtgccccccctgcccaaggtgacccccaccaaggagctgcagcaggagaacatcatcagcttcttcgaggacaacttcgtgcccgagatcagcgtgaccacccccagccagaacgaggtgcccgaggtgaagaaggaggagaccctgctggacctggacttcgaccccttcaagcccgaggtgacccccgccggcagcgccggcgtgacccacagccccatgagccagaccctgccctgggacctgtggaccacccacaccttcaacgacgacatcaccgacagcagcgagagcctgagcctgtgcaacctgatcatggaggagacccccgacagcggcctggccgaggagatccagagaagccagaacgacatcggcgccttcacctggggccccgacgccagcaccgacagagtgagccaggaggtgaccagcggcggcttcggcgaggacagcgcctgccccagcgagaccgagcaggacatcagactgagcaccagcctgctgagcagcgccgactggcccaccgtggccgaggagagcgagcacgcccccggccccgccttccccggcggcaacgagcagctgccccccaagcccgcccccgaggccggcgtggccatcgccgcctgcgtggagatggagcagctgtacgaccccctggacagcgacatgcccgccatggacaccgccggcctgttcaaggagagccacgaggacatgaagaagagcgacgaggaggaggagaagcagaagatggaggacagcctgtgggccggcgtggaggcctgccagaaggccagcggcggcagcttcaacggcttcacccagccccaggacaccagcctgttcaccatgcagaccgaccagagcatgatctgcaacctgatcatccccggcgccgacgccgacgccgccgtgggcaccctggtgagcgccgccgagggcgcccccggcgaggaggccgaggccgagaaggccaccgtgcccgccggcgagggcgtgagcctggaggaggccaagatcggcaccgagaccaccgagggcgccgagagcgcccagcccgaggccgaggagctggaggccaccgtgccccaggagaaggtgatccccagcgtggtgatcgagcccgccagcaaccacgaggaggagggcgagaacgagatcaccatcggcgccgagcccaaggagaccaccgaggacgccgccccccccggccccaccagcgagacccccgagctggccaccgagcagaagcccatccaggacccccagcccacccccagcgcccccgccatgggcgccgccgaccagctggccagcgccagagaggccagccaggagctgccccccggcttcctgtacaaggtggagaccctgcacgacttcgaggccgccaacagcgacgagctgaccctgcagagaggcgacgtggtgctggtggtgcccagcgacagcgaggccgaccaggacgccggctggctggtgggcgtgaaggagagcgactggctgcagtacagagacctggccacctacaagggcctgttccccgagaacttcaccagaagactggactag

SEQ ID NO: 289771 - DNA, 591 bp, Artificial Sequence
  derived and/or modified sequence
atggaggagacccccgacagcggcctggccgaggagatccagagaagccagaacgacatcggcgccttcacctggggccccgacgccagcaccgacagagtgagccaggaggtgaccagcggcggcttcggcgaggacagcgcctgccccagcgagaccgagcaggacatcagactgagcaccagcctgctgagcagcgccgactggcccaccgtggccgaggagagcgagcacgcccccggccccgccttccccggcggcaacgagcagctgccccccaagcccgcccccgaggccggcgtggccatcgccgcctgcgtggagatggagcagctgtacgaccccctggacagcgacatgcccgccatggacaccgccggcctgttcaaggagagccacgaggacatgaagaagagcgacgaggaggaggagaagcagaagatggaggacagcctgtgggccggcgtggaggcctgccagaaggccagcggcggcagcttcaacggcttcacccagccccaggacaccagcctgttcaccatgcagaccgaccagagcatgatctgcaacctggagatcaccgtgaactag

SEQ ID NO: 289772 - DNA, 1158 bp, Artificial Sequence
  derived and/or modified sequence
atggccgatataaagactgggatcttcgccaagaacgtgcagaagcgtctgaacagagctcaggaaaaggtgctgcagaagttgggtaaggcagacgaaacaaaggacgagcaattcgaggaatacgtccagaatttcaaaagacaggaagccgagggaaccagactgcagagagagctgcgtggatacctggcggccattaaagggatgcaggaagcctcaatgaagcttacagagtctttgcacgaagtttatgagccggattggtatggacgcgaggatgtgaagatggtcggagagaagtgtgatgtgctatgggaagactttcatcagaaactggtggacggctcattgttgaccctggatacatacctgggacagtttcctgacatcaaaaatcgtattgccaagagaagcagaaagctggtcgactacgatagtgccagacatcacctagaggcactgcagtcatccaaaagaaaagacgagagccgaataagcaaagccgaagaggaattccagaaggcccagaaggtgtttgaggagtttaacgtggacctgcaggaagaactgcccagcctatggtctagaagagttggcttctacgtaaatacattcaaaaacgtgagtagcctcgaggcgaagtttcataaggagatagctgtgctgtgccacaagctgtacgaagtgatgactaagttgggagatcaacacgcagacaaagcctttactatccaaggtgcccccaggcagtacctggacagcggtccactgagaatcgccaaaaccccttcacctcccgaagaacctagcccccttcctagtcccaccgcgtcccctaaccatacactggctcccgccagtcctgcacctgcacgcccacgctcacctagccagactaggaaagggcctcccgtgccgccccttccaaaggtgactcctactaaggagctacagcaggagaacattatttcattctttgaagataatttcgttcccgaaattagcgtgaccacacccagccagaacgaggtccccgaggtgaagaaagaagagactctgctcgatctggactttgatcccttcaagccggaggtgactcccgcaggaagtgcaggagtgactcactcaccaatgtctcagacggtgggatggtag

SEQ ID NO: 289773 - DNA, 1158 bp, Artificial Sequence
  derived and/or modified sequence
atggctgacatcaagacaggcatctttgccaagaatgtgcagaagaggctgaacagagcccaggagaaggtgctgcagaagctgggcaaggcagatgagaccaaggatgagcagtttgaggagtatgtgcagaacttcaagaggcaggaggccgagggcacccggctgcagcgggagctgcggggctacctggccgccatcaagggcatgcaggaggcctccatgaagctgacagagagcctgcacgaggtgtatgagccagactggtacggcagagaagatgtgaagatggtgggggagaagtgtgatgtgctgtgggaggacttccaccagaagctggtggatggcagcctgctgaccctggacacctacctgggccagttcccagacatcaagaacagaattgccaagaggagcaggaagctggtggactatgattctgcccggcaccacctggaggccctgcagagcagcaagaggaaggatgagagccgcatcagcaaggccgaggaggagttccagaaggcccagaaggtgtttgaggagttcaacgtggacctgcaggaggagctgcccagcctgtggagcagaagagtgggcttctacgtgaacaccttcaagaatgtgagcagcctggaggccaagttccacaaggagattgctgtgctgtgccacaagctgtatgaggtgatgaccaagctgggggaccagcacgccgacaaggccttcaccatccagggcgccccccggcagtacctggacagcggccccctgcgcatcgccaagacccccagccccccagaggagcccagccccctgcccagccccacagccagccccaaccacaccctggccccagccagccctgccccagcccggcccaggagccccagccagaccaggaagggcccccctgtgccccccctgcccaaggtgacccccaccaaggagctgcagcaggagaacatcatctccttctttgaggacaactttgtgcctgagatctctgtgaccacccccagccagaatgaggtgcctgaggtgaagaaggaggagaccctgctggacctggactttgaccccttcaagccagaggtgaccccagctggcagcgctggggtgacccacagccccatgagccagacagtgggctggtag

SEQ ID NO: 289774 - DNA, 1158 bp, Artificial Sequence
  derived and/or modified sequence
atggccgacatcaagaccggcatcttcgccaagaacgtgcagaagagactgaatagagcacaagagaaagtcctccagaaactaggaaaagcagatgagactaaggatgagcagttcgaggaatacgtgcaaaatttcaagcgccaggaagcagagggtaccagactccagagggagctgagaggctatctagccgctattaaagggatgcaagaagcttccatgaagctgacagagagcctccatgaagtgtacgagcccgattggtacggaagggaagacgtgaaaatggtgggggagaagtgcgatgtcctttgggaagacttccaccagaagctggtggatggatcacttttaacacttgacacgtacctgggccagttccccgatatcaaaaatagaatcgcaaagcggtcccgcaaactggtggactacgacagcgcccggcatcacctggaggccttgcagagcagtaaaagaaaggacgaaagcagaatatccaaggcggaagaagagttccaaaaagcacaaaaggtgttcgaggaatttaacgtcgatctccaggaagaattaccttccctgtggtctcgccgcgtcggcttctatgtgaatacgtttaagaacgtgagctctctcgaggcaaaatttcataaggagattgccgtgctttgccacaaactgtacgaggtcatgaccaagcttggagaccagcacgcagacaaggcttttacaattcagggcgcccctagacagtacctcgattccggtcccctgaggatcgctaagacaccctcccccccagaggagcctagccccttgccctctcctacagcttctcctaaccatactttggcacctgcttcgcccgcccccgctaggcctcgttccccctcacagaccagaaagggtcccccagtgcccccgctgcctaaagtgacacccaccaaggagctgcagcaagaaaatataatctcctttttcgaggacaactttgtgcctgaaatttcggtgacaacaccgtcccagaacgaagtacccgaggtcaaaaaagaggagacactgctggacttagactttgacccattcaaaccggaggttaccccagctgggagcgcgggtgttacccatagtccgatgagtcaaactgtggggtggtag

SEQ ID NO: 289775 - DNA, 1224 bp, Artificial Sequence
  derived and/or modified sequence
cccgctcctccgcgccgccgccagccccgctgcgcgctctgctcttcgcagctccccggacccgcagccatggccgacatcaagacgggcatcttcgccaagaacgtccagaagcgactcaaccgcgcgcaggaaaaggtcctccaaaagctggggaaagctgatgagacaaaagacgaacagttcgaagaatatgtccagaacttcaaacggcaagaagcagagggtaccagacttcagcgagaactccgaggatatttagcagcaatcaaaggcatgcaggaggcctccatgaagctcacagagtcgctgcatgaagtctatgagcctgactggtatgggcgggaagatgtgaaaatggttggtgagaaatgtgatgtgctgtgggaagacttccatcaaaaactcgtggatgggtccttgctaacactggatacctacctggggcaatttcctgacataaagaatcgcatcgccaagcgcagcaggaagctagtggactatgacagtgcccgccaccatctggaagctctgcagagctccaagaggaaggatgagagtcgaatctctaaggcagaagaagaatttcagaaagcacagaaagtgtttgaagagtttaacgttgacttacaagaagagttaccatcattatggtcaagacgagttggattttatgttaatactttcaaaaacgtctccagccttgaagccaagtttcataaggaaattgcggtgctttgccacaaactgtatgaagtgatgacaaaactgggtgaccagcacgccgacaaggccttcaccatccaaggagcgcccagacagtaccttgattcgggtcctctccgcattgcaaagacaccatcaccgcctgaggagccttcacccctcccgagcccgacagcaagtccaaatcatacattagcacctgcgtctcccgcaccagcacggcctcggtcaccttcacagacaaggaaagggcctcctgtcccacctctacctaaagtcaccccgacaaaggaactgcagcaggagaacatcatcagtttctttgaggacaactttgttccagaaatcagtgtgacaacaccttcccagaatgaagtccctgaggtgaagaaagaggagactttgctggatctggactttgatcctttcaagcccgaggtgacacctgcaggttctgctggagtgacccactcacccatgtctcagacagtgggttgg

SEQ ID NO: 289776 - DNA, 1158 bp, Artificial Sequence
  derived and/or modified sequence
atggctgacataaagactgggattttcgccaaaaatgtccagaagagactgaaccgcgcacaggaaaaagtcctgcagaagctgggtaaggctgatgagactaaggatgagcagtttgaagagtatgtgcaaaacttcaagagacaggaggctgagggcactcggctgcaaagggagcttagagggtatttggctgcgattaagggaatgcaggaagcatctatgaaacttaccgaatctcttcacgaggtgtacgaaccagactggtatgggagggaggacgtcaagatggttggcgaaaagtgtgatgtactgtgggaggattttcatcagaagctagtcgatggcagtctgctcacactcgatacctacttaggccagtttccagacatcaaaaataggatagctaagcggtctcggaaactcgtcgactatgacagtgcacgccaccatctcgaggctttgcagagctccaaacggaaagacgaaagccgaatttcaaaagctgaagaagagttccagaaggctcagaaagtgtttgaggagttcaacgtggatcttcaggaagagctccctagtctgtggtcgaggcgcgtgggattttacgtgaatacattcaaaaatgtttcttccctcgaggctaagtttcataaagagatcgctgtcctgtgccataaactgtacgaggtgatgactaaactcggtgatcagcatgcagacaaggcatttacaatacagggcgctcctagacagtacttagatagtggacctctgagaatcgccaagacaccctctccccctgaagagccctcgcctctgcctagccccaccgcttcccccaaccacaccttagcgccagcatcccccgctccagcaaggccacgttccccttcccagacaaggaaaggaccacctgtgcccccactgcctaaagtgacacctaccaaggagctgcagcaagagaatattatctcgtttttcgaggataactttgtgcctgagattagcgtcacaacccctagtcagaatgaagttcccgaagtcaaaaaggaagaaactttgctggacctggacttcgatccttttaagccagaggtgactcccgctggctcagccggagtgacccattccccgatgtcccagacggtcggatggtag

SEQ ID NO: 289777 - DNA, 1158 bp, Artificial Sequence
  derived and/or modified sequence
atggccgacatcaagaccggcatcttcgccaagaacgtgcagaagagactgaacagagcccaggagaaggtgctgcagaagctgggcaaggccgacgagaccaaggacgagcagttcgaggagtacgtgcagaacttcaagagacaggaggccgagggcaccagactgcagagagagctgagaggctacctggccgccatcaagggcatgcaggaggccagcatgaagctgaccgagagcctgcacgaggtgtacgagcccgactggtacggcagagaggacgtgaagatggtgggcgagaagtgcgacgtgctgtgggaggacttccaccagaagctggtggacggcagcctgctgaccctggacacctacctgggccagttccccgacatcaagaacagaatcgccaagagaagcagaaagctggtggactacgacagcgccagacaccacctggaggccctgcagagcagcaagagaaaggacgagagcagaatcagcaaggccgaggaggagttccagaaggcccagaaggtgttcgaggagttcaacgtggacctgcaggaggagctgcccagcctgtggagcagaagagtgggcttctacgtgaacaccttcaagaacgtgagcagcctggaggccaagttccacaaggagatcgccgtgctgtgccacaagctgtacgaggtgatgaccaagctgggcgaccagcacgccgacaaggccttcaccatccagggcgcccccagacagtacctggacagcggccccctgagaatcgccaagacccccagcccccccgaggagcccagccccctgcccagccccaccgccagccccaaccacaccctggcccccgccagccccgcccccgccagacccagaagccccagccagaccagaaagggcccccccgtgccccccctgcccaaggtgacccccaccaaggagctgcagcaggagaacatcatcagcttcttcgaggacaacttcgtgcccgagatcagcgtgaccacccccagccagaacgaggtgcccgaggtgaagaaggaggagaccctgctggacctggacttcgaccccttcaagcccgaggtgacccccgccggcagcgccggcgtgacccacagccccatgagccagaccgtgggctggtag

SEQ ID NO: 289778 - DNA, 2561 bp, Artificial Sequence
  derived and/or modified sequence
ctcactggggcttccttccgtctcgctcggagtttccctctgcgttcgctccgcgctgctggaggctgtcgtcccaatgctccccaaacggcggcgagcgcgggtcgggtcccctagcggcgatgccgcttcctccacgccgccctcgacgcgcttcccgggagtcgccatctacctggtcgagcctcgcatgggtcgcagccgccgggccttcctcacaggcctggcgcgctccaaaggcttccgcgtccttgacgcctgcagctccgaagcgacacatgttgtgatggaagagacctcagcagaggaggccgtcagctggcaggagcgcaggatggcagctgctcccccgggttgcacccccccagctctgctggacataagctggttaacagagagcctgggagctgggcagcctgtacctgtggagtgccggcaccgcctggaggtggctgggccaaggaaggggcctctgagcccagcatggatgcctgcctatgcctgccagcgccctacgcccctcacacaccacaacactggcctctccgaggctctggagatactggccgaggcagcaggctttgaaggcagtgagggccgcctcctcaccttctgcagagcagcctcggtgctcaaggcccttcccagccctgtcacaaccctgagccagctgcaggggcttccccactttggagaacactcctctagggttgtccaggagctgctggagcatggagtgtgtgaggaggtggagagagttcggcgctcagagagctcttcacccagatcttcggggtcggtgtgaagactgctgaccggtggtaccgggaaggactgcgaaccttagatgacctccgagagcagccccagaaactaacccaacagcagaaagcggggctccagcaccaccaggacctgagcaccccagtcctgcggtccgatgtagatgccctgcagcaggtggtggaggaagctgtggggcaggccctgcctggggccaccgtcacgctgaccggcggcttccgcagggccatgacgtggacttcctcatcacccaccccaaggagggtcaggaggcggggctgctgcctagagtgatgtgccgcctgcaggaccagggcctcatcctgtaccaccagcaccagcacagctgctgtgagtcccctacccgcctggcccaacagagccacatggacgcttttgagagaagtttctgcattttccgcctaccacaacctccaggggctgctgtggggggatccacgaggccctgcccatcctggaaggccgtgagagtggacttggtagttgcacccgtcagccagttccctttcgccctgctcggttggactggctccaagcttttccagcgggagctgcgccgcttcagccggaaggagaagggcctgtggctgaacagccatgggctgtttgacccggagcagaagacatttttccaagcggcttcagaggaagacatcttcagacacctgggccttgagtaccttcctccagagcagagaaacgcctgagcctgcctgtgtcccccacttccactcaggaaattgggctgcccccaacctggccactgaatgtctccaggcagatatgctgccccctgacccccaccttcacccctccccgccaaggcctggctcttccggaggtcaattgtgcctgcaggatcagttgagcccctgctggtgtgctgcagggtgtgatgaggtgggagccctcagtgccagcctcatcactgtgtgaccctgggtctgctcttagcctccccatggctcacgttcctgccctggatgggatgtgagtggggcccacatcgtggagctgtggtggggcctgcagtcatgaatggcaagtggtccctgatgtgcagtgtctcattagttgcactgcagttaactgtggctcctgcagggcaccctgcccagaatgcccagaagagaaccatgcatacctgcactgcatttgagagccatgagctggaggctgtggttcgtgccagcaaggagcctactgtctggtgtgctgtaggcatctggagagggagagggcctgggtaggagctgggaggaagataattttcaactatggggcttcagtactgcagcgccccgagccaggctctgtgcttctgcctttaaggcctgttctcagcacaatgtctcaaaaataggtcatatcctgccactcccgtcgcagagccctttaatggttccaaaccctaagtccacacatagcccctggctctggcatctctccagccccactggccccgagctgcttgactcaccggcttcctatttgatgcacccaggcccccttgtggccaactccctccccttctcactgaggcagaagcactgaggtgggctggacatgggtgccctccacgtccctcatatccccaggcacactctggcctcaggttttgccctggccatgtcatctacctggagtgggccctccccttcttcaggccttgaatcaaaagccactttgttaggcgaggatttcccagaccactcatcacattaaaaaatattttg

SEQ ID NO: 289779 - DNA, 1062 bp, Artificial Sequence
  derived and/or modified sequence
atggagaagaccctggagaccgtgcccctggagagaaagaagagagagaaggagcagttcagaaagctgttcatcggcggcctgagcttcgagaccaccgaggagagcctgagaaactactacgagcagtggggcaagctgaccgactgcgtggtgatgagagaccccgccagcaagagaagcagaggcttcggcttcgtgaccttcagcagcatggccgaggtggacgccgccatggccgccagaccccacagcatcgacggcagagtggtggagcccaagagagccgtggccagagaggagagcggcaagcccggcgcccacgtgaccgtgaagaagctgttcgtgggcggcatcaaggaggacaccgaggagcaccacctgagagactacttcgaggagtacggcaagatcgacaccatcgagatcatcaccgacagacagagcggcaagaagagaggcttcggcttcgtgaccttcgacgaccacgaccccgtggacaagatcgtgctgcagaagtaccacaccatcaacggccacaacgccgaggtgagaaaggccctgagcagacaggagatgcaggaggtgcagagcagcagaagcggcagaggcggcaacttcggcttcggcgacagcagaggcggcggcggcaacttcggccccggccccggcagcaacttcagaggcggcagcgacggctacggcagcggcagaggcttcggcgacggctacaacggctacggcggcggccccggcggcggcaacttcggcggcagccccggctacggcggcggcagaggcggctacggcggcggcggccccggctacggcaaccagggcggcggctacggcggcggctacgacaactacggcggcggcaactacggcagcggcaactacaacgacttcggcaactacaaccagcagcccagcaactacggccccatgaagagcggcaacttcggcggcagcagaaacatgggcggcccctacggcggcggcaactacggccccggcggcagcggcggcagcggcggctacggcggcagaagcagatactag

SEQ ID NO: 289780 - DNA, 1062 bp, Artificial Sequence
  derived and/or modified sequence
atggagaaaactctcgaaacagtaccgctggaaaggaaaaaacgggagaaagagcagtttaggaagctattcatcggcggcttgtctttcgagacgaccgaggagtcgcttcgaaattactatgagcagtggggcaaactgaccgactgcgtggtaatgcgagatcctgcttctaagcggtctagaggcttcggtttcgtgaccttttccagcatggcagaggtggacgcagccatggctgccaggccccacagtatcgacggaagggtagtggagcctaagcgtgctgtggccagagaagagagcggcaaaccaggcgcccatgttaccgtcaaaaagttgtttgtgggcggaattaaggaagacactgaagaacaccacctccgcgattacttcgaggagtacggaaaaattgatactattgagattatcactgaccgccagtccggcaaaaagcgcgggttcggctttgtgacgtttgatgaccatgacccggttgacaagatcgtgttgcagaaataccacacgatcaatggccacaatgcagaagttcggaaggctctgtcccgtcaggaaatgcaagaggtccagtcttcccgcagtggaaggggcgggaatttcggtttcggggattcgcgaggcggcgggggaaacttcggacccggccctggctcaaattttcggggcggatccgatggttatggctccgggaggggcttcggggatggctacaatgggtacggcggcggcccaggtggcggtaatttcggcggcagtcccggatatggcgggggacgaggaggatatgggggaggaggccccgggtatgggaatcaggggggcggctacggaggaggctacgacaattacggtggcgggaattacggttcagggaactacaatgatttcggaaactataaccagcagccaagcaactacggccccatgaaaagcgggaactttggaggcagcagaaatatggggggcccatatggcggcggtaattatgggcctggtggaagcggcgggagcggaggatatggagggcgctccagatattag

SEQ ID NO: 289781 - DNA, 1062 bp, Artificial Sequence
  derived and/or modified sequence
atggaaaaaactttggagacagtgcctctagagcggaaaaagagggagaaggagcagttcaggaagctctttataggaggactatctttcgaaaccaccgaagaaagtctaagaaattattacgagcagtggggtaaacttacagactgcgtggtgatgagggatccagcatccaaacgttcccggggctttggcttcgtcaccttctcttcgatggcggaagtcgacgccgctatggccgccagaccccacagcatcgacggccgagtggtggagcctaagcgtgccgtggccagagaagagagcgggaaacccggcgctcacgtcacagtcaaaaaactgttcgtgggtggcatcaaggaagacacggaagagcaccatcttagagattacttcgaggagtacggcaagatagataccatcgagatcattacagatcggcaatccggaaagaaacgcggatttggctttgttaccttcgatgaccacgatccagtagataaaatcgttctgcaaaagtaccacactatcaatggccacaacgctgaagtgcggaaagccctcagtaggcaagagatgcaggaagtgcaatccagcaggtcaggccggggaggcaatttcggatttggcgacagtcggggtggaggcggtaactttggacctggcccaggaagcaacttccgcgggggctctgacgggtatggctctgggaggggatttggggacggctacaatggttacgggggagggcccggcggcggtaacttcggcggctccccaggttacggtggagggcgcggagggtatggcggtggtggtccaggttatggcaaccagggcgggggctatggaggggggtacgacaattacggcggcggcaattacgggtctgggaactataatgacttcggcaactacaatcagcagccatcaaattatggcccaatgaagtcagggaatttcggtgggtcgcgcaatatgggtgggccatatgggggcggtaactacggtccgggagggtctggggggtctggaggctacggtggccgatctagatattag

SEQ ID NO: 289782 - DNA, 3664 bp, Artificial Sequence
  derived and/or modified sequence
agtagcagcagcgccgggtcccgtgcggaggtgctcctcgcagagttgtttctcgagcagcggcagttctcactacagcgccaggacgagtccggttcgtgttcgtccgcggagatctctctcatctcgctcggctgcgggaaatcgggctgaagcgactgagtccgcgatggagaaaactttagaaactgttcctttggagaggaaaaagagagaaaaggaacagttccgtaagctctttattggtggcttaagctttgaaaccacagaagaaagtttgaggaactactacgaacaatggggaaagcttacagactgtgtggtaatgagggatcctgcaagcaaaagatcaagaggatttggttttgtaactttttcatccatggctgaggttgatgctgccatggctgcaagacctcattcaattgatgggagagtagttgagccaaaacgtgctgtagcaagagaggaatctggaaaaccaggggctcatgtaactgtgaagaagctgtttgttggcggaattaaagaagatactgaggaacatcaccttagagattactttgaggaatatggaaaaattgataccattgagataattactgataggcagtctggaaagaaaagaggctttggctttgttacttttgatgaccatgatcctgtggataaaatcgtattgcagaaataccataccatcaatggtcataatgcagaagtaagaaaggctttgtctagacaagaaatgcaggaagttcagagttctaggagtggaagaggaggcaactttggctttggggattcacgtggtggcggtggaaatttcggaccaggaccaggaagtaactttagaggaggatctgatggatatggcagtggacgtggatttggggatggctataatgggtatggaggaggacctggaggtggcaattttggaggtagccccggttatggaggaggaagaggaggatatggtggtggaggacctggatatggcaaccagggtgggggctacggaggtggttatgacaactatggaggaggaaattatggaagtggaaattacaatgattttggaaattataaccagcaaccttctaactacggtccaatgaagagtggaaactttggtggtagcaggaacatggggggaccatatggtggaggaaactatggtccaggaggcagtggaggaagtgggggttatggtgggaggagccgatactgagcttcttcctatttgccatgggcttcactgtataaataggagaggatgagagcccagaggtaacagaacagcttcaggttatcgaaataacaatgttaaggaaactcttatctcagtcatgcataaatatgcagtgatatggcagaagacaccagagcagatgcagagagccattttgtgaatggattggattatttaataacattaccttactgtggaggaaggattgtaaaaaaaaatgcctttgagacagtttcttagctttttaattgttgtttctttctagtggtctttgtaagagtgtagaagcattccttctttgataatgttaaatttgtaagtttcaggtgacatgtgaaaccttttttaagatttttctcaaagttttgaaaagctattagccaggatcatggtgtaataagacataacgtttttcctttaaaaaaatttaagtgcgtgtgtagagttaagaagctgttgtacatttatgatttaataaaataattctaaaggaaattgtgtaattatagactttttattttaaataagttaaggagtgggtagtataattaaggtccgttgcaaagctgttgttatatttgtataagataaatgctggtcagatgtaagtgtgttgtctgcaattcatcaggattaaattatgtagataacttaagggatatctctgcaaggagaaacacctttttagatcttttagatgctgcttcttcaatgcaaggaaaggaaataaccccagcgaggtactcttcagggacacaggtctagtacaagagaactcttgacggctactaagttcagccagtcttaaaaaactgtgctgtttctacaaaactttaactacagtagtttataaggatgccaacgaaagctgagggtgtagagcaaaatagttctaagcttcagttaaacttctttaggtaagatcttatttacttttcctttcttaattttcctccctaaaagataaactaatactcttaaatggtctttcagtatagtggttcttacgtagtttaacatagctataaattgagtttaacaatttataaactcaagagaataatttttataaaccctgttttccaatctgtcatttacttaaattattttggttgtttttccctttttttccttcttttcccaccccctccccctccatgtgaagatttgggtgcttaacatatcatttttttccctgccggaattttagcattgatatgaaccatggacaagtatattctgctgccacaaagactgtaaagtgcttcatttcaacagctgaggcaagccaagtgatcattaataaagcttttcttggttccttcagtggtgttggtagtaaaatggtaggtaaaagttaggctgcaagttcaataaatcatgagatttcccatcgttacacccttgtgtattcacatttcttggatcaaacattttgagtgaactaggggtttttattaaagacatttgttgtatttatggttgtaactgtacatgcttatcaggatgagactgaaagaaggtagggcaaaaatggttgaatctattttcagatagtagttcatacttgagtgaagtgtcttgtctgcattatgaagcctggtatgtatccagtactaaataggtgggttaaatgtggtaattctagttcagtgtcttaccctgaagagaaagttgtaggttggctgttgaaattcattccttagatatgatcagtttgattgcccggctttattgcctttacaggaatgtgatactcagggcttactctatacaccaatgagtcttctttgatcctaagaccaccactgaagttgtttaggttcttttggacaaacatgataaacttcttcagatactttttttttcctttggcaggaaggtgtcttgctgcaggtaactaatgaagaagtggtcaaccacagagtcttcaagaaataagaaattctgtaccatctgaaagtagttcttgttggtgccttcatttaaaaagcactctttaaaataaaagggaaatgttttctgataaaacaaacatttagttgaggttcttgatataaaacaattacaaaatgagtgttgtttgtaaaacagtaacatcaaattggctagagagataaatgtatcatgttttaaattaggttttgtgagtagacagattacaattctattttaaatataaagtttataaaataaatactttttgtatccaaatacttggtgtaatgtttacacataaaatgtgtgaatcttgttctataaatatttggttgtctaaaagatcaccatcccctaaatttttaaaagcagtttcacaaagctatgcatattttaatattaacaggtaaatgagaagagcattgtggacattattggctgtccccaataaaatgctgttcattatgcactgta

SEQ ID NO: 289783 - DNA, 1724 bp, Artificial Sequence
  derived and/or modified sequence
agtagcagcagcgccgggtcccgtgcggaggtgctcctcgcagagttgtttctcgagcagcggcagttctcactacagcgccaggacgagtccggttcgtgttcgtccgcggagatctctctcatctcgctcggctgcgggaaatcgggctgaagcgactgagtccgcgatggagaaaactttagaaactgttcctttggagaggaaaaagagagaaaaggaacagttccgtaagctctttattggtggcttaagctttgaaaccacagaagaaagtttgaggaactactacgaacaatggggaaagcttacagactgtgtggtaatgagggatcctgcaagcaaaagatcaagaggatttggttttgtaactttttcatccatggctgaggttgatgctgccatggctgcaagacctcattcaattgatgggagagtagttgagccaaaacgtgctgtagcaagagaggaatctggaaaaccaggggctcatgtaactgtgaagaagctgtttgttggcggaattaaagaagatactgaggaacatcaccttagagattactttgaggaatatggaaaaattgataccattgagataattactgataggcagtctggaaagaaaagaggctttggctttgttacttttgatgaccatgatcctgtggataaaatcgtattgcagaaataccataccatcaatggtcataatgcagaagtaagaaaggctttgtctagacaagaaatgcaggaagttcagagttctaggagtggaagaggaggcaactttggctttggggattcacgtggtggcggtggaaatttcggaccaggaccaggaagtaactttagaggaggatctgatggatatggcagtggacgtggatttggggatggctataatgggtatggaggaggacctggaggtggcaattttggaggtagccccggttatggaggaggaagaggaggatatggtggtggaggacctggatatggcaaccagggtgggggctacggaggtggttatgacaactatggaggaggaaattatggaagtggaaattacaatgattttggaaattataaccagcaaccttctaactacggtccaatgaagagtggaaactttggtggtagcaggaacatggggggaccatatggtggaggaaactatggtccaggaggcagtggaggaagtgggggttatggtgggaggagccgatactgagcttcttcctatttgccatggcattgatatgaaccatggacaagtatattctgctgccacaaagactgtaaagtgcttcatttcaacagctgaggcaagccaagtgatcattaataaagcttttcttggttccttcagtggtgttggtagtaaaatggaaggtgtcttgctgcaggtaactaatgaagaagtggtcaaccacagagtcttcaagaaataagaaattctgtaccatctgaaagtagttcttgttggtgccttcatttaaaaagcactctttaaaataaaagggaaatgttttctgataaaacaaacatttagttgaggttcttgatataaaacaattacaaaatgagtgttgtttgtaaaacagtaacatcaaattggctagagagataaatgtatcatgttttaaattaggttttgtgagtagacagattacaattctattttaaatataaagtttataaaataaatactttttgtatccaaa

SEQ ID NO: 289784 - DNA, 1062 bp, Artificial Sequence
  derived and/or modified sequence
atggagaagaccctggagaccgtgcccctggagaggaagaagcgggagaaggagcagttcaggaagctgttcatcggcggcctgagctttgagaccacagaggagagcctgaggaactactatgagcagtggggcaagctgacagactgtgtggtgatgagggaccctgccagcaagaggagccggggcttcggctttgtgaccttcagctccatggccgaggtggatgctgccatggccgcccggccccacagcattgatggccgggtggtggagcccaagagagctgtggcccgggaggagagcggcaagccaggggcccacgtgacagtgaagaagctgtttgtgggcggcatcaaggaggacacagaggagcaccacctgcgggactactttgaggagtatggcaagattgacaccatcgagatcatcacagaccggcagagcggcaagaagaggggctttggatttgtgacctttgatgaccatgaccctgtggacaagatcgtgctgcagaagtaccacaccatcaatggccacaatgctgaggtgaggaaggccctgagccggcaggagatgcaggaggtgcagagcagccgcagcggccggggcggcaactttggatttggagacagccggggcggcggcggcaactttggacctggccctggcagcaacttccggggcggcagtgatggctacggcagcggccggggctttggagatggctacaacggctatggaggcggccctgggggcggcaactttggaggcagccctggctacggcggcggccggggcggctatggaggcggcggccctggctacggcaaccagggcggcggctatggaggcggctatgacaactacggcggcggcaactacggcagcggcaactacaatgactttggaaactacaaccagcagcccagcaactacggccccatgaagagcggcaactttggaggcagcaggaacatgggcggcccctatggaggcggcaactacggccctgggggcagcggcggcagcggcggctatggaggccgcagccgctactag

SEQ ID NO: 289785 - DNA, 1062 bp, Artificial Sequence
  derived and/or modified sequence
atggagaagaccctggagaccgtgcccctggagcggaagaagcgggagaaggagcagttcaggaagctgttcattggcgggctatcatttgagaccacggaggagtctctccgaaactattatgaacaatggggcaagctgacagactgtgttgtcatgagggaccccgcctctaagaggtcgcggggctttggctttgtcacctttagctccatggctgaggttgatgctgcaatggccgcccggccacattcaattgacggccgagtggtcgaacctaaaagggcggttgcgagggaggaaagtggtaagcccggcgctcatgttaccgtgaaaaagcttttcgtgggcggaataaaggaggatacagaggagcaccacttacgggactattttgaagagtacggcaaaatcgacactattgaaattattactgacagacaatccggcaagaagagaggttttggatttgtgacttttgacgatcatgaccccgtggataagattgtgcttcaaaagtatcatacgatcaatggccataatgccgaggtacggaaagccttgagccggcaagaaatgcaagaagtccagtcaagccgtagtgggcgggggggaaacttcggattcggcgactcccggggcggtggcggtaacttcggccctgggcctggtagtaacttcaggggcggcagcgatggctacgggagcgggcgcgggttcggcgatgggtacaacggctacgggggcgggccgggaggaggcaattttggtggttcgcctggctatggggggggacgcgggggatacggaggaggagggccagggtacggcaatcagggggggggatacggtggcggctatgacaactacggcggcggcaattacggttcaggcaactacaacgacttcggcaactacaaccaacagcctagtaactacggacctatgaaaagtgggaattttggaggaagcaggaacatgggcggcccttatggaggtggaaactatggtccaggaggaagcggcggctccggagggtatggcggaagatctcggtactag

SEQ ID NO: 289786 - DNA, 1062 bp, Artificial Sequence
  derived and/or modified sequence
atggagaagaccctggagaccgtgcccctggagcggaagaagcgggaaaaggagcagttccgaaaactgtttattggcggactgtcattcgaaactaccgaggagagtttacgcaactattatgaacagtgggggaagctgaccgattgcgtggtgatgagagaccccgcctctaagcgatctcgcggtttcggcttcgtcaccttctcctctatggctgaagtggacgcagctatggctgcccgcccacacagcatagacggccgggtggtagagcctaagcgcgcagtcgcacgggaggaaagtggcaaacccggcgctcatgttactgtgaagaagctgttcgtaggaggcataaaagaggacaccgaagagcaccacttaagggactatttcgaagaatacggcaaaatcgatactatagaaattatcaccgaccggcagagtggcaagaagagaggctttggtttcgtcacgttcgacgatcacgatcctgtcgataaaatcgtattacagaagtaccacacaatcaacggacataacgccgaagtgcgaaaggccctgagtcgtcaggagatgcaggaagtccaaagtagcaggtctggacggggagggaatttcggttttggggactcccggggaggaggaggcaattttggaccaggtcccggtagtaacttcagagggggcagtgacgggtatggcagtggacggggatttggcgatggatacaacgggtacggtggcggacctggcggcgggaacttcggaggatcccccggatatggcgggggccgggggggctatgggggcgggggccccggctatggtaaccaggggggtggatatgggggcggttacgataattacggcggcggtaattacgggtcaggtaactacaacgactttgggaattacaaccaacagccatctaactatggacccatgaaaagcgggaattttggcggctctcgcaatatgggtggaccttacggcgggggtaattacgggccgggcggcagtggcggatccggcggttatggcgggcgctctcggtactag

SEQ ID NO: 289787 - DNA, 1062 bp, Artificial Sequence
  derived and/or modified sequence
atggagaagacccttgaaacggtgcccctggagagaaagaagagggaaaaggagcagtttcgcaagctgttcatcggcggattgagcttcgagaccaccgaagagtcgctgcgcaattactacgagcaatgggggaagttaactgactgtgtggtgatgcgcgacccagcatctaagagaagtcggggtttcggcttcgttacattctcctccatggctgaggttgacgctgctatggcagcaagaccacactctatcgatgggagggtggtggaacctaagcgggctgtagccagggaagagtctgggaagcctggcgcacacgtgaccgtgaaaaagctttttgtggggggaatcaaggaagacacagaggaacaccaccttcgcgactattttgaggagtacggcaaaattgacacgattgagatcattacggaccggcagtccggcaagaaaagagggttcgggtttgttaccttcgacgaccatgaccctgtggataaaattgtgttacagaagtatcatactataaatgggcataatgctgaagtacgtaaggctctttcacgtcaggagatgcaggaagtgcagagttccagatctggtcgcggagggaactttgggttcggggattcaagggggggaggaggcaattttggcccaggcccaggaagcaattttcggggtggttcggacggttatggctccggtaggggctttggagacggatacaacgggtacggagggggacctggcggaggaaatttcggaggcagtcctggatatgggggaggtcgcggaggatatggaggtggagggccagggtacgggaaccaggggggaggttatggtggcggatacgataattatggcggtgggaattatggtagcggaaattacaacgatttcggcaactacaatcagcagcccagtaattacggccctatgaagagcggtaactttggcggatccaggaacatggggggtccttacggcggaggaaattacggccctggcggtagcggtggaagcggcggatatgggggaagaagtaggtactag

SEQ ID NO: 289788 - DNA, 1062 bp, Artificial Sequence
  derived and/or modified sequence
atggaaaaaacgttggaaacggtgccccttgagcgaaagaagcgtgaaaaagagcagtttcggaagctgttcatcggaggtctgtccttcgagacaactgaagaatccctccggaattactacgagcaatggggcaagctaactgattgcgtagtgatgcgcgacccagccagcaaacgtagtcgaggattcggcttcgtgacttttagcagcatggctgaggtggacgccgcaatggccgcacgtccacacagtattgacggcagggtcgttgaaccaaagcgagccgtggccagggaggagtcgggaaaacccggtgcccacgtcacagtgaagaagttattcgtaggcggtatcaaggaagatacggaagaacatcacctgagggattactttgaagagtacgggaaaatcgacaccattgaaatcatcaccgaccgacagagcggaaagaaacgcggattcggcttcgtgacattcgacgaccacgacccggttgataagatagtgctgcagaagtaccatacgatcaacggccacaatgccgaagtgcggaaagctctgtcacggcaggaaatgcaggaggtgcagagtagcagaagtggcagaggaggaaatttcgggttcggagatagtcgagggggtggcggaaacttcggtccgggacctgggagtaatttcaggggtggatcggatgggtatgggtcgggaaggggcttcggggacggatataatgggtatggcggtggtccagggggagggaactttggcggtagccccggatatgggggagggaggggcggttacggaggcggaggtcctggatatgggaatcaaggaggcggatatggcggagggtacgacaactacggaggagggaattatggcagtgggaattataatgatttcggcaattataaccaacagccgtctaactacgggcctatgaaatctgggaacttcggaggctcacgtaatatgggtgggccttatggtggaggcaactacggcccaggcggaagcggcggttccgggggatacgggggacgatccagatactag

SEQ ID NO: 289789 - protein, 131 aa, Artificial Sequence
  derived and/or modified sequence
MVDENDIRALNVRHYRDHIGVVSQEPVLFGTTISNNIKYGRDDVTDEEMERAAREANAYDFIMEFPNKFNTLVGEKGAQMSGGQKQRIAIARALVRNPKILILDEATSALDSESKSAVQAALEKDTPRYSF

SEQ ID NO: 289790 - DNA, 1483 bp, Artificial Sequence
  derived and/or modified sequence
attgcttctcggccttttggctaagatcaagtgtaatctgtgttcttttttatttggtcatatcttccattctttcttacctaattcctctaatatctctctgtgagcctaaaccaataattatatattacattctattgtctttcttatataactgcagaaagataaatatcactttgtttgttcctgtaggttttctttagtgtaatccatagcagttattgcattggagcagcagtccctcactttgaaaccttcgcaatagcccgaggagctgcctttcatattttccaggttattgataagaaacccagtatagataacttttccacagctggatataaacctgaatccatagaaggaactgtggaatttaaaaatgtttctttcaattatccatcaagaccatctatcaagattctgaaaggtctgaatctcagaattaagtctggagagacagtcgccttggtcggtctcaatggcagtgggaagagtacggtagtccagcttctgcagaggttatatgatccggatgatggctttatcatggtggatgagaatgacatcagagctttaaatgtgcggcattatcgagaccatattggagtggttagtcaagagcctgttttgttcgggaccaccatcagtaacaatatcaagtatggacgagatgatgtgactgatgaagagatggagagagcagcaagggaagcaaatgcgtatgattttatcatggagtttcctaataaatttaatacattggtaggggaaaaaggagctcaaatgagtggagggcagaaacagaggatcgcaattgctcgtgccttagttcgaaaccccaagattctgattttagatgaggctacgtctgccctggattcagaaagcaagtcagctgttcaagctgcactggagaagaaaaaataatacaacaaagacgtattgataatctaccacactatctacgttgaggtatctggaaccacagtggtatgaattgcactatctccctaatctttacactaattctggctaaaagacagcatcagctcaaattttcctgatcagttttttagcaggctttggctgccaaaatctcttctgtgttttaagtctgaagcaattacagttgaatattttgttgttgttcactatgaggagtatatcggttttaggtcacaggaatgatctagtagagatgtatttttctagtacacttgatagtaccttgaatatgtacagtacatgtaggcccattttatggacctctgaggcacagttttttcctttttaagttattagatatttctgtgatttatttgatgcactcagatacaaattcatgctataataagttaaattgtaacataatatctaccttaatcaaatatttatagtttaggccaggagcctggcaaagtaaagatgacacagatgaaatgcttgataagtaaataaatatgagaagagatatatattaaaa

SEQ ID NO: 289791 - DNA, 2247 bp, Artificial Sequence
  derived and/or modified sequence
attgcttctcggccttttggctaagatcaagtgtaatctgtgttcttttttatttggtcatatcttccattctttcttacctaattcctctaatatctctctgtgagcctaaaccaataattatatattacattctattgtctttcttatataactgcagaaagataaatatcactttgtttgttcctgtaggttttctttagtgtaatccatagcagttattgcattggagcagcagtccctcactttgaaaccttcgcaatagcccgaggagctgcctttcatattttccaggttattgataagaaacccagtatagataacttttccacagctggatataaacctgaatccatagaaggaactgtggaatttaaaaatgtttctttcaattatccatcaagaccatctatcaagattctgaaaggtctgaatctcagaattaagtctggagagacagtcgccttggtcggtctcaatggcagtgggaagagtacggtagtccagcttctgcagaggttatatgatccggatgatggctttatcatggtggatgagaatgacatcagagctttaaatgtgcggcattatcgagaccatattggagtggttagtcaagagcctgttttgttcgggaccaccatcagtaacaatatcaagtatggacgagatgatgtgactgatgaagagatggagagagcagcaagggaagcaaatgcgtatgattttatcatggagtttcctaataaatttaatacattggtaggggaaaaaggagctcaaatgagtggagggcagaaacagaggatcgcaattgctcgtgccttagttcgaaaccccaagattctgattttagatgaggctacgtctgccctggattcagaaagcaagtcagctgttcaagctgcactggagaaggatacccccaggtattcattttgacctaatttcacctcaagtggagaatcgctgaccttgaaccagcgcccttcgacagctctggcccctcaaacctcaccctgacctcctgctgcctatgagctactgcacatacctcaaggccatatgcagttgtggccctgcaccaaattacactgaatctaggaggggagttggcagtggcggtatgaaaaaccattgaacagttttctcgatggcctgactcccttataaaccagagccttcagaccccttacaaggcttaatggcacattttactttgcatttgcttggaagtgagttaagcgtttttttttctctaagaaaatcgcaggcttctttttttaaaatgctgactttatggaaccagaaacggatactggcaggctaaatgtccactgcttcttgaaaaatctcttagttactattatttagtagcaaatcagattgtgcaagtttgaacgcttgtttccctcccataataacaatgccacatgttgcttgtgtgataaataatctttgtttactgtggacacttcggcaatttggttcatcttggtacagaaaatacaaagacaggactaatattttattcattttttatacttagtaactaggacagggatctgtatttagactatattcaagcctcgctctgtcacccatgcttgagtgcaacctctgcccactgtgttcaagcgattctcctgcctcagcctcctgagtagctgggagtacaggcgtgcatcaccacacccagctaatttttgtatttttagtagagacaaggttttgccatgttgaccaggctggtctcaaactcctgacctcaggtgatccgcccacctcggcctcccaaagtgctgggattacaggtgtgcgtctccgcgcccggccagttacataagattttaaaaaatgtattgtaataggctctctgattgtttagaaggtttcatgttgtgcccgcagtattttcatccactggtaatcactttaggtaatcaaaactagttcagacttttaaaataaatagttgcttggtgacatgataaactaataaatgttattcttattggttaatatgaaacatctatcaaaagtgaaaaaagaagaatgcagaatgtttgtaaactgattccaaaattacacaaaatagcaactgtgaaaaaaatgaaggcaatatatgaaaataataacagctatgtggcataattatgggggaatttaacttatttcaaaaattcatttactgtccctgtttttcagttgtttaaaggagaaagagattaaatcaatgtagaaata

SEQ ID NO: 289792 - protein, 815 aa, Artificial Sequence
  derived and/or modified sequence
MERAESSRSKLKDYGVDLIEVSDNGCGVEEENFEGLTLKHHTSKIQEFADLTQVETFGFRGEALSSLCALSDVTISTCHASAKVGTRLMFDHNGKIIQKTPYPRPRGTTVSVQQLFSTLPVRHKEFQRNIKKEYAKMVQVLHAYCIISAGIRVSCTNQLGQGKRQPVVCTGGSPSIKENIGSVFGQKQLQSLIPFVQLPPSDSVCEEYGLSCSDALHNLFYISGFISQCTHGVGRSSTDRQFFFINRRPCDPAKVCRLVNEVYHMYNRHQYPFVVLNISVDSECVDINVTPDKRQILLQEEKLLLAVLKTSLIGMFDSDVNKLNVSQQPLLDVEGNLIKMHAADLEKPMVEKQDQSPSLRTGEEKKDVSISRLREAFSLRHTTENKPHSPKTPEPRRSPLGQKRGMLSSSTSGAISDKGVLRPQKEAVSSSHGPSDPTDRAEVEKDSGHGSTSVDSEGFSIPDTGSHCSSEYAASSPGDRGSQEHVDSQEKAPKTDDSFSDVDCHSNQEDTGCKFRVLPQPTNLATPNTKRFKKEEILSSSDICQKLVNTQDMSASQVDVAVKINKKVVPLDFSMSSLAKRIKQLHHEAQQSEGEQNYRKFRAKICPGENQAAEDELRKEISKTMFAEMEIIGQFNLGFIITKLNEDIFIVDQHATDEKYNFEMLQQHTVLQGQRLIAPQTLNLTAVNEAVLIENLEIFRKNGFDFVIDENAPVTERAKLISLPTSKNWTFGPQDVDELIFMLSDSPGVMCRPSRVKQMFASRACRKSVMIGTALNTSEMKKLITHMGEMDHPWNCPHGRPTMRHIANLGVISQN

SEQ ID NO: 289793 - DNA, 2448 bp, Artificial Sequence
  derived and/or modified sequence
atggagagagccgagagcagcagaagcaagctgaaggactacggcgtggacctgatcgaggtgagcgacaacggctgcggcgtggaggaggagaacttcgagggcctgaccctgaagcaccacaccagcaagatccaggagttcgccgacctgacccaggtggagaccttcggcttcagaggcgaggccctgagcagcctgtgcgccctgagcgacgtgaccatcagcacctgccacgccagcgccaaggtgggcaccagactgatgttcgaccacaacggcaagatcatccagaagaccccctaccccagacccagaggcaccaccgtgagcgtgcagcagctgttcagcaccctgcccgtgagacacaaggagttccagagaaacatcaagaaggagtacgccaagatggtgcaggtgctgcacgcctactgcatcatcagcgccggcatcagagtgagctgcaccaaccagctgggccagggcaagagacagcccgtggtgtgcaccggcggcagccccagcatcaaggagaacatcggcagcgtgttcggccagaagcagctgcagagcctgatccccttcgtgcagctgccccccagcgacagcgtgtgcgaggagtacggcctgagctgcagcgacgccctgcacaacctgttctacatcagcggcttcatcagccagtgcacccacggcgtgggcagaagcagcaccgacagacagttcttcttcatcaacagaagaccctgcgaccccgccaaggtgtgcagactggtgaacgaggtgtaccacatgtacaacagacaccagtaccccttcgtggtgctgaacatcagcgtggacagcgagtgcgtggacatcaacgtgacccccgacaagagacagatcctgctgcaggaggagaagctgctgctggccgtgctgaagaccagcctgatcggcatgttcgacagcgacgtgaacaagctgaacgtgagccagcagcccctgctggacgtggagggcaacctgatcaagatgcacgccgccgacctggagaagcccatggtggagaagcaggaccagagccccagcctgagaaccggcgaggagaagaaggacgtgagcatcagcagactgagagaggccttcagcctgagacacaccaccgagaacaagccccacagccccaagacccccgagcccagaagaagccccctgggccagaagagaggcatgctgagcagcagcaccagcggcgccatcagcgacaagggcgtgctgagaccccagaaggaggccgtgagcagcagccacggccccagcgaccccaccgacagagccgaggtggagaaggacagcggccacggcagcaccagcgtggacagcgagggcttcagcatccccgacaccggcagccactgcagcagcgagtacgccgccagcagccccggcgacagaggcagccaggagcacgtggacagccaggagaaggcccccaagaccgacgacagcttcagcgacgtggactgccacagcaaccaggaggacaccggctgcaagttcagagtgctgccccagcccaccaacctggccacccccaacaccaagagattcaagaaggaggagatcctgagcagcagcgacatctgccagaagctggtgaacacccaggacatgagcgccagccaggtggacgtggccgtgaagatcaacaagaaggtggtgcccctggacttcagcatgagcagcctggccaagagaatcaagcagctgcaccacgaggcccagcagagcgagggcgagcagaactacagaaagttcagagccaagatctgccccggcgagaaccaggccgccgaggacgagctgagaaaggagatcagcaagaccatgttcgccgagatggagatcatcggccagttcaacctgggcttcatcatcaccaagctgaacgaggacatcttcatcgtggaccagcacgccaccgacgagaagtacaacttcgagatgctgcagcagcacaccgtgctgcagggccagagactgatcgccccccagaccctgaacctgaccgccgtgaacgaggccgtgctgatcgagaacctggagatcttcagaaagaacggcttcgacttcgtgatcgacgagaacgcccccgtgaccgagagagccaagctgatcagcctgcccaccagcaagaactggaccttcggcccccaggacgtggacgagctgatcttcatgctgagcgacagccccggcgtgatgtgcagacccagcagagtgaagcagatgttcgccagcagagcctgcagaaagagcgtgatgatcggcaccgccctgaacaccagcgagatgaagaagctgatcacccacatgggcgagatggaccacccctggaactgcccccacggcagacccaccatgagacacatcgccaacctgggcgtgatcagccagaactag

SEQ ID NO: 289794 - DNA, 2448 bp, Artificial Sequence
  derived and/or modified sequence
atggaacgggctgaatcttctaggtcaaagctcaaagactacggcgtggacttgattgaggtgtccgacaacggatgtggggttgaggaagagaacttcgagggcctgaccctgaaacaccacactagcaaaatccaggaattcgctgacctaacacaggtcgagacattcgggttcagaggggaggccctgtccagcctgtgcgcgctatcagatgtgacaatttcaacatgtcatgccagtgctaaagtagggacgcgcctgatgttcgatcataatggcaagatcatccagaaaacaccctaccccagacccagaggcactacggtaagcgtgcagcagctgtttagcacgctgccagtgaggcacaaggagttccagcggaacatcaaaaaagagtatgccaagatggttcaggtcctccacgcctactgcattatttcggccggaatccgcgtatcctgcaccaaccaactgggacagggcaagaggcagcctgtggtgtgcacaggaggctctccctcaattaaggagaacattgggtctgtctttggccagaagcaattacagagtctgattccctttgtccagctccctccctctgattcagtgtgcgaggagtacggattgagttgtagcgacgcccttcataacctgttctacatttctggatttatttcacagtgtactcatggagtgggcaggtctagtactgatcgccagttttttttcatcaatcgcagaccttgcgaccctgccaaggtctgcaggctggtgaacgaagtttaccatatgtacaacagacatcagtatcccttcgttgtgttgaacatttccgtcgattcggaatgcgtggatattaacgttacacctgacaagcgacaaattcttcttcaggaggagaagctgctgctggccgtcttaaagacttcactcataggcatgttcgatagcgatgtaaataaactcaacgtgtctcaacagcccctcctggacgtggaagggaacctcatcaaaatgcatgccgcagatttagaaaaaccaatggtcgaaaagcaggaccagtctccgtcactgcggacgggagaggaaaagaaggacgtcagcatctccaggctgcgagaagccttcagcttgaggcacaccactgagaacaagccacactccccaaagactcccgaacccagacggtcacccctggggcaaaagcgcggcatgctatcctctagtacttcaggggccatctcagacaaaggagtgctgcggccacaaaaggaagcagtgtcatcttcgcacggaccaagcgacccgactgatagggcagaggttgaaaaggacagtgggcacggtagtacctcagtggatagcgagggattctccatccctgatactgggtcacactgcagtagtgaatatgcagccagttcacccggagaccggggttctcaggagcatgtggattcccaggagaaggccccaaagaccgacgactccttctctgatgtagattgtcactccaaccaggaggacaccggttgtaaattcagggtcctgccacagccaaccaacttagcaacacccaacactaaacggtttaaaaaagaggagattctctctagtagtgacatatgccagaagctggtgaacacgcaggatatgagtgcctctcaggtggatgtcgccgtgaagatcaacaagaaggtggttcccttagacttcagtatgtcctcattggctaagaggattaagcagctccatcacgaggcccagcagtcagagggtgaacagaactaccgtaaattcagagccaaaatctgtcccggagaaaatcaggccgccgaggacgaacttaggaaggagatctcaaaaactatgttcgcagaaatggaaattatcggtcagttcaacctggggtttatcattacgaagcttaatgaagatatattcatcgtggaccagcacgccacagacgagaaatacaactttgaaatgcttcaacagcatactgtgctgcagggacagagattgattgcaccacagactcttaacctgactgctgttaacgaagccgtgctgattgaaaacctagagattttccggaagaatggctttgattttgtgatcgatgagaacgcacccgttaccgagcgcgcaaagttgatcagtttgccaacctcaaagaattggactttcggccctcaagacgtcgatgaactgatcttcatgctgagcgacagtccaggggtcatgtgcaggccaagccgggtcaagcagatgtttgctagccgcgcatgtcgaaagtctgttatgatcggcacagcgttaaatacctcggaaatgaagaaactgattacacatatgggcgaaatggatcacccctggaattgccctcatggacgccccacaatgcggcacattgcgaacctgggggtgatatctcaaaactag

SEQ ID NO: 289795 - DNA, 2448 bp, Artificial Sequence
  derived and/or modified sequence
atggagcgggcagagagcagccgcagcaagctgaaggactatggagtggacctgattgaggtgtctgacaatggctgcggcgtggaggaggagaactttgagggcctgaccctgaagcaccacaccagcaagatccaggagtttgctgacctgacccaggtggagaccttcggcttccggggggaggccctgagcagcctgtgtgccctgagtgatgtgaccatcagcacctgccacgccagcgccaaggtgggcacccggctgatgtttgaccacaacgggaagatcatccagaagaccccctacccccggccccggggcaccaccgtgtctgtgcagcagctgttcagcaccctgcctgtgcgccacaaggagttccagaggaacatcaagaaggagtatgccaagatggtgcaggtgctgcacgcctactgcatcatctctgctggcatccgggtgtcctgcaccaaccagctgggccagggcaagaggcagcctgtggtgtgcaccggcggcagccccagcatcaaggagaacatcggctctgtgtttggccagaagcagctgcagagcctcatcccctttgtgcagctgcccccaagtgacagcgtgtgtgaggagtatggcctgagctgcagtgatgccctgcacaacctcttctacatcagcggcttcatcagccagtgcacccatggagtgggccgcagcagcacagaccggcagttcttcttcatcaacagaagaccctgtgaccctgccaaggtgtgccgcctggtgaatgaggtgtaccacatgtacaacagacaccagtacccctttgtggtgctgaacatctctgtggacagtgaatgtgtggacatcaacgtgaccccagacaagaggcagatcctgctgcaggaggagaagctgctgctggccgtgctgaagaccagcctgattggcatgtttgacagtgatgtgaacaagctgaatgtgtcccagcagcccctgctggatgtggagggcaacctgatcaagatgcacgccgctgacctggagaagcccatggtggagaagcaggaccagagccccagcctgaggactggagaggagaagaaggatgtgtccatcagccggctgcgggaggccttcagcctgcggcacaccacagagaacaagccccacagccccaagaccccagagccccggcgcagccccctgggccagaagaggggcatgctgagcagcagcaccagcggggccatcagtgacaagggcgtgctgcggccccagaaggaggccgtgagcagcagccacggccccagcgaccccacagacagagctgaggtggagaaggacagcggccacggcagcacctctgtggacagcgagggcttcagcatcccagacaccggcagccactgcagcagtgaatatgctgccagcagccctggggaccggggcagccaggagcacgtggacagccaggagaaggcccccaagacagatgacagcttcagtgatgtggactgccacagcaaccaggaggacaccggctgcaagttccgggtgctgccccagcccaccaacctggccacccccaacaccaagcgcttcaagaaggaggagatcctgagcagcagtgacatctgccagaagctggtgaacacccaggacatgtctgccagccaggtggatgtggccgtgaagatcaacaagaaggtggtgcccctggacttctccatgagcagcctggccaagaggatcaagcagctgcaccacgaggcccagcagagcgagggggagcagaactacaggaagttccgggccaagatctgccctggagagaaccaggccgcagaagatgagctgaggaaggagatcagcaagaccatgtttgctgagatggagatcatcggccagttcaacctgggcttcatcatcaccaagctgaatgaagacatcttcatcgtggaccagcacgccacagatgagaagtacaactttgagatgctgcagcagcacacagtgctgcagggccagaggctgattgccccccagaccctgaacctgacagctgtgaatgaggccgtgctgattgagaacctggagatcttcaggaagaatggatttgattttgtgattgatgaaaatgcccctgtgacagagcgggccaagctgatcagcctgcccaccagcaagaactggaccttcggcccccaggatgtggatgagctgatcttcatgctgagtgacagccctggggtgatgtgccggcccagccgggtgaagcagatgtttgccagccgggcctgcaggaagtctgtgatgattggaacagccctgaacaccagcgagatgaagaagctgatcacccacatgggagagatggaccacccctggaactgcccccacggccggcccaccatgaggcacatcgccaacctgggcgtcatcagccagaactag

SEQ ID NO: 289796 - DNA, 2448 bp, Artificial Sequence
  derived and/or modified sequence
atggagcgggccgagagcagccggagcaagctgaaggactacggcgttgacctcatcgaggtgtccgacaacggatgcggcgtggaggaggagaattttgaaggtctgactctgaagcatcatacttcgaagatccaagaatttgcagatctgactcaggtggaaacattcgggttcagaggtgaagctttgagtagcctgtgtgcactctccgatgtgacaataagtacatgccacgcctcggcaaaggtgggaactcgcctcatgttcgaccataacgggaaaatcattcagaagacgccgtacccgcgaccgcggggaacaaccgtctccgtgcagcagctgttctctacgcttccagtccgccataaggaattccagcggaacatcaagaaagagtacgccaagatggtccaagtgctccatgcctattgcatcatcagtgcaggcatccgggtttcctgtacgaatcaactgggccaaggcaaacggcagccggtggtctgtactggcggctccccttcaatcaaagagaacattggctcagttttcggacagaagcagttgcagtcattgatcccatttgtgcaattgcctccatctgattcggtttgtgaggagtatggactgagttgcagtgatgcattacataacctcttctacatctcaggtttcatatcacagtgcacacacggtgttggaagaagttccaccgatcgccagttcttttttataaacagaaggccgtgtgatcccgcgaaagtctgccgcctcgtgaatgaggtgtaccacatgtacaatcggcaccagtatccattcgtagtacttaatataagtgtcgattccgaatgcgtcgatattaatgttacacccgataaaaggcagatactccttcaagaggaaaaactgcttcttgcagtccttaagacatctctgattggaatgtttgattcagatgtgaacaagctgaacgtgtctcagcagccgctgctcgatgtggaaggtaacctgatcaaaatgcacgcagccgatttggagaagcctatggttgagaaacaagaccaaagccccagtctaagaacaggcgaggaaaagaaagacgtgagtatttcacgattgcgcgaggcattttcattaagacacacgactgaaaacaagccgcactctcctaagacgccggaacccaggcgcagcccacttgggcagaaaaggggcatgttatcctccagtacatcaggcgcaatcagtgataaaggtgtcctacggccccaaaaggaggctgtttccagtagccacggacccagcgaccccactgatcgcgctgaagtcgaaaaagacagcggccacggcagcacttccgtggactccgagggattcagcataccagacaccggttcgcattgctcctcggagtacgctgcttcgagcccaggcgatcgtgggtcccaagaacatgtcgacagtcaggagaaagccccgaagacagatgacagctttagcgatgtggattgccattcgaaccaagaagacaccggctgtaagttcagagttctccctcagccaacgaatctcgcaacccctaatacaaaaagatttaagaaggaggaaatcttatctagctcagatatatgtcagaagcttgtgaatacacaggatatgtcagcatcgcaggtcgacgtggcagtcaagattaacaagaaggtggtgccactggacttttccatgtcttccctggcgaagaggatcaagcagctccaccatgaggcccaacagtctgaaggcgagcagaactatcgcaaattcagggccaagatctgccctggggagaaccaggcggcagaagatgaattgcggaaagaaataagcaaaaccatgtttgccgagatggagataatcggccagtttaacctaggatttatcataactaaacttaacgaagacatttttatcgtggaccaacatgcaactgacgagaagtataactttgaaatgttgcagcagcacaccgtgctccaaggacagaggctaatcgcgcctcaaaccctcaatctgactgctgtgaacgaagctgtccttatcgaaaatctggagatatttaggaagaatggattcgacttcgttatcgacgagaatgccccagtcacggaaagagctaagcttatttctctacccacctccaaaaattggacctttgggccccaggacgttgacgagctaattttcatgttgtctgactcccctggcgtgatgtgcagaccctcccgcgtcaaacagatgttcgcatctcgtgcatgtcgaaagtctgtgatgatcggcacggctctaaacacttcagaaatgaagaaactgatcacccatatgggcgaaatggaccacccctggaactgcccacacggccgccccacaatgcggcacatcgccaacctgggcgtgatcagccaaaattag

SEQ ID NO: 289797 - DNA, 2448 bp, Artificial Sequence
  derived and/or modified sequence
atggagcgggcagagtcttcaaggtctaagctaaaggactacggcgttgatctaattgaagtcagcgataacggctgtggagtcgaagaagagaactttgaaggactgaccctgaagcatcatacatcaaagattcaggagtttgcagatttgacccaggtcgaaacattcggctttcggggagaggccctgagtagtctctgcgctctgagtgatgtgactatttccacgtgccatgcctctgctaaagttggaacaaggctcatgttcgatcacaacgggaaaatcatacaaaaaacaccatacccacgtccacggggtacaaccgtgtccgtgcagcaactgttttccaccctccccgtcagacataaggagttccagaggaatattaagaaagaatacgcgaaaatggtgcaagtgctgcacgcgtattgtattatctctgctgggataagagtgagctgtacgaaccagttgggtcaggggaaaagacagcctgtcgtgtgtaccgggggaagtccttcaattaaggaaaatatcggaagcgtttttggccagaagcaactgcagtccctgatccctttcgttcagttgcccccaagtgacagtgtatgtgaggagtacggtctgtcctgctcggacgccctgcataatttgttttacatcagtggctttatctcccagtgcacgcatggggttggtagaagctccaccgatcgacagttcttctttattaacagaaggccctgcgatccagctaaggtatgtcgactagtgaacgaagtttaccatatgtacaatagacatcagtatccattcgtggttctgaacatcagcgtagactccgagtgcgtggatataaatgtgactcctgacaaacgccagatattattgcaagaggaaaaacttttacttgccgtactgaagacttccctgattggcatgttcgattccgacgttaacaaactgaatgtttcacaacagcccttgctggatgtggagggaaatttgataaaaatgcacgcagcggatctagagaagccaatggttgaaaaacaggatcaaagtccatccctgcggaccggcgaagaaaaaaaggacgtctcaataagtaggctgagagaggcgttcagtctgcggcataccaccgaaaataagccgcattcccccaaaacacccgagccccgaagatccccattggggcagaaacggggtatgcttagctcaagcaccagcggggctatctctgataaaggcgttttacggcctcagaaggaggccgtgtcatccagccacggaccctctgacccaacagatcgcgcagaggttgaaaaggattccggccacggtagcacttccgtcgattccgagggcttctcaataccagatactggctcgcattgttcttcagagtatgccgcttcttctccaggggacaggggctcccaggagcacgtcgattcccaggagaaagccccaaagacagatgattctttcagcgatgtggactgtcactctaaccaggaggacactggctgtaaattcagagtgttaccacagcccacaaacctcgcgaccccaaacactaaacgctttaaaaaagaggaaattttatctagctcggacatctgccagaagttggttaacacccaggacatgagcgccagtcaggtggatgtagctgttaagattaacaagaaggtcgtgcccctggacttttctatgagctcactcgccaaaaggatcaagcagctgcatcacgaagcacaacagagcgaaggagaacagaactataggaagtttcgtgcgaagatctgtcctggagaaaatcaggcagccgaagatgagttgagaaaggagatcagtaagacaatgtttgcagagatggagatcattggtcagttcaacctcggcttcatcataacaaaactcaacgaggacatattcatcgtcgatcagcacgctacggatgagaaatacaactttgaaatgctgcagcagcatacagtgctacagggacagcgcctgattgctccacagactctgaatttaaccgccgtaaacgaggcagtgctgatcgagaatctcgagatctttcgcaagaacggtttcgacttcgtcatcgacgaaaacgcaccagtgactgagcgggctaaattgatctcactacccacatccaaaaactggacttttggaccacaggatgttgatgagcttattttcatgcttagcgacagccccggagtgatgtgccggccttcacgcgtgaaacagatgtttgcatcccgcgcatgtcgaaaaagtgtgatgatcggaacggcactgaacacatcggaaatgaagaaactgatcactcatatgggggagatggaccatccctggaactgccctcatgggagacccacaatgcgtcatatcgctaacctgggcgtcatcagtcaaaactag

SEQ ID NO: 289798 - DNA, 2678 bp, Artificial Sequence
  derived and/or modified sequence
gagttcaggaggcggagcgcctgtgggagccctggagggaactttcccagtccccgaggcggatcgggtgttgcatccatggagcgagctgagagctcgagatctaagcttaaggactatggagtggatcttattgaagtttcagacaatggatgtggggtagaagaagaaaacttcgaaggcttaactctgaaacatcacacatctaagattcaagagtttgccgacctaactcaggttgaaacttttggctttcggggggaagctctgagctcactttgtgcactgagcgatgtcaccatttctacctgccacgcatcggcgaaggttggaactcgactgatgtttgatcacaatgggaaaattatccagaaaaccccctacccccgccccagagggaccacagtcagcgtgcagcagttattttccacactacctgtgcgccataaggaatttcaaaggaatattaagaaggagtatgccaaaatggtccaggtcttacatgcatactgtatcatttcagcaggcatccgtgtaagttgcaccaatcagcttggacaaggaaaacgacagcctgtggtatgcacaggtggaagccccagcataaaggaaaatatcggctctgtgtttgggcagaagcagttgcaaagcctcattccttttgttcagctgccccctagtgactccgtgtgtgaagagtacggtttgagctgttccgatgctctgcataatcttttttacatctcaggtttcatttcacaatgcacgcatggagttggaaggagttcaacagacagacagtttttctttatcaaccggcggccttgtgacccagcaaaggtctgcagactcgtgaatgaggtctaccacatgtataatcgacaccagtatccatttgttgttcttaacatttctgttgattcagaatgcgttgatatcaatgttactccagataaaaggcaaattttgctacaagaggaaaagcttttgttggcagttttaaagacctctttgataggaatgtttgatagtgatgtcaacaagctaaatgtcagtcagcagccactgctggatgttgaaggtaacttaataaaaatgcatgcagcggatttggaaaagcccatggtagaaaagcaggatcaatccccttcattaaggactggagaagaaaaaaaagacgtgtccatttccagactgcgagaggccttttctcttcgtcacacaacagagaacaagcctcacagcccaaagactccagaaccaagaaggagccctctaggacagaaaaggggtatgctgtcttctagcacttcaggtgccatctctgacaaaggcgtcctgagacctcagaaagaggcagtgagttccagtcacggacccagtgaccctacggacagagcggaggtggagaaggactcggggcacggcagcacttccgtggattctgaggggttcagcatcccagacacgggcagtcactgcagcagcgagtatgcggccagctccccaggggacaggggctcgcaggaacatgtggactctcaggagaaagcgcctaaaactgacgactctttttcagatgtggactgccattcaaaccaggaagataccggatgtaaatttcgagttttgcctcagccaactaatctcgcaaccccaaacacaaagcgttttaaaaaagaagaaattctttccagttctgacatttgtcaaaagttagtaaatactcaggacatgtcagcctctcaggttgatgtagctgtgaaaattaataagaaagttgtgcccctggacttttctatgagttctttagctaaacgaataaagcagttacatcatgaagcacagcaaagtgaaggggaacagaattacaggaagtttagggcaaagatttgtcctggagaaaatcaagcagccgaagatgaactaagaaaagagataagtaaaacgatgtttgcagaaatggaaatcattggtcagtttaacctgggatttataataaccaaactgaatgaggatatcttcatagtggaccagcatgccacggacgagaagtataacttcgagatgctgcagcagcacaccgtgctccaggggcagaggctcatagcacctcagactctcaacttaactgctgttaatgaagctgttctgatagaaaatctggaaatatttagaaagaatggctttgattttgttatcgatgaaaatgctccagtcactgaaagggctaaactgatttccttgccaactagtaaaaactggaccttcggaccccaggacgtcgatgaactgatcttcatgctgagcgacagccctggggtcatgtgccggccttcccgagtcaagcagatgtttgcctccagagcctgccggaagtcggtgatgattgggactgctcttaacacaagcgagatgaagaaactgatcacccacatgggggagatggaccacccctggaactgtccccatggaaggccaaccatgagacacatcgccaacctgggtgtcatttctcagaactgaccgtagtcactgtatggaataattggttttatcgcagatttttatgttttgaaagacagagtcttcactaaccttttttgttttaaaatgaacctgctacttaaaaaaaatacacatcacacccatttaaaagtgatcttgagaaccttttc

SEQ ID NO: 289799 - protein, 361 aa, Artificial Sequence
  derived and/or modified sequence
MVDILAKVRFPLISKNFLSKTVQAEPLIQDNPECLKMVISGMRYHLLSPEDREELVDGTRPRRKKHDYRIALFGGSQPQSCRYFNPKDYSWTDIRCPFEKRRDAACVFWDNVVYILGGSQLFPIKRMDCYNVVKDSWYSKLGPPTPRDSLAACAAEGKIYTSGGSEVGNSALYLFECYDTRTESWHTKPSMLTQRCSHGMVEANGLIYVCGGSLGNNVSGRVLNSCEVYDPATETWTELCPMIEARKNHGLVFVKDKIFAVGGQNGLGGLDNVEYYDIKLNEWKMVSPMPWKGVTVKCAAVGSIVYVLAGFQGVGRLGHILEYNTETDKWVANSKVRAFPVTSCLICVVDTCGANEETLET

SEQ ID NO: 289800 - protein, 564 aa, Artificial Sequence
  derived and/or modified sequence
MLGGTDCRTFLTSHINLKKTLCDVILMVQERKIPAHRVVLAAASHFFNLMFTTNMLESKSFEVELKDAEPDIIEQLVEFAYTARISVNSNNVQSLLDAANQYQIEPVKKMCVDFLKEQVDASNCLGISVLAECLDCPELKATADDFIHQHFTEVYKTDEFLQLDVKRVTHLLNQDTLTVRAEDQVYDAAVRWLKYDEPNRQPFMVDILAKVRFPLISKNFLSKTVQAEPLIQDNPECLKMVISGMRYHLLSPEDREELVDGTRPRRKKHDYRIALFGGSQPQSCRYFNPKDYSWTDIRCPFEKRRDAACVFWDNVVYILGGSQLFPIKRMDCYNVVKDSWYSKLGPPTPRDSLAACAAEGKIYTSGGSEVGNSALYLFECYDTRTESWHTKPSMLTQRCSHGMVEANGLIYVCGGSLGNNVSGRVLNSCEVYDPATETWTELCPMIEARKNHGLVFVKDKIFAVGGQNGLGGLDNVEYYDIKLNEWKMVSPMPWKGVTVKCAAVGSIVYVLAGFQGVGRLGHILEYNTETDKWVANSKVRAFPVTSCLICVVDTCGANEETLET

SEQ ID NO: 289801 - protein, 143 aa, Artificial Sequence
  derived and/or modified sequence
MLGGTDCRTFLTSHINLKKTLCDVILMVQERKIPAHRVVLAAASHFFNLMFTTNMLESKSFEVELKDAEPDIIEQLVEFAYTARISVNSNNVQSLLDAANQYQIEPVKKMCVDFLKEQVDASNCLGKKYQIPVVCLFCFILYF

SEQ ID NO: 289802 - DNA, 1695 bp, Artificial Sequence
  derived and/or modified sequence
atgctgggcggaacggattgcaggacatttctcacctcccatatcaacttgaaaaaaacattgtgcgatgtgatcttgatggttcaggagcgcaagattccggctcaccgagtggtgctggccgcagcgagccatttctttaacctgatgtttactacaaacatgctggagagcaagtcgtttgaagtggagctcaaggatgcagaaccagacatcatcgagcagttggtggagttcgcctacacggcgcgaatatccgtgaacagtaataacgtccagtccctgctcgatgctgccaatcaatatcaaatcgaacctgtgaagaagatgtgcgtggactttctgaaagagcaagtggacgcctcgaactgtctgggtattagcgtcttggcagagtgtttggactgccccgaattgaaggctacagccgacgacttcatccaccaacattttaccgaagtgtacaagaccgatgagttcctacagctggacgtgaagcgggttacacacctgttaaatcaagacacacttaccgttcgcgcagaagaccaggtctatgacgcagcagttagatggctgaagtacgatgaacctaaccgtcagcccttcatggtcgacattcttgcaaaggttcgcttcccgctgatttccaagaattttttgtcaaaaaccgtgcaagctgagcccttgatccaggataacccggaatgcctaaagatggttatctcagggatgaggtaccatttgctgagtcctgaggatcgggaggaattggttgatggaacccgccctcggcgcaagaagcacgactaccgcatagcgctctttggcggcagtcaaccccagtcgtgccgttacttcaaccctaaggattacagctggactgatattcggtgccccttcgaaaaaaggagagacgctgcgtgtgtgttttgggacaatgttgtgtatatattgggtggaagccagctctttcccatcaagaggatggattgttataacgtggtgaaagacagttggtattctaagctgggccctcccacacctcgcgactctctcgccgcttgtgctgccgagggaaagatatacacgagcggcggtagcgaggtcggcaacagcgctttatacctattcgagtgttatgacactcgaactgaatcctggcatactaaaccttccatgctcacacaacggtgtagtcacgggatggtggaagccaacggactcatttacgtgtgcgggggatccttaggtaacaatgtgtctggtcgggtgctgaactcctgtgaggtgtacgatcccgccaccgaaacttggaccgagctgtgcccaatgatagaggcacgaaaaaaccatggacttgtcttcgtaaaagacaaaatattcgcagtgggtgggcagaatggtctgggcggattggataacgtagaatactatgacattaagctaaacgaatggaagatggtgagtcctatgccatggaaaggtgtgactgtgaaatgtgcagctgtggggagcatagtctatgtcctcgccggcttccagggcgtcgggcgcctaggccacatactggaatacaatacagaaactgataagtgggttgcaaacagtaaggtacgggccttccctgtgacctcttgcctcatatgtgtggtggacacttgtggcgcgaatgaagaaacactggaaacgtag

SEQ ID NO: 289803 - DNA, 1695 bp, Artificial Sequence
  derived and/or modified sequence
atgctgggtggcacagactgccgaaccttcctcacgtctcacataaatttaaagaaaaccctttgcgatgtcattctgatggttcaggagagaaagattcccgcccatcgggttgttctggccgcagctagccatttctttaatttgatgttcacaaccaatatgttggagagcaaaagcttcgaagtcgagctgaaggacgccgagcccgatattatcgaacagctggttgaatttgcctacacagccagaatcagtgtaaattctaacaacgtgcagtccctgctggacgctgccaaccaatatcagatcgagcctgtgaaaaaaatgtgtgtggacttcctgaaagagcaggttgacgctagtaattgcctgggcatcagcgttctcgcggagtgcctggactgtccagagttgaaggcgacagctgatgattttatccatcagcacttcacagaggtgtataaaacggacgagtttctccagttggatgtgaagcgcgtcacacatttgctaaaccaggatactctgactgtgagggccgaagatcaggtgtacgatgccgcggtgcgctggctcaagtatgacgaacctaaccggcagcccttcatggttgatatcctggcaaaagttcggttccctctgatatccaaaaactttttaagtaagacagttcaagccgagcccctgattcaggacaatccagaatgcctcaaaatggtgatttccggtatgcggtatcatttactaagccctgaggacagagaggagcttgtcgacggtacaaggccccggagaaaaaagcacgactatcggatcgccctgttcggaggctcacaaccacagtcctgtagatattttaacccgaaggactatagttggacagatatcagatgcccctttgagaaaagacgtgatgcggcatgcgtgttctgggacaatgtggtctacattcttggtggttcacagctctttcccataaagcgcatggactgctataatgtagtaaaagattcttggtacagcaaactcggcccccccaccccacgggattcactggccgcttgcgcagcggagggaaaaatttacacatccggaggctctgaggtagggaactcggcactctatctgtttgaatgctacgacacgcgtactgagagctggcacacaaagcccagcatgctgacgcagcgttgtagtcatggaatggtggaggcaaatggcctcatctatgtgtgtggcggatcactggggaacaacgtttctgggagggtactcaatagttgtgaagtgtatgatccggccactgagacctggacagaactgtgtcccatgattgaagcacggaagaaccacgggcttgtgttcgtgaaggataaaattttcgctgtggggggccagaacgggctagggggacttgataatgtcgagtattacgacatcaaactgaacgaatggaagatggtatctcctatgccatggaagggtgttacagtgaaatgcgccgcagtaggtagtatcgtatatgtgttggctggcttccaaggggttggacgccttggtcatatcctcgagtacaacacagaaactgataaatgggtggctaactctaaagtgcgtgcatttcctgtgacctcttgcttgatctgtgtcgttgacacatgtggagctaacgaggaaaccctagaaacctag

SEQ ID NO: 289804 - DNA, 432 bp, Artificial Sequence
  derived and/or modified sequence
atgctgggaggcacagattgcaggacgttcctgacgagccatatcaatctgaaaaaaactctgtgtgacgtgatcttaatggtgcaggagcggaagattcccgcccatagggtggtgcttgccgccgcctcccacttctttaacttgatgtttaccaccaatatgttggaatctaaaagctttgaagtcgaactcaaagatgccgagccagatatcatcgagcagttagtggagttcgcgtacacagcacggatcagcgttaattctaataacgtgcagagcctcttggatgccgccaaccagtaccaaatcgagcccgtgaaaaaaatgtgtgtggactttctcaaagaacaggtggatgcgtccaactgcctgggaaaaaaataccagattcccgtggtttgcctcttctgcttcatcctttacttctag

SEQ ID NO: 289805 - DNA, 3304 bp, Artificial Sequence
  derived and/or modified sequence
atagtgcccccgcctccttgcgcgaagtgcgcaggctcctgggcagggctcgggttctgcccggggacgcagcccagttggtagcgtcgctccctgagcgtttctaagggggccgcccggccttgtctttcggcagtggccgagccaccgccgcctgccgcgcgttccagagctgggcgctgcagctgcactgccgatcgccgtgtttggtcgatagaatccccagtgtgcccagagagtgcgacccctcgcccggcccggcgagccccgggcgtgaaccgagctgagggaggatggcagcctctggggtggagaagagcagcaagaagaagaccgagaagaaacttgctgctcgggaagaagctaaattgttggcgggtttcatgggcgtcatgaataacatgcggaaacagtgatttaaatctaccacccagctgtagttgaatctacaatctgctcagggatttatactcaatgccaatttgatatcatgctgggagggactgattgcagaaccttcttgacaagccacataaatctaaagaaaacgttgtgtgacgtgatcctcatggtccaggaaagaaagatacctgctcatcgtgttgttcttgctgcagccagtcatttttttaacttaatgttcacaactaacatgcttgaatcaaagtcctttgaagtagaactcaaagatgctgaacctgatattattgaacaactggtggaatttgcttatactgctagaatttccgtgaatagcaacaatgttcagtctttgctggatgcagcaaaccaatatcagattgaacctgtgaagaaaatgtgtgttgattttttgaaagaacaagttgatgcttcaaattgtcttggtataagtgtgctagcggagtgtctagattgtcctgaattgaaagcaactgcagatgactttattcatcagcactttactgaagtttacaaaactgatgaatttcttcaacttgatgtcaagcgagtaacacatcttctcaaccaggacactctgactgtgagagcagaggatcaggtttatgatgctgcagtcaggtggttgaaatacgatgaacctaatcgccagccatttatggttgatatccttgctaaagtcaggtttcctcttatatcaaagaatttcttaagtaaaacggtacaagctgaaccacttattcaagacaatcctgaatgccttaagatggtgataagtggaatgaggtaccatctactgtctccagaggaccgagaagaacttgtagatggcacaagacctagaagaaagaaacatgactaccgcatagccctatttggaggctctcaaccacagtcttgtagatattttaacccaaaggattatagctggacagacatccgctgcccctttgaaaaacgaagagatgcagcatgcgtgttttgggacaatgtagtatacattttgggaggctctcagcttttcccaataaagcgaatggactgctataatgtagtgaaggatagctggtattcgaaactgggtcctccgacacctcgagacagccttgctgcatgtgctgcagaaggcaaaatttatacatctggaggttcagaagtaggaaactcagctctgtatttatttgagtgctatgatacgagaactgaaagctggcacacaaagcccagcatgctgacccagcgctgcagccatgggatggtggaagccaatggcctaatctatgtttgtggtggaagtttaggaaacaatgtttctgggagagtgcttaattcctgtgaagtttatgatcctgccacagaaacatggactgagctgtgtccaatgattgaagccaggaagaatcatgggctggtatttgtaaaagacaagatatttgctgtgggtggtcagaatggtttaggtggtctggacaatgtggaatattacgatattaagttgaacgaatggaagatggtctcaccaatgccatggaagggtgtaacagtgaaatgtgcagcagttggctctatagtttatgtcttggctggttttcagggtgttggtcgattaggacacattctcgaatataataccgaaacagacaaatgggttgccaactccaaagttcgtgcttttccagtcacaagttgtttaatttgtgttgtcgatacttgtggagcaaatgaagagacccttgaaacatgaaaaatgagtggacttcagactcatcagagactctaaaatatagccaccagtgctttgttccaggagtttggtgacaaagttttggtttggtgttttggtaaagaaagtttcaagtgaaatgaggttcctataaaatagatgtttcttttatatggatttccttaattcaaagatcatattttagctggccacaaaaccaagaacatatctagcaagaaaacttgaaaaagtataagcatttgttaaaaatgtgaatttcttgaatgaatttcacatttgtaactatgattttggcagaatagaagattggctcatcagtgaagcgcagtatcttagctctagattctattttcatgcatcacagaagtgctatacggttaggtctgtttgtgctcagtcaagaactaagaaatagtatgaattgtaagtcaagatgggcaactcagatggagcagcttagtctcacagtttgcttgtctatttattttatttagtgccaaatgtattccattttaaaagtaagccagagtgagtcaaggcatatacacactttctcacaaaacttcctaaacagatttgggggtttaatatgtccaactcctcatgaaatatattcaatccacttaaatatattccatctttttaacataaaatgtaaagcttagcacccatcattaatttatgtctctgttttatccagtggttaaaaaaggattctgcctctttagtcctcactgttaaataaaacccaatcatagtaagtgattaactagcaaaaagtaaagctatttatagcaaatttctagatcattagaaaagcactggtagttgtacaatatcagtgttgactttgaacttctttaacgagatcatgaattcttttcccttagccaaaacatgaaatatttaacctagttgtctctaaaagttttgtaatcatgagttagatatatgtcatctcctattcattgcttttatgtgatcaataaatcttttacaaacccaactactcatttccttcctagtaatactttgcctttttcactgtgtatggaatgaaacatgtaaagctgtcacaatcaatgtttttatctgataatattaaatattttttaactt

SEQ ID NO: 289806 - DNA, 2814 bp, Artificial Sequence
  derived and/or modified sequence
atgctgggagggactgattgcagaaccttcttgacaagccacataaatctaaagaaaacgttgtgtgacgtgatcctcatggtccaggaaagaaagatacctgctcatcgtgttgttcttgctgcagccagtcatttttttaacttaatgttcacaactaacatgcttgaatcaaagtcctttgaagtagaactcaaagatgctgaacctgatattattgaacaactggtggaatttgcttatactgctagaatttccgtgaatagcaacaatgttcagtctttgctggatgcagcaaaccaatatcagattgaacctgtgaagaaaatgtgtgttgattttttgaaagaacaagttgatgcttcaaattgtcttggtataagtgtgctagcggagtgtctagattgtcctgaattgaaagcaactgcagatgactttattcatcagcactttactgaagtttacaaaactgatgaatttcttcaacttgatgtcaagcgagtaacacatcttctcaaccaggacactctgactgtgagagcagaggatcaggtttatgatgctgcagtcaggtggttgaaatacgatgaacctaatcgccagccatttatggttgatatccttgctaaagtcaggtttcctcttatatcaaagaatttcttaagtaaaacggtacaagctgaaccacttattcaagacaatcctgaatgccttaagatggtgataagtggaatgaggtaccatctactgtctccagaggaccgagaagaacttgtagatggcacaagacctagaagaaagaaacatgactaccgcatagccctatttggaggctctcaaccacagtcttgtagatattttaacccaaaggattatagctggacagacatccgctgcccctttgaaaaacgaagagatgcagcatgcgtgttttgggacaatgtagtatacattttgggaggctctcagcttttcccaataaagcgaatggactgctataatgtagtgaaggatagctggtattcgaaactgggtcctccgacacctcgagacagccttgctgcatgtgctgcagaaggcaaaatttatacatctggaggttcagaagtaggaaactcagctctgtatttatttgagtgctatgatacgagaactgaaagctggcacacaaagcccagcatgctgacccagcgctgcagccatgggatggtggaagccaatggcctaatctatgtttgtggtggaagtttaggaaacaatgtttctgggagagtgcttaattcctgtgaagtttatgatcctgccacagaaacatggactgagctgtgtccaatgattgaagccaggaagaatcatgggctggtatttgtaaaagacaagatatttgctgtgggtggtcagaatggtttaggtggtctggacaatgtggaatattacgatattaagttgaacgaatggaagatggtctcaccaatgccatggaagggtgtaacagtgaaatgtgcagcagttggctctatagtttatgtcttggctggttttcagggtgttggtcgattaggacacattctcgaatataataccgaaacagacaaatgggttgccaactccaaagttcgtgcttttccagtcacaagttgtttaatttgtgttgtcgatacttgtggagcaaatgaagagacccttgaaacatgaaaaatgagtggacttcagactcatcagagactctaaaatatagccaccagtgctttgttccaggagtttggtgacaaagttttggtttggtgttttggtaaagaaagtttcaagtgaaatgaggttcctataaaatagatgtttcttttatatggatttccttaattcaaagatcatattttagctggccacaaaaccaagaacatatctagcaagaaaacttgaaaaagtataagcatttgttaaaaatgtgaatttcttgaatgaatttcacatttgtaactatgattttggcagaatagaagattggctcatcagtgaagcgcagtatcttagctctagattctattttcatgcatcacagaagtgctatacggttaggtctgtttgtgctcagtcaagaactaagaaatagtatgaattgtaagtcaagatgggcaactcagatggagcagcttagtctcacagtttgcttgtctatttattttatttagtgccaaatgtattccattttaaaagtaagccagagtgagtcaaggcatatacacactttctcacaaaacttcctaaacagatttgggggtttaatatgtccaactcctcatgaaatatattcaatccacttaaatatattccatctttttaacataaaatgtaaagcttagcacccatcattaatttatgtctctgttttatccagtggttaaaaaaggattctgcctctttagtcctcactgttaaataaaacccaatcatagtaagtgattaactagcaaaaagtaaagctatttatagcaaatttctagatcattagaaaagcactggtagttgtacaatatcagtgttgactttgaacttctttaacgagatcatgaattcttttcccttagccaaaacatgaaatatttaacctagttgtctctaaaagttttgtaatcatgagttagatatatgtcatctcctattcattgcttttatgtgatcaataaatcttttacaaacccaactactcatttccttcctagtaatactttgcctttttcactgtgtatggaatgaaacatgtaaagctgtcacaatcaatgtttttatctgataatattaaatattttttaactt

SEQ ID NO: 289807 - DNA, 1053 bp, Artificial Sequence
  derived and/or modified sequence
ttagagcagaagcagccatcgataaataccatgccatcttctaagggcactgtgcgcctctgttattaagaggagctctttgttctgtccttggtgtgtggtgcattcgtgaaattctgcagcacatcggcgaaagtgatttaaatctaccacccagctgtagttgaatctacaatctgctcagggatttatactcaatgccaatttgatatcatgctgggagggactgattgcagaaccttcttgacaagccacataaatctaaagaaaacgttgtgtgacgtgatcctcatggtccaggaaagaaagatacctgctcatcgtgttgttcttgctgcagccagtcatttttttaacttaatgttcacaactaacatgcttgaatcaaagtcctttgaagtagaactcaaagatgctgaacctgatattattgaacaactggtggaatttgcttatactgctagaatttccgtgaatagcaacaatgttcagtctttgctggatgcagcaaaccaatatcagattgaacctgtgaagaaaatgtgtgttgattttttgaaagaacaagttgatgcttcaaattgtcttggtaagaaatatcagattcctgttgtgtgtttattttgttttatcctttatttctaatttaattttttaaaaaggctgattttaagtatccgcatttaaccttaaagacattgtccactagaacgttttctagtaataaaatttaagaggggcttagagagatgcatattaacctgggcagcagcaagcttattaaatattatatcaacattttctaaaacacaaaatggcatttttaatggtttttcacggatctaggacaatgaataaggattgcatgtggtgatagtaacatgattatgaatgtttccttttatttaagcacttatgatatgctaaggtctatcacagatgaggcaacttatagttaggtaacttgccagaggtcacatagctagtgtatgaacgagctgggattggaactcaagtaatctaattcttagctactacaccttgctgcctccc

SEQ ID NO: 289808 - DNA, 1695 bp, Artificial Sequence
  derived and/or modified sequence
atgctgggcggcacagactgcaggaccttcctgaccagccacatcaacctgaagaagaccctgtgtgatgtgatcctgatggtgcaggagaggaagatcccagcccaccgggtggtgctggccgccgccagccacttcttcaacctgatgttcaccaccaacatgctggagagcaagagctttgaggtggagctgaaggatgctgagccagacatcatcgagcagctggtggagtttgcctacacagcccgcatctctgtgaacagcaacaacgtgcagagcctgctggatgctgccaaccagtaccagatcgagcctgtgaagaagatgtgtgtggacttcctgaaggagcaggtggatgccagcaactgcctgggcatctctgtgctggccgagtgcctggactgcccagagctgaaggccacagcagatgacttcatccaccagcacttcacagaggtgtacaagacagatgagttcctgcagctggatgtgaagagggtgacccacctgctgaaccaggacaccctgactgtgcgggcagaggaccaggtgtatgatgctgctgtgcgctggctgaagtatgatgagcccaaccggcagcccttcatggtggacatcctggccaaggtgcgcttccccctcatcagcaagaacttcctgagcaagacagtgcaggccgagcccctcatccaggacaaccctgagtgcctgaagatggtgatcagcggcatgagataccacctgctgagcccagaagatcgggaggagctggtggatggcacccggcccaggaggaagaagcatgactacagaattgccctgtttggaggcagccagccccagagctgccgctacttcaaccccaaggactacagctggacagacatccgctgcccctttgagaagagaagagatgctgcctgtgtgttctgggacaacgtggtgtacatcctgggcggcagccagctgttccccatcaagaggatggactgctacaacgtggtgaaggacagctggtacagcaagctgggcccccccaccccccgggacagcctggccgcctgtgccgctgagggcaagatctacaccagcggcggcagcgaggtgggcaacagcgccctgtacctgtttgaatgttatgacaccaggacagagagctggcacaccaagcccagcatgctgacccagcgctgcagccacggcatggtggaggccaacggcctcatctacgtgtgtggcggcagcctgggcaacaacgtgtctggccgggtgctgaacagctgtgaggtgtatgaccctgccacagagacctggacagagctgtgccccatgattgaggccaggaagaaccacggcctggtgtttgtgaaggacaagatctttgctgtgggcggccagaatggcctgggcggcctggacaacgtggagtactatgacatcaagctgaatgagtggaagatggtgagccccatgccctggaagggcgtgacagtgaagtgtgccgctgtgggcagcatcgtgtatgtgctggccggcttccagggcgtgggccgcctgggccacatcctggagtacaacacagaaacagacaagtgggtggccaacagcaaggtgcgggccttccctgtgaccagctgcctgatctgtgtggtggacacctgtggggccaatgaggagaccctggagacctag

SEQ ID NO: 289809 - DNA, 432 bp, Artificial Sequence
  derived and/or modified sequence
atgctgggcggcacagactgcaggaccttcctgaccagccacatcaacctgaagaagaccctgtgtgatgtgatcctgatggtgcaggagaggaagatcccagcccaccgggtggtgctggccgccgccagccacttcttcaacctgatgttcaccaccaacatgctggagagcaagagctttgaggtggagctgaaggatgctgagccagacatcatcgagcagctggtggagtttgcctacacagcccgcatctctgtgaacagcaacaacgtgcagagcctgctggatgctgccaaccagtaccagatcgagcctgtgaagaagatgtgtgtggacttcctgaaggagcaggtggatgccagcaactgcctgggcaagaagtaccagatccctgtggtgtgcctcttctgcttcatcctgtacttctag

SEQ ID NO: 289810 - DNA, 1695 bp, Artificial Sequence
  derived and/or modified sequence
atgctgggcggcaccgactgccggaccttcctgaccagccacatcaacttaaaaaagactctgtgcgatgtcatcctgatggtccaagagagaaagattcccgcacaccgggtggtgctggctgctgcaagccacttctttaatcttatgtttacaactaatatgctggaaagtaagtccttcgaagttgaattgaaggacgcagaacctgacatcattgaacagttggtcgaattcgcctacactgccagaatatcagtaaactctaataatgtccagagtctgctggatgcagccaaccagtatcagattgaaccggtgaagaagatgtgcgtggattttctgaaagagcaagtggacgcctccaactgtctgggcatctccgtcctggccgagtgcctcgattgtcccgagctcaaagccactgccgacgacttcattcaccagcatttcaccgaggtctataaaaccgacgaattcctacagctggatgtgaagagagtcacacacctcctcaaccaagacaccttgaccgtccgggccgaagatcaggtctacgacgcggccgttagatggttgaaatacgacgaaccgaaccgccagccattcatggtggatattcttgcgaaggtcagatttcctctcattagtaagaactttctgtcaaagaccgtccaggccgagcctctcatccaggataaccctgagtgcctgaagatggtgatttccggcatgcgctatcacctgttaagtccggaggacagggaagaactcgtcgacggcactcgacccagaaggaagaagcacgattatagaattgcgctgttcggcggcagccagccacagtcgtgcaggtactttaaccctaaggactacagctggactgacatacggtgccctttcgaaaagagaagagacgccgcatgtgttttctgggacaatgtggtatatatacttggcggcagtcagcttttcccaataaaacggatggattgttacaatgtggtaaaagatagttggtactctaaactgggacctcctacaccgagagactcccttgcagcctgcgcggcagaaggcaaaatatacacttctggggggtcagaggtgggaaatagcgccctatacttgttcgagtgctatgatacaaggactgagtcttggcacactaagccctccatgctgacccagagatgttcccacggaatggtcgaggctaacggtcttatctacgtatgcggcggaagcttgggtaataacgttagcggtagagtcctcaactcctgcgaggtttatgatcccgctacagagacttggaccgagctatgtcctatgatcgaagcccgaaaaaatcatggcctggtctttgtgaaagataaaatttttgccgtcggggggcagaatggactgggaggactagataatgtggagtactacgatatcaagctcaacgagtggaaaatggtgtctcctatgccctggaaaggggtgacagtaaagtgtgcggcagtgggatctatagtttatgttctagcaggctttcagggggtcggccgcctgggacatatactggaatacaatacagagaccgacaagtgggtggccaactccaaagtaagggctttccctgttacttcttgcttgatatgcgtcgtcgacacttgcggcgcaaatgaagaaaccctggagacctag

SEQ ID NO: 289811 - DNA, 1695 bp, Artificial Sequence
  derived and/or modified sequence
atgctgggcggcaccgactgccggaccttcctgaccagccacatcaacctgaaaaagaccctctgcgacgtcattcttatggttcaggagcgtaaaattcctgcccacagagtggtgcttgctgctgcatctcacttctttaatctcatgttcactactaacatgctagagagcaagagcttcgaggtggagctgaaagacgctgaacccgacatcattgaacaactggtggagtttgcttacacagcccgcattagcgtgaatagtaataatgtgcagagtctcctcgacgcagccaaccaatatcaaatcgaacctgtgaaaaagatgtgcgtggactttctcaaggaacaagtcgacgcatccaattgtcttggtatcagtgtcctggcggagtgtctcgattgtcctgagctaaaagccaccgccgatgatttcattcatcagcattttactgaggtctacaagaccgacgaatttttgcagctggacgtgaagagggtgacgcacctcttaaatcaagacaccctgacagtccgtgctgaggatcaggtttatgatgcggctgtaagatggttgaaatacgacgagccgaatagacagccctttatggtggatatcctcgccaaagtgaggttccctcttatctcaaagaactttctttccaaaacggtccaggcagaacctcttatccaggacaaccccgagtgtctgaagatggtgatctcaggaatgcgctatcacctcctgtctcctgaagatagagaggagctcgtcgacggaacccggccaagacgaaagaagcacgattaccgtatagccttattcggggggagccaaccccagtcctgccggtacttcaacccaaaggattattcatggacggacatccggtgccctttcgagaagcggagggacgcggcctgcgtgttctgggacaacgtggtgtacatactcgggggctcgcagctgtttcctattaaacgtatggactgctacaatgtggtcaaggatagttggtactctaagctgggccctccaacaccccgtgattcactcgccgcatgtgccgctgagggtaagatttacaccagcggcggaagcgaggtggggaactctgccctctacctgttcgaatgttatgatacccgaacggaaagctggcatacaaagccaagtatgctcacccaaagatgttcacacgggatggtggaagccaatgggctgatttatgtttgtggcggaagcctgggaaataacgtctccggtcgggtacttaactcctgcgaagtgtacgacccagctacggagacatggaccgagttgtgtccgatgatcgaagccaggaaaaatcacgggctggtcttcgtaaaagacaaaattttcgctgtgggagggcagaacgggcttggggggctggacaatgtggagtactacgacatcaaattaaacgagtggaaaatggttagtcctatgccctggaagggcgtcacagtgaaatgtgctgcagtgggcagcattgtctacgtgctcgccgggtttcagggtgtgggtcgcctgggtcacatcttagagtataatacagaaaccgataaatgggttgctaacagcaaagttcgggccttccctgtgacttcatgtctgatttgcgtagttgatacctgcggggctaatgaggaaaccctcgaaacatag

SEQ ID NO: 289812 - DNA, 432 bp, Artificial Sequence
  derived and/or modified sequence
atgctgggcggcaccgactgccggaccttcctgaccagccacatcaaccttaaaaaaaccctgtgtgatgttatcctgatggtgcaggagcgaaagatcccagctcatagggtcgtcctggccgccgcctcccatttctttaatttgatgttcacaaccaatatgttggaaagtaagtcatttgaagtggagctaaaggatgcagaacctgacatcatcgagcaactcgttgaattcgcatatactgcccggattagcgtaaatagcaataacgtgcagtctctcctggatgccgcaaaccaataccagatagaaccagttaagaaaatgtgtgtagacttccttaaagagcaggtcgatgcttcgaattgcctgggcaagaagtaccagattcctgtggtgtgcttgttctgctttattctgtacttctag

SEQ ID NO: 289813 - DNA, 1695 bp, Artificial Sequence
  derived and/or modified sequence
atgctcggaggcacagattgtcggacattcctaacttcccatatcaacctgaaaaaaaccctttgtgacgtgatcctgatggtccaggaaaggaagatccccgctcacagagtcgttttggcagcagcatcgcatttttttaacttaatgtttaccacaaacatgctggagtctaagtccttcgaagtggagctgaaagacgctgaacccgacattatagagcagctggtggaatttgcctacaccgcccgaatttccgtgaactctaataacgtgcagagtctactggatgctgcaaaccagtaccaaatagagccggtgaaaaaaatgtgcgtcgacttcttgaaggagcaggttgacgcttcaaattgcctcggtatctccgtgctcgccgagtgtttagactgtcctgaactgaaggctacagcagacgactttattcaccagcacttcacagaggtgtacaagacagatgaatttctgcagttagacgtgaagagggtcacccacctactaaaccaggacacccttacggtccgcgctgaggaccaggtgtacgacgccgcagtccgctggttaaagtatgacgagcctaatcgccagccattcatggtggacatcttggcaaaagtgaggtttccactgatcagtaagaatttcctaagtaaaactgtacaggccgagccccttatccaggataacccagagtgcctaaagatggtgatctcagggatgaggtaccacctgctctctccagaagaccgagaagaacttgtcgacggaacccggccacggaggaaaaaacacgattacaggatcgccctgtttgggggatcgcagccacagtcctgccgatactttaatccaaaagattactcctggaccgatatccgctgccccttcgagaagcggagggatgcagcatgcgtgttttgggacaatgtggtatatatcctcggaggatcgcagctgttcccaattaaaagaatggactgctacaatgtcgtgaaagacagttggtacagtaagctgggacccccaacaccacgcgattcactggcagcttgcgccgctgaaggtaaaatctacacaagcggcggatcagaggttggtaatagcgcactgtacttattcgaatgctatgacactcggacagagtcctggcacaccaaaccaagcatgctcacacagcggtgcagccacggaatggtagaagccaatggcctgatctatgtttgcggcggttcattgggcaataatgtttccggaagagtgctgaactcgtgcgaggtgtatgaccctgccactgagacttggacagagctctgccctatgatcgaagcgcgtaagaatcacggactcgttttcgttaaagacaagatctttgcagtgggcggacagaacggcctggggggactggacaatgtggaatattacgatatcaaactcaacgagtggaagatggtttctcccatgccatggaaaggagtgaccgttaaatgcgccgctgtcggatcaatagtgtatgtgttagccggatttcagggcgtggggcgtttaggccacatccttgagtacaacacagaaacagataaatgggttgcaaacagcaaagttcgtgcattccccgtgaccagctgcctgatttgtgttgtggacacctgtggcgctaacgaggagacccttgagacctag

SEQ ID NO: 289814 - DNA, 1695 bp, Artificial Sequence
  derived and/or modified sequence
atgctcggtggtactgattgtcggacttttctgacgagccacataaatctcaaaaaaactctgtgtgatgttatactgatggttcaggagcgcaagatccctgcccatcgtgtggttctggctgccgcatcccacttctttaatttaatgtttaccacgaacatgctagaatccaagagctttgaagtggagttgaaggacgctgaacctgacatcattgagcaactggtggaattcgcgtatacagcgaggatttcggtcaactcgaataatgtgcagagcctactggacgcggctaaccaataccagatcgaacccgtgaagaagatgtgcgtcgatttcctgaaggagcaggttgatgcgagcaactgcctcggaatctctgtactggcagaatgtctcgactgtcctgaactgaaggccaccgcagatgactttattcaccagcatttcaccgaggtctacaagactgatgaatttttacagctggacgtaaaacgcgtgacacaccttttgaatcaggacaccctgacagtcagagcagaagatcaagtctatgacgccgctgtgagatggctgaagtacgatgagccaaataggcagccgtttatggtggatatactggccaaggttagattccctctaattagcaagaattttctgtctaagaccgtgcaggccgagcctctcatccaggacaatccagaatgcttaaagatggtcatctccggcatgcggtaccacttgctgtctcctgaggatagggaagaactggttgatggtacgaggcccagaaggaagaagcatgattacaggatcgcgctgttcggaggcagccagccccagtcatgtaggtacttcaatcccaaagactacagctggacagatatcagatgtcccttcgagaagcgcagggatgccgcttgcgtgttctgggataacgtggtctacatactagggggaagtcagttattccccatcaagcgaatggactgttataacgtggttaaggactcatggtacagcaagctgggacccccaactccaagagattcgttagcagcatgcgcggcagagggaaaaatttatacgagcgggggaagcgaggtgggtaattccgccctatacctgtttgagtgctacgataccagaactgagtcttggcatacaaagcccagtatgcttacccagcgatgttcccatggaatggtcgaagccaatggcctcatttacgtgtgcggtggcagtcttggaaacaacgtgagcgggagggttttgaattcctgcgaggtgtacgacccggctaccgagacctggacggagttatgtccgatgattgaggctcgaaaaaaccatggcctcgtgtttgtaaaagacaagatctttgctgtgggcggacaaaatggacttggaggcctggataatgtggagtactacgatatcaaactgaacgaatggaaaatggtaagccccatgccatggaagggtgtgacagtaaaatgtgctgcggttggctcaatcgtctacgtgttggcaggatttcagggggtcggacgcctgggacacatcctcgaatataatactgagacagataagtgggtggcgaactctaaagtgcgcgcttttccagtgacctcatgtctgatctgtgtggtggatacctgtggcgctaatgaagaaaccctagaaacatag

SEQ ID NO: 289815 - DNA, 432 bp, Artificial Sequence
  derived and/or modified sequence
atgctggggggaacagactgtaggacatttcttacctcccatattaacctgaagaaaactctgtgtgatgtaatcctgatggttcaggaacggaagatccctgcccatcgcgttgtgctggccgctgcaagtcacttttttaacctcatgtttaccaccaacatgcttgaaagcaagtctttcgaggtcgagctcaaagatgctgagcccgacatcattgaacaactcgtggagttcgcatacacggcccgtatttcagtgaatagcaataacgtgcagtctctcctcgacgccgctaatcaataccagatagagccggtgaaaaaaatgtgtgtagactttctgaaggaacaggtggatgccagcaattgcttaggcaagaagtaccaaattccagtggtttgtctcttctgcttcattctctacttctag

SEQ ID NO: 289816 - DNA, 1695 bp, Artificial Sequence
  derived and/or modified sequence
atgctgggcggcaccgactgcagaaccttcctgaccagccacatcaacctgaagaagaccctgtgcgacgtgatcctgatggtgcaggagagaaagatccccgcccacagagtggtgctggccgccgccagccacttcttcaacctgatgttcaccaccaacatgctggagagcaagagcttcgaggtggagctgaaggacgccgagcccgacatcatcgagcagctggtggagttcgcctacaccgccagaatcagcgtgaacagcaacaacgtgcagagcctgctggacgccgccaaccagtaccagatcgagcccgtgaagaagatgtgcgtggacttcctgaaggagcaggtggacgccagcaactgcctgggcatcagcgtgctggccgagtgcctggactgccccgagctgaaggccaccgccgacgacttcatccaccagcacttcaccgaggtgtacaagaccgacgagttcctgcagctggacgtgaagagagtgacccacctgctgaaccaggacaccctgaccgtgagagccgaggaccaggtgtacgacgccgccgtgagatggctgaagtacgacgagcccaacagacagcccttcatggtggacatcctggccaaggtgagattccccctgatcagcaagaacttcctgagcaagaccgtgcaggccgagcccctgatccaggacaaccccgagtgcctgaagatggtgatcagcggcatgagataccacctgctgagccccgaggacagagaggagctggtggacggcaccagacccagaagaaagaagcacgactacagaatcgccctgttcggcggcagccagccccagagctgcagatacttcaaccccaaggactacagctggaccgacatcagatgccccttcgagaagagaagagacgccgcctgcgtgttctgggacaacgtggtgtacatcctgggcggcagccagctgttccccatcaagagaatggactgctacaacgtggtgaaggacagctggtacagcaagctgggcccccccacccccagagacagcctggccgcctgcgccgccgagggcaagatctacaccagcggcggcagcgaggtgggcaacagcgccctgtacctgttcgagtgctacgacaccagaaccgagagctggcacaccaagcccagcatgctgacccagagatgcagccacggcatggtggaggccaacggcctgatctacgtgtgcggcggcagcctgggcaacaacgtgagcggcagagtgctgaacagctgcgaggtgtacgaccccgccaccgagacctggaccgagctgtgccccatgatcgaggccagaaagaaccacggcctggtgttcgtgaaggacaagatcttcgccgtgggcggccagaacggcctgggcggcctggacaacgtggagtactacgacatcaagctgaacgagtggaagatggtgagccccatgccctggaagggcgtgaccgtgaagtgcgccgccgtgggcagcatcgtgtacgtgctggccggcttccagggcgtgggcagactgggccacatcctggagtacaacaccgagaccgacaagtgggtggccaacagcaaggtgagagccttccccgtgaccagctgcctgatctgcgtggtggacacctgcggcgccaacgaggagaccctggagacctag

SEQ ID NO: 289817 - DNA, 432 bp, Artificial Sequence
  derived and/or modified sequence
atgctgggcggcaccgactgcagaaccttcctgaccagccacatcaacctgaagaagaccctgtgcgacgtgatcctgatggtgcaggagagaaagatccccgcccacagagtggtgctggccgccgccagccacttcttcaacctgatgttcaccaccaacatgctggagagcaagagcttcgaggtggagctgaaggacgccgagcccgacatcatcgagcagctggtggagttcgcctacaccgccagaatcagcgtgaacagcaacaacgtgcagagcctgctggacgccgccaaccagtaccagatcgagcccgtgaagaagatgtgcgtggacttcctgaaggagcaggtggacgccagcaactgcctgggcaagaagtaccagatccccgtggtgtgcctgttctgcttcatcctgtacttctag

SEQ ID NO: 289818 - DNA, 2032 bp, Artificial Sequence
  derived and/or modified sequence
agttggtagcgtcgctccctgagcgtttctaagggggccgcccggccttgtctttcggcagtggccgagccaccgccgcctgccgcgcgttccagagctgggcgctgcagctgcactgccgatcgccgtgtttggtcgatagaatccccagtgtgcccagagagtgcgacccctcgcccggcccggcgagccccgggcgtgaaccgagctgagggaggatggcagcctctggggtggagaagagcagcaagaagaagaccgagaagaaacttgctgctcgggaagaagctaaattgttggcgggtttcatgggcgtcatgaataacatgcggaaacaggtataagtgtgctagcggagtgtctagattgtcctgaattgaaagcaactgcagatgactttattcatcagcactttactgaagtttacaaaactgatgaatttcttcaacttgatgtcaagcgagtaacacatcttctcaaccaggacactctgactgtgagagcagaggatcaggtttatgatgctgcagtcaggtggttgaaatacgatgaacctaatcgccagccatttatggttgatatccttgctaaagtcaggtttcctcttatatcaaagaatttcttaagtaaaacggtacaagctgaaccacttattcaagacaatcctgaatgccttaagatggtgataagtggaatgaggtaccatctactgtctccagaggaccgagaagaacttgtagatggcacaagacctagaagaaagaaacatgactaccgcatagccctatttggaggctctcaaccacagtcttgtagatattttaacccaaaggattatagctggacagacatccgctgcccctttgaaaaacgaagagatgcagcatgcgtgttttgggacaatgtagtatacattttgggaggctctcagcttttcccaataaagcgaatggactgctataatgtagtgaaggatagctggtattcgaaactgggtcctccgacacctcgagacagccttgctgcatgtgctgcagaaggcaaaatttatacatctggaggttcagaagtaggaaactcagctctgtatttatttgagtgctatgatacgagaactgaaagctggcacacaaagcccagcatgctgacccagcgctgcagccatgggatggtggaagccaatggcctaatctatgtttgtggtggaagtttaggaaacaatgtttctgggagagtgcttaattcctgtgaagtttatgatcctgccacagaaacatggactgagctgtgtccaatgattgaagccaggaagaatcatgggctggtatttgtaaaagacaagatatttgctgtgggtggtcagaatggtttaggtggtctggacaatgtggaatattacgatattaagttgaacgaatggaagatggtctcaccaatgccatggaagggtgtaacagtgaaatgtgcagcagttggctctatagtttatgtcttggctggttttcagggtgttggtcgattaggacacattctcgaatataataccgaaacagacaaatgggttgccaactccaaagttcgtgcttttccagtcacaagttgtttaatttgtgttgtcgatacttgtggagcaaatgaagagacccttgaaacatgaaaaatgagtggacttcagactcatcagagactctaaaatatagccaccagtgctttgttccaggagtttggtgacaaagttttggtttggtgttttggtaaagaaagtttcaagtgaaatgaggttcctataaaatagatgtttcttttatatggatttccttaattcaaagatcatattttagctggccacaaaaccaagaacatatctagcaagaaaacttgaaaaagtataagcatttgttaaaaatgtgaatttcttgaatgaatttcacatttgtaactatgattttggcagaatagaagattggctcatcagtgaagcgcagtatcttagctctagattctattttcatgcatcacagaagtgctatac

SEQ ID NO: 289819 - DNA, 285 bp, Artificial Sequence
  derived and/or modified sequence
atggacgaagatactcattatgacaaggtcgaggacgttgtggggagccacattgaggatgccgtcaccttctgggcccaaagtatcaaccgcaataaggatataatgaaaatcggatgtagcctgtctgaagtttgccctcaggccagcagtgtgctcggaaacctggatccaaacaaaatctatggcgggttattcagtgaagaccagtgttggtatagatgtaaagttctgaaaattatctccgtcgagaagtgtttggtgagatatatagattatggatag

SEQ ID NO: 289820 - DNA, 285 bp, Artificial Sequence
  derived and/or modified sequence
atggatgaggacacccactatgacaaggtggaggatgtggtgggcagccacattgaagatgctgtgaccttctgggcccagagcatcaacagaaacaaggacatcatgaagattggctgcagcctgtctgaggtgtgcccccaggccagctctgtgctgggcaacctggaccccaacaagatctacggcggcctcttcagcgaggaccagtgctggtaccgctgcaaggtgctgaagatcatctctgtggagaagtgcctggtgcgctacattgattatggatag

SEQ ID NO: 289821 - DNA, 285 bp, Artificial Sequence
  derived and/or modified sequence
atggacgaggacacccactacgacaaggtggaggacgtggtgggcagtcacattgaagacgccgtcaccttctgggcacagtctattaaccgcaacaaagacataatgaaaatcggttgctctctttctgaagtgtgccctcaggcaagctccgttctggggaacttagacccaaataagatctacggcggtcttttcagtgaggaccaatgttggtatcggtgcaaagtactcaaaattattagtgttgaaaagtgcctggtgaggtatatagactatggatag

SEQ ID NO: 289822 - DNA, 285 bp, Artificial Sequence
  derived and/or modified sequence
atggacgaagacacacattatgataaagtggaagatgtagtcggctcacatatcgaggatgccgtgacattttgggcccaaagcatcaacaggaacaaggatattatgaagattggctgtagcctgagtgaggtatgcccacaagccagtagcgtgctgggaaatctcgatcctaacaaaatttacggagggctcttcagtgaggaccagtgttggtaccgctgcaaggtgctcaagatcatcagtgtagagaagtgtcttgtgcgttacatcgactacggttag

SEQ ID NO: 289823 - DNA, 661 bp, Artificial Sequence
  derived and/or modified sequence
aaggactattttcgtcgctgcttgcgttttaagtctccaatcctgggacgaggcccatttcagggttttctgtcaccttctagccgcccgccaccccagaggggtgccagatgccccagtttttgagtgcatgcaggcaggcgaaagtggctcgaaaagacctccggcctgaatgatctccatgaagacgcggtcacgcagcctccacactctcttccccttctcgaaaattctgtgccatttaagtttcaaaatcccttataaaataagtgtcagagagctacgtgtacccgtttcttccaaattttcatcacgaagtggagatttggacgtactattttgtgatctctgtttgcagaaatttttcaggaattgttcaaatggatgaagatacacattacgataaagtggaagatgtggttggaagtcacatagaagatgcagtaacattttgggcccagagtatcaatagaaataaggatatcatgaagattggttgctcactgtctgaagtttgcccccaggccagttcagttttggggaatcttgacccaaacaagatttatggtggattattttctgaagatcagtgttggtacagatgcaaagtactgaaaatcatcagcgttgaaaagtgtctggtgaggtacattgactatgg

SEQ ID NO: 289824 - DNA, 563 bp, Artificial Sequence
  derived and/or modified sequence
aagtgtgaggtcagtagtagtttttgtggtacgtgcagtggtggccgcttcaaggactattttcgtcgctgcttgcgttttaagtctccaatcctgggacgaggcccatttcagggttttctgtcaccttctagccgcccgccaccccagaggggtgccagatgccccagtttttgagtgcatgcaggcaggcgaaagtggctcgaaaagacctccggcctgaatgatctccatgaagacgcggtcacgcagcctccacactctcttccccttctcgaaaattctgtgccatttaagtttcaaaatcccttataaaataagtgtcagagagctacgtgtacccgtttcttccaaattttcatcacgaagtggagatttggacgtactattttgtgatctctgtttgcagaaagtggtttttcaggaattgttcaaatggatgaagatacacattacgataaagtggaagatgtggttggaagtcacatagaagatgcagtaacattttgggcccagagtatcaatagaaataaggatatcatgaagattggttgctcactgtc

SEQ ID NO: 289825 - DNA, 285 bp, Artificial Sequence
  derived and/or modified sequence
atggacgaggacacccactacgacaaggtggaggacgtggtgggcagccacatcgaggacgccgtgaccttctgggcccagagcatcaacagaaacaaggacatcatgaagatcggctgcagcctgagcgaggtgtgcccccaggccagcagcgtgctgggcaacctggaccccaacaagatctacggcggcctgttcagcgaggaccagtgctggtacagatgcaaggtgctgaagatcatcagcgtggagaagtgcctggtgagatacatcgactacggctag

SEQ ID NO: 289826 - protein, 206 aa, Artificial Sequence
  derived and/or modified sequence
MAANKPKGQNSLALHKVIMVGSGGVGKSALTLQFMYDEFVEDYEPTKADSYRKKVVLDGEEVQIDILDTAGQEDYAAIRDNYFRSGEGFLCVFSITEMESFAATADFREQILRVKEDENVPFLLVGNKSDLEDKRQVSVEEAKNRAEQWNVNYVETSAKTRANVDKVFFDLMREIRARKMEDSKEKNGKKKRKSLAKRIRERCCIL

SEQ ID NO: 289827 - protein, 101 aa, Artificial Sequence
  derived and/or modified sequence
MAANKPKGQNSLALHKVIMVGSGGVGKSALTLQFMYDEFVEDYEPTKADSYRKKVVLDGEEVQIDILDTAGQEDYAAIRDNYFRSGEGFLCVFSITEMESF

SEQ ID NO: 289828 - DNA, 621 bp, Artificial Sequence
  derived and/or modified sequence
atggccgccaacaagcccaagggccagaacagcctggccctgcacaaggtgatcatggtgggcagcggcggcgtgggcaagagcgccctgaccctgcagttcatgtacgacgagttcgtggaggactacgagcccaccaaggccgacagctacagaaagaaggtggtgctggacggcgaggaggtgcagatcgacatcctggacaccgccggccaggaggactacgccgccatcagagacaactacttcagaagcggcgagggcttcctgtgcgtgttcagcatcaccgagatggagagcttcgccgccaccgccgacttcagagagcagatcctgagagtgaaggaggacgagaacgtgcccttcctgctggtgggcaacaagagcgacctggaggacaagagacaggtgagcgtggaggaggccaagaacagagccgagcagtggaacgtgaactacgtggagaccagcgccaagaccagagccaacgtggacaaggtgttcttcgacctgatgagagagatcagagccagaaagatggaggacagcaaggagaagaacggcaagaagaagagaaagagcctggccaagagaatcagagagagatgctgcatcctgtag

SEQ ID NO: 289829 - DNA, 306 bp, Artificial Sequence
  derived and/or modified sequence
atggccgccaacaagcccaagggccagaacagcctggccctgcacaaggtgatcatggtgggcagcggcggcgtgggcaagagcgccctgaccctgcagttcatgtacgacgagttcgtggaggactacgagcccaccaaggccgacagctacagaaagaaggtggtgctggacggcgaggaggtgcagatcgacatcctggacaccgccggccaggaggactacgccgccatcagagacaactacttcagaagcggcgagggcttcctgtgcgtgttcagcatcaccgagatggagagcttctag

SEQ ID NO: 289830 - DNA, 621 bp, Artificial Sequence
  derived and/or modified sequence
atggctgccaataaacctaaagggcagaattctttggcactccataaagtcattatggtaggaagtggcggcgtgggcaagtcagccttgactctccagttcatgtacgatgagttcgtagaagactatgaacccacaaaggcggactcctaccgtaagaaggtggtgctagacggcgaagaggtccaaatagatatcttggacacggcggggcaggaggattatgctgctatcagggataactactttaggtccggtgagggatttttgtgcgtgttttccatcacagaaatggaatctttcgccgctaccgccgattttcgcgagcagattctgcgagtgaaagaagatgagaacgtgcccttcttactggtgggcaacaagagtgatctggaggacaagaggcaggtgtctgtcgaagaagcgaagaatcgagccgagcagtggaacgtgaattacgtggagactagcgccaaaactcgcgccaatgttgataaagtgttttttgacctgatgagggaaattagggctcgaaagatggaagactccaaagagaagaatgggaaaaaaaaacggaaaagtctagccaagcgtatacgggagaggtgttgcattctgtag

SEQ ID NO: 289831 - DNA, 306 bp, Artificial Sequence
  derived and/or modified sequence
atggccgctaacaagccaaagggccagaactcactcgcgctccacaaggtgattatggtaggctctgggggcgtggggaagagtgcattgaccctgcagttcatgtatgatgagttcgtggaggactacgaacccactaaagccgactcttacagaaagaaggtggtgctggacggggaggaagtccaaatcgatatcctagacactgccggccaggaggactatgcagctataagggacaattatttccgctctggtgaaggcttcttgtgcgtgttctccatcaccgagatggagtccttttag

SEQ ID NO: 289832 - DNA, 621 bp, Artificial Sequence
  derived and/or modified sequence
atggccgccaacaagcccaagggccagaacagcctggccctgcacaaggtgatcatggtgggcagcggcggcgtgggcaagagcgccctgaccctgcagttcatgtatgatgaatttgtggaggactatgagcccaccaaggctgacagctacaggaagaaggtggtgctggatggagaggaggtgcagattgacatcctggacacagctggccaggaggactatgctgccatccgggacaactacttccgctctggagagggcttcctgtgtgtgttcagcatcacagagatggagagctttgctgccacagctgacttccgggagcagatcctgcgggtgaaggaggatgaaaatgtgcccttcctgctggtgggcaacaagagtgacctggaggacaagaggcaggtgtctgtggaggaggccaagaacagagctgagcagtggaatgtgaactacgtggagaccagcgccaagacccgggccaacgtggacaaggtgttctttgacctgatgagggagatccgggccaggaagatggaggacagcaaggagaagaatggcaagaagaagaggaagagcctggccaagaggatccgggagcgctgctgcatcctgtag

SEQ ID NO: 289833 - DNA, 306 bp, Artificial Sequence
  derived and/or modified sequence
atggccgccaacaagcccaagggccagaacagcctggccctgcacaaggtgatcatggtgggcagcggcggcgtgggcaagagcgccctgaccctgcagttcatgtatgatgaatttgtggaggactatgagcccaccaaggctgacagctacaggaagaaggtggtgctggatggagaggaggtgcagattgacatcctggacacagctggccaggaggactatgctgccatccgggacaactacttccgctctggagagggcttcctgtgtgtgttcagcatcacagagatggagagcttctag

SEQ ID NO: 289834 - DNA, 621 bp, Artificial Sequence
  derived and/or modified sequence
atggccgccaacaagcccaagggccagaacagcctggccctgcacaaggtgattatggtgggcagcgggggggtcgggaaatctgcactcactcttcagttcatgtatgacgagtttgttgaagactacgagcctacgaaggccgatagttaccggaaaaaggtcgttctggacggggaggaggtacagattgatatcctggataccgcgggacaggaggattatgccgctattagggacaactatttccgtagcggagagggctttctctgcgtgttctctatcacagaaatggagtcatttgccgcaacggctgattttcgcgagcagatcctccgggtgaaggaggacgagaacgtgcctttcctccttgtgggaaacaagtctgatctagaagataagcgtcaggtctctgtggaagaggcaaaaaacagagctgaacaatggaatgtaaactatgttgaaacatcagccaaaacacgtgcgaatgtcgataaagtcttcttcgacttaatgagagaaattcgggctcggaaaatggaagactctaaagagaaaaacggcaaaaagaagaggaaatctcttgcgaaacgcatccgggaacggtgttgcatactttag

SEQ ID NO: 289835 - DNA, 306 bp, Artificial Sequence
  derived and/or modified sequence
atggccgccaacaagcccaagggccagaacagcctggccctgcacaaagtcatcatggttggaagcggaggcgttggtaagtccgcgttgaccctacagtttatgtacgatgagttcgtggaggactatgagccaaccaaagcggatagctacaggaaaaaggtggtgcttgatggggaagaagttcagattgacatccttgatactgccggacaggaggattatgcagccatacgtgataactacttcaggtccggcgaaggcttcctttgtgtgttctcaataacagagatggaatccttctag

SEQ ID NO: 289836 - DNA, 621 bp, Artificial Sequence
  derived and/or modified sequence
atggccgctaataagcctaaaggacagaactccctggcgctgcacaaagtgataatggtcggaagtggtggagtcggtaagagcgctcttaccctccaatttatgtacgacgaattcgtagaagattatgagccaactaaagctgattcctaccggaagaaggttgttctggatggggaagaagtgcagatcgacatacttgacactgcgggacaggaggactatgcagcaatccgcgacaactactttcggtccggggagggtttcctttgtgttttttctatcaccgaaatggagtcctttgccgcaactgccgattttagggagcagatccttcgggttaaagaggacgaaaacgttccatttttattggtggggaacaagagcgatctcgaggataaacgccaggtgagtgtcgaagaggctaagaacagggcggagcaatggaatgttaattacgtggaaacatccgcgaaaacacgcgctaatgtcgacaaagttttctttgatcttatgagagaaatccgcgcacgaaaaatggaagactcgaaggagaagaacggaaaaaaaaagcgtaaaagcctcgccaagcggatccgggaacggtgttgtattctctag

SEQ ID NO: 289837 - DNA, 306 bp, Artificial Sequence
  derived and/or modified sequence
atggccgcaaataaaccaaagggccagaactctctggcccttcacaaagtgatcatggttgggtccggtggcgtgggcaagtcagcattaactctgcaatttatgtacgatgagttcgttgaggattacgagcccacaaaggccgactcttaccgaaagaaagtcgtcctggatggagaggaggtccaaatagacattctggacaccgccggacaggaggattacgccgcaatacgggataattattttagatcaggcgaaggctttctgtgcgtgttctccattactgaaatggaaagcttctag

SEQ ID NO: 289838 - DNA, 621 bp, Artificial Sequence
  derived and/or modified sequence
atggctgcaaataagcctaagggacaaaacagcctggccttgcacaaggtgataatggtaggctcaggaggcgtgggaaagtccgcacttacattgcaattcatgtacgacgaatttgtggaagactacgagcctacaaaagcagatagctaccggaaaaaagtggtgcttgatggtgaggaggtgcaaatagacatactcgacaccgctggccaagaagattacgccgcaattcgcgacaactacttccggtctggagagggcttcctgtgtgtgttcagcattaccgaaatggagagcttcgccgcaaccgcagactttcgcgaacagattttacgggtaaaggaagacgaaaatgtgccctttcttttggtaggaaacaagagcgatctggaggacaagaggcaggtttctgttgaagaggcaaagaatcgggcagagcagtggaatgtcaattacgttgagaccagcgctaagaccagggcaaatgtggacaaggttttcttcgacctcatgagggagattagagcacggaagatggaggattctaaggaaaagaacggtaaaaaaaagagaaagtcacttgccaaaaggatacgcgagagatgctgcatattgtag

SEQ ID NO: 289839 - DNA, 621 bp, Artificial Sequence
  derived and/or modified sequence
atggccgccaacaaacccaagggacagaacagtctggctttacacaaggtgataatggtaggctcaggcggggtgggcaaatcagctcttactctccagtttatgtacgatgaatttgtggaagattacgaaccaacaaaggctgatagttataggaaaaaggtggtattagatggagaagaggtgcagatcgacatcttggacaccgctggccaagaggactatgccgccatacgggataattacttcagatccggcgagggcttcttgtgcgtcttttcaatcacagagatggaatctttcgccgcaaccgcagactttcgcgaacagattttacgggtaaaggaagacgaaaatgtgccctttcttttggtaggaaacaagagcgatctggaggacaagaggcaggtttctgttgaagaggcaaagaatcgggcagagcagtggaatgtcaattacgttgagaccagcgctaagaccagggcaaatgtggacaaggttttcttcgacctcatgagggagattagagcacggaagatggaggattctaaggaaaagaacggtaaaaaaaagagaaagtcacttgccaaaaggatacgcgagaggtgctgcatattatag

SEQ ID NO: 289840 - DNA, 2880 bp, Artificial Sequence
  derived and/or modified sequence
aggcccatgatcaccctcctctcagcccacggacaggaagtcgctccccagctgccccgccccgctccccagcgccccggaagtgatctgtggcggctgctgcagagccgccaggaggagggtggatctccccagagcaaagcgtcggagtcctcctcctccttctcctcctcctcctcctcctcctccagccgcccaggctcccccgccacccgtcagactcctccttcgaccgctcccggcgcggggccttccaggcgacaaggaccgagtaccctccggccggagccacgcagccgcggcttccggagccctcggggcggcggactggctcgcggtgcagattcttcttaatcctttggtgaaaactgagacacaaaatggctgcaaataagcccaagggtcagaattctttggctttacacaaagtcatcatggtgggcagtggtggcgtgggcaagtcagctctgactctacagttcatgtacgatgagtttgtggaggactatgagcctaccaaagcagacagctatcggaagaaggtagtgctagatggggaggaagtccagatcgatatcttagatacagctgggcaggaggactacgctgcaattagagacaactacttccgaagtggggaggggttcctctgtgttttctctattacagaaatggaatcctttgcagctacagctgacttcagggagcagattttaagagtaaaagaagatgagaatgttccatttctactggttggtaacaaatcagatttagaagataaaagacaggtttctgtagaagaggcaaaaaacagagctgagcagtggaatgttaactacgtggaaacatctgctaaaacacgagctaatgttgacaaggtattttttgatttaatgagagaaattcgagcgagaaagatggaagacagcaaagaaaagaatggaaaaaagaagaggaaaagtttagccaagagaatcagagaaagatgctgcattttataatcaaagcccaaactcctttcttatcttgaccatactaataaatataatttataagcattgccattgaaggcttaattgactgaaattactttaacattttggaaattgttgtatatcactaaaagcatgaattggaactgcaatgaaagtcaaatttactttaaaaagaaattaatatggcttcaccaagaagcaaagttcaacttatttcataattgcctacatttatcatggtcctgaatgtagcgtgtaagcttgtgtttcttgggcagtctttcttgaaattgaagaggtgaaatgggggtggggagtgggaggaaaggtgacttcctctggtgtttattataaagcttaaattttatatcattttaaaatgtcttggtcttctactgccttgaaaaatgacaattgtgaacatgatagttaaactaccactttttttaaccattattatgcaaaatttagaagaaaagttattggcatggttgttgcatatagttaaactgagagtaattcatctgtgaatctgctttaattacctggtgagtaacttagaaaagtggtgtaaacttgtacatggaattttttgaatatgccttaatttagaaactgaaaaatatctggttatatcattctgggtgtgttcttactgacaccaggggtccgctgccccatgtgtcctggtgagaaaatatatgcctggcacagcttttgtatagaaaattcttgagaagtaactgtccgctagaagtctgtccaaatttaaaatgtgtgccatattctggttcttgaaaataagattccagagctctttgatcgcttttaataaactgcaagttcattttaaatgaagggccagcatatatacttgcaagataattttcagctgcaaggattcagcaccagttatgtttgaatgaaccctccttttctctgagattctggtccctggaaatccctttctgctagtggtgagcatgtaagtgttaagtttttaatctgggagcagggcataggaagaaaatgtcagtagtgctaatgcattttgcactagaacgcttcgggaaaatattcatgcttgccatctgttcatttctaaatttatattcataaagttacagtttgatacaggaattattaggagtaattcttttctgtttctgtttataatgaagaacactgtagctacattttcagaagttaacatcaagccatcaaacctgggtatagtgcagaaaacgtggcacacactgaccacacattaggctgtgtcaccattgtgtggtgtacctgctggaagaattctagcatgctacttggggacataatttcagtgggaaatatgccactgaccgattttttttttttcctctttgcagtggggctaggacagttgattcaacaaagtatttttttcttttttctcagtcctaatttgaacaggtcaaagatgtgttcaggcattccaggtaacaggtgtgtatgtaaagttaaaaataggctttttaggaactcactctttagatatttacatccagcttctcatgttaaatatttgtccttaaagggtttgagatgtacatctttcatttcgtatttctcataggctatgccatgtgcggaattcaagttaccaatgtaacactggccagcgggcccagcaatctccatgtgtacttattacagtcttatttaaccaggggtcctaaccactaacattgtgactttgctttgagacctttcctctcctgggtactgaggtgctatgaagccaactgacaaagatgcatcacgtgtcttaggctgatgccactacccgatttgtttatttgcaatttgagccatttaaagaccaataaacttccttttttaaaatgtt

SEQ ID NO: 289841 - DNA, 882 bp, Artificial Sequence
  derived and/or modified sequence
ggtgtgtccgggcggcggcgggccgaggccctgacgcgggttcgggctgccgagattgcacatcccacgttctgcccggggacgagctgcgagatgagcccggctggaatccggggcaccgcgttcgccgctgtggggcgagtgagcccccgagagtgagcggctgcggagaggtcccctgcgcccggcagccggtctcagttggcctcgtccgaaggtcaccccgcacctttcgtccacggcgcccaagttcccgcccgggcggtgcccgcgacctggggcaacccgctgccgccgcagtccccgcgcctcactccacccctctcccctccttccctttctttccactccttgcctgtgctagagccgctgctttttaagcatctccgccagggttttttgtttgtttgttttgtttgtttgtgtttttttttttttttgccagttaaaggaatggtttttcagacttaaagtcattagactctccgcactgaactgaatacctggccttgggcgcttgcacagctttagcccattttcagattcttcttaatcctttggtgaaaactgagacacaaaatggctgcaaataagcccaagggtcagaattctttggctttacacaaagtcatcatggtgggcagtggtggcgtgggcaagtcagctctgactctacagttcatgtacgatgagtttgtggaggactatgagcctaccaaagcagacagctatcggaagaaggtagtgctagatggggaggaagtccagatcgatatcttagatacagctgggcaggaggactacgctgcaattagagacaactacttccgaagtggggaggggttcctctgtgttttctctattacagaaatggaatccttt

SEQ ID NO: 289842 - protein, 171 aa, Artificial Sequence
  derived and/or modified sequence
MAATGANAEKAESHNDCPVRLLNPNIAKMKEDILYHFNLTTSRHNFPALFGDVKFVCVGGSPSRMKAFIRCVGAELGLDCPGRDYPNICAGTDRYAMYKVGPVLSVSHGMGIPSISIMLHELIKLLYYARCSNVTIIRIGTSGGIGILKHLRRKDTGKSKGGRERRSTKLR

SEQ ID NO: 289843 - DNA, 435 bp, Artificial Sequence
  derived and/or modified sequence
atggccgccaccggcgccaacgccgagaaggccgagagccacaacgactgccccgtgagactgctgaaccccaacatcgccaagatgaaggaggacatcctgtaccacttcaacctgaccaccagcagacacaacttccccgccctgttcggcgacgtgaagttcgtgtgcgtgggcggcagccccagcagaatgaaggccttcatcagatgcgtgggcgccgagctgggcctggactgccccggcagagactaccccaacatctgcgccggcaccgacagatacgccatgtacaaggtgggccccgtgctgagcgtgagccacggcatgggcatccccagcatcagcatcatgctgcacgagctgatcaagctgctgtactacgccagatgcagcaacgtgaccatcatcagaatcggcaccagcggcggctag

SEQ ID NO: 289844 - DNA, 516 bp, Artificial Sequence
  derived and/or modified sequence
atggccgccaccggcgccaacgccgagaaggccgagagccacaacgactgccccgtgagactgctgaaccccaacatcgccaagatgaaggaggacatcctgtaccacttcaacctgaccaccagcagacacaacttccccgccctgttcggcgacgtgaagttcgtgtgcgtgggcggcagccccagcagaatgaaggccttcatcagatgcgtgggcgccgagctgggcctggactgccccggcagagactaccccaacatctgcgccggcaccgacagatacgccatgtacaaggtgggccccgtgctgagcgtgagccacggcatgggcatccccagcatcagcatcatgctgcacgagctgatcaagctgctgtactacgccagatgcagcaacgtgaccatcatcagaatcggcaccagcggcggcatcggcatcctgaagcacctgagaagaaaggacaccggcaagagcaagggcggcagagagagaagaagcaccaagctgagatag

SEQ ID NO: 289845 - DNA, 90 bp, Artificial Sequence
  derived and/or modified sequence
atggccgccaccggcgccaacgccgagaaggccgagagccacaacgactgccccgtgagactgctgaaccccaacatcgccaagatgtag

SEQ ID NO: 289846 - DNA, 441 bp, Artificial Sequence
  derived and/or modified sequence
atggccgccaccggcgccaacgccgagaaggccgagagccacaacgactgccccgtgagactgctgaaccccaacatcgccaagatgaaggaggacatcctgtaccacttcaacctgaccaccagcagacacaacttccccgccctgttcggcgacgtgaagttcgtgtgcgtgggcggcagccccagcagaatgaaggccttcatcagatgcgtgggcgccgagctgggcctggactgccccggcagagactaccccaacatctgcgccggcaccgacagatacgccatgtacaaggtgggccccgtgctgagcgtgagccacggcatgggcatccccagcatcagcatcatgctgcacgagctgatcaagctgctgtactacgccagatgcagcaacgtgaccatcatcagaatcggcaccagcggcggcatcggctag

SEQ ID NO: 289847 - DNA, 435 bp, Artificial Sequence
  derived and/or modified sequence
atggctgccaccggggccaacgcggaaaaagcggaatctcacaatgattgtcctgtgcgcctcttgaaccccaatattgctaaaatgaaagaggacattctctaccactttaacttgacaacatcaagacataacttccccgcacttttcggagacgtaaaatttgtgtgcgtaggcggatcaccctctaggatgaaggcttttattagatgtgtgggcgcagaactgggtcttgattgccctgggcgggactatcccaacatctgcgccggtactgacagatacgctatgtacaaggtcggccctgtgctgtccgtctctcatggtatgggcatcccatcgatatcaataatgctgcatgagctcataaaactgctctactatgcccgttgttctaacgtgacgatcattcgtataggaactagcggcggatag

SEQ ID NO: 289848 - DNA, 516 bp, Artificial Sequence
  derived and/or modified sequence
atggccgctactggggccaatgccgaaaaggccgagtctcataatgactgccccgtgcgactgctgaacccgaacatagccaagatgaaggaggacatcctctatcacttcaacctgaccaccagtcggcataatttcccagctctcttcggggacgtgaagtttgtgtgcgttgggggcagcccctcgaggatgaaagccttcattaggtgtgtgggggcagaactgggcttagactgtccgggaagggattaccccaacatctgcgcgggcaccgatagatacgccatgtataaagtcggccccgttctgtctgtgtcacatggaatggggataccctcaatatccatcatgcttcacgagctcataaagttactgtattacgctcgctgctcaaacgtgactattattcgaattggtacgagtggtggaatcggtattctgaagcacctgaggcgtaaagacaccggcaagtcgaaaggcggcagagaacgaaggtctacaaagctgagatag

SEQ ID NO: 289849 - DNA, 90 bp, Artificial Sequence
  derived and/or modified sequence
atggctgcgactggagccaatgccgaaaaggccgaatcccacaatgactgccctgtgcggctgctcaacccaaacattgcgaagatgtag

SEQ ID NO: 289850 - DNA, 441 bp, Artificial Sequence
  derived and/or modified sequence
atggccgcgacaggggcaaacgccgagaaggcagagagtcacaatgactgcccggtgagattactaaatcccaacattgccaagatgaaggaggatattttataccactttaatcttactacaagcagacataacttcccagcactcttcggggacgtcaaattcgtatgcgtgggcggttctccgagtaggatgaaggctttcatcaggtgcgttggtgccgaactgggtctggactgtccaggcagagattacccaaacatatgtgccggcaccgacagatatgctatgtataaggtagggccagtactgagtgtgagtcatggcatgggtatccctagcatctccattatgttgcatgagttaattaagctgctgtattacgccagatgttctaacgttaccattatcaggattggaacatccggcggcatcggctag

SEQ ID NO: 289851 - DNA, 435 bp, Artificial Sequence
  derived and/or modified sequence
atggccgccaccggggccaatgctgagaaggccgagagccacaatgactgccctgtgcggctgctgaaccccaacatcgccaagatgaaggaggacatcctgtaccacttcaacctgaccaccagccgccacaacttccctgccctgtttggagatgtgaagtttgtgtgtgtgggcggcagccccagcaggatgaaggccttcatccgctgtgtgggcgctgagctgggcctggactgccccggccgggactaccccaacatctgtgccggcacagacagatatgccatgtacaaggtgggccctgtgctgtctgtgagccacggcatgggcatccccagcatcagcatcatgctgcacgagctgatcaagctgctgtactatgcccgctgcagcaatgtgaccatcatcagaattggcaccagcggcggctag

SEQ ID NO: 289852 - DNA, 516 bp, Artificial Sequence
  derived and/or modified sequence
atggccgccaccggggccaatgctgagaaggccgagagccacaatgactgccctgtgcggctgctgaaccccaacatcgccaagatgaaggaggacatcctgtaccacttcaacctgaccaccagccgccacaacttccctgccctgtttggagatgtgaagtttgtgtgtgtgggcggcagccccagcaggatgaaggccttcatccgctgtgtgggcgctgagctgggcctggactgccccggccgggactaccccaacatctgtgccggcacagacagatatgccatgtacaaggtgggccctgtgctgtctgtgagccacggcatgggcatccccagcatcagcatcatgctgcacgagctgatcaagctgctgtactatgcccgctgcagcaatgtgaccatcatcagaattggcaccagcggcggcatcggcatcctgaagcacctgcggaggaaggacaccgggaagagcaagggcggccgggagaggaggagcaccaagctgaggtag

SEQ ID NO: 289853 - DNA, 90 bp, Artificial Sequence
  derived and/or modified sequence
atggccgccaccggggccaatgctgagaaggccgagagccacaatgactgccctgtgcggctgctgaaccccaacatcgccaagatgtag

SEQ ID NO: 289854 - DNA, 441 bp, Artificial Sequence
  derived and/or modified sequence
atggccgccaccggggccaatgctgagaaggccgagagccacaatgactgccctgtgcggctgctgaaccccaacatcgccaagatgaaggaggacatcctgtaccacttcaacctgaccaccagccgccacaacttccctgccctgtttggagatgtgaagtttgtgtgtgtgggcggcagccccagcaggatgaaggccttcatccgctgtgtgggcgctgagctgggcctggactgccccggccgggactaccccaacatctgtgccggcacagacagatatgccatgtacaaggtgggccctgtgctgtctgtgagccacggcatgggcatccccagcatcagcatcatgctgcacgagctgatcaagctgctgtactatgcccgctgcagcaatgtgaccatcatcagaattggcaccagcggcggcattggatag

SEQ ID NO: 289855 - DNA, 435 bp, Artificial Sequence
  derived and/or modified sequence
atggccgccaccggcgccaacgccgagaaggccgagagccacaacgactgcccagtgagactgcttaacccaaacatcgctaaaatgaaggaggatatcttatatcacttcaacctgactacatcccgtcataactttcccgctctcttcggcgacgtgaaattcgtctgcgtgggaggcagcccatctcgcatgaaggccttcattaggtgtgtcggagccgaactggggctggactgcccgggacgcgattaccctaacatctgcgctggcacggatcggtacgccatgtataaggtggggcctgtgctcagcgtgtctcacggtatggggatcccatccatctcaatcatgctccatgaactgatcaaactcctatactacgctaggtgcagtaatgtcaccattattcgtattggtacctccggaggctag

SEQ ID NO: 289856 - DNA, 516 bp, Artificial Sequence
  derived and/or modified sequence
atggccgccaccggcgccaacgccgagaaggccgagagccacaacgattgccctgtcagactgctgaatccaaacatcgctaagatgaaggaagatatactgtaccacttcaaccttacaactagcaggcacaattttccagcactgtttggtgatgtcaagttcgtatgcgtggggggtagcccctcacggatgaaggccttcatccgctgtgtaggagctgaactcggtctggattgccctggcagagattacccaaatatttgtgcaggaaccgacaggtatgctatgtataaagtcggccctgttctctctgtgtcgcatgggatgggcataccgagtatttctatcatgttacatgaactaattaaacttctgtattacgccaggtgtagtaacgtgacaataatcagaatcggcactagcggcggcattggaatcctcaaacatctacgacgcaaagacactgggaagtccaaggggggacgggagagacgaagcactaagttacgatag

SEQ ID NO: 289857 - DNA, 90 bp, Artificial Sequence
  derived and/or modified sequence
atggccgccaccggcgccaacgccgagaaggccgagagccacaacgattgcccggtgcgcctgctcaatcctaacattgccaagatgtag

SEQ ID NO: 289858 - DNA, 441 bp, Artificial Sequence
  derived and/or modified sequence
atggccgccaccggcgccaacgccgagaaggccgagagccacaacgattgccccgtcagattattgaatccaaatatcgccaagatgaaagaagatatcctgtaccacttcaatctgactacgtcccgtcacaattttcctgcactctttggggacgtcaagttcgtatgtgttggcggaagtccgtcccggatgaaagcctttatacgatgcgtgggcgcagaattgggactcgattgtcctggccgggattaccctaacatctgtgctggaactgaccggtatgctatgtataaagtgggccccgtgttgtcagtgtctcatggaatgggcatccccagcatctctatcatgcttcatgagttaatcaaacttctttactatgctagatgcagcaatgtgactattatccggataggaacatccggagggatagggtag

SEQ ID NO: 289859 - DNA, 435 bp, Artificial Sequence
  derived and/or modified sequence
atggcagcaacgggcgcaaacgcagaaaaggctgaatcccacaatgattgtcccgttaggctcctgaaccctaacatagccaagatgaaggaagatattctatatcactttaacctaaccaccagccggcacaactttccggctttatttggagatgtgaaatttgtatgtgtagggggttccccatcaagaatgaaagccttcatccgctgcgtcggtgcagaattgggtctggattgcccgggtagggactatccaaatatttgcgctgggaccgatcgctacgctatgtataaggtgggaccagtgctttctgtgtctcatgggatgggtatcccgtcaatttcgattatgttgcacgaattgatcaagctgctctactatgccagatgttccaacgtgaccatcatccgcattgggacatccggaggatag

SEQ ID NO: 289860 - DNA, 516 bp, Artificial Sequence
  derived and/or modified sequence
atggccgcaaccggggctaacgcggagaaagcggagtctcacaacgactgcccagtaaggcttcttaatccaaacatcgctaagatgaaggaggatatactgtaccatttcaatttaaccaccagcaggcacaatttccccgctctgttcggtgatgtgaaattcgtctgcgttggagggtccccttctagaatgaaggccttcatccggtgtgtgggagccgaactaggactagactgtcccggacgcgactacccaaatatttgcgccggtacggatagatatgccatgtataaggtagggccagtgctgagcgtgagccatggaatgggaatcccctccatctctatcatgttgcacgaactcatcaaactgctgtactatgcacggtgttcaaatgtcaccattataaggatcggcactagcggcggtattggcatcctcaagcacttgcggaggaaggacacaggtaaaagcaagggaggaagagagagacggtcgacaaaactgcgttag

SEQ ID NO: 289861 - DNA, 90 bp, Artificial Sequence
  derived and/or modified sequence
atggcggctacaggagctaacgcggagaaagctgagtcccacaatgactgtcccgtgagactcctcaatccgaacattgccaagatgtag

SEQ ID NO: 289862 - DNA, 441 bp, Artificial Sequence
  derived and/or modified sequence
atggccgctaccggggctaacgcggagaaggcggaatcacataatgactgccccgttaggcttctaaaccctaacatcgccaaaatgaaggaggatatactgtaccacttcaacctaaccacttcccgccacaacttcccagccctcttcggagatgtaaaattcgtttgcgttggaggcagtcccagcaggatgaaggccttcattaggtgtgtcggcgctgaactcgggctcgattgtccaggtcgcgattacccaaacatatgtgcagggaccgaccggtacgctatgtacaaggtggggcctgttttatctgtctcacatgggatgggcatcccctccattagcatcatgttacatgaacttattaaactcttgtattatgccaggtgtagtaacgtaacaatcatacgtatcgggacaagtggcggtatcgggtag

SEQ ID NO: 289863 - DNA, 864 bp, Artificial Sequence
  derived and/or modified sequence
ggctttgccccagcaagcgggaactcccaggatcaggaaggtcccagagaaactccccaggggggaagccgaggccgtccagagagatccagggtacacacagtgacagtgccagctccacattcccgaccaccgggccagggctggttccacgctgtcatttctctccgctggccccagccgcggggccaccgccagacagacagaccggggatcctgcctggcggcgtgaccttgggttagtcctagagccgcttctagcccggtttcctccgccccaggttaggaccacgtggggcttggtgaggtgactcgcggtcgcgggtgactcgccggcaggacactgcctggaacgcctggagcgcctcccactgcagacgtctgtccgcctccagccgctctcctctgacgggtcctgcctcagttggcggaatggcggccacgggagccaatgcagagaaagctgaaagtcacaatgattgccccgtcagacttttaaatccaaacatagcaaaaatgaaagaagatattctctatcatttcaatctcaccactagcagacacaatttcccagccttgtttggagatgtgaagtttgtgtgtgttggtggaagcccctcccggatgaaagccttcatcaggtgcgttggtgcagagctgggccttgactgcccaggtagagactatcccaacatctgtgcgggaactgaccgctatgccatgtataaagtaggaccggtgctgtctgtcagtcatggtatgggcattccttctatctcaatcatgttgcatgagctcataaagctgctgtactatgcccggtgctccaacgtcactatcatccgcattggcacttctggtggg

SEQ ID NO: 289864 - DNA, 974 bp, Artificial Sequence
  derived and/or modified sequence
agactccatatgagattcacctcgcaggtggttccctcattcgagtgctccggcgcacagacccgcgccccgccgtctgcgagcctcccgagagccgtcccttcgtccggccctggagcattgcgtttgtcgccggtgtcgcagtgcgaggatggcgccgcgggtgtagcggctctctgcgcaggccgagtgggcttggtgaggtgactcgcggtcgcgggtgactcgccggcaggacactgcctggaacgcctggagcgcctcccactgcagacgtctgtccgcctccagccgctctcctctgacgggtcctgcctcagttggcggaatggcggccacgggagccaatgcagagaaagctgaaagtcacaatgattgccccgtcagacttttaaatccaaacatagcaaaaatgaaagaagatattctctatcatttcaatctcaccactagcagacacaatttcccagccttgtttggagatgtgaagtttgtgtgtgttggtggaagcccctcccggatgaaagccttcatcaggtgcgttggtgcagagctgggccttgactgcccaggtagagactatcccaacatctgtgcgggaactgaccgctatgccatgtataaagtaggaccggtgctgtctgtcagtcatggtatgggcattccttctatctcaatcatgttgcatgagctcataaagctgctgtactatgcccggtgctccaacgtcactatcatccgcattggcacttctggtgggatagggattttgaagcaccttaggagaaaagacacaggaaaatcaaaggggggaagagagaggcgcagtacaaaactcagataagtgtccttaaattagcttaaaatgtccctatcctcaacagggacattttttttttgtttaaaaaacaaagatggttggccgggcgcggtggctcacacctgtaatcccagcacattgggaggccgaggcg

SEQ ID NO: 289865 - DNA, 682 bp, Artificial Sequence
  derived and/or modified sequence
caggaaggtcccagagaaactccccaggggggaagccgaggccgtccagagagatccagggtacacacagtgacagtgccagctccacattcccgaccaccgggccagggctggttccacgctgtcatttctctccgctggccccagccgcggggccaccgccagacagacagaccggggatcctgcctggcggcgtgaccttgggttagtcctagagccgcttctagcccggtttcctccgccccagtgctccggcgcacagacccgcgccccgccgtctgcgagcctcccgagagccgtcccttcgtccggccctggagcattgcgtttgtcgccggtgtcgcagtgcgaggatggcgccgcgggtgtagcggctctctgcgcaggccgagtgggcccagagaagcgaggaactccgcagctcgtcgacacgtctcgtctcctgtcccaattcagggcttggtgaggtgactcgcggtcgcgggtgactcgccggcaggacactgcctggaacgcctggagcgcctcccactgcagacgtctgtccgcctccagccgctctcctctgacgggtcctgcctcagttggcggaatggcggccacgggagccaatgcagagaaagctgaaagtcacaatgattgccccgtcagacttttaaatccaaacatagcaaaaatgaa

SEQ ID NO: 289866 - DNA, 918 bp, Artificial Sequence
  derived and/or modified sequence
attcgagtgctccggcgcacagacccgcgccccgccgtctgcgagcctcccgagagccgtcccttcgtccggccctggagcattgcgtttgtcgccggtgtcgcagtgcgaggatggcgccgcgggtgtagcggctctctgcgcaggccgagtggggcggtgacggaggctctggtgcaccttggctgtgagctgcagaggagcagagagcggcccggcgcggctgcgcggggaggcgggcgcgcggccgggaggttctggggctggtgtgtgcggagcgagggcccagagaagcgaggaactccgcagctcgtcgacacgtctcgtctcctgtcccaattcagggcttggtgaggtgactcgcggtcgcgggtgactcgccggcaggacactgcctggaacgcctggagcgcctcccactgcagacgtctgtccgcctccagccgctctcctctgacgggtcctgcctcagttggcggaatggcggccacgggagccaatgcagagaaagctgaaagtcacaatgattgccccgtcagacttttaaatccaaacatagcaaaaatgaaagaagatattctctatcatttcaatctcaccactagcagacacaatttcccagccttgtttggagatgtgaagtttgtgtgtgttggtggaagcccctcccggatgaaagccttcatcaggtgcgttggtgcagagctgggccttgactgcccaggtagagactatcccaacatctgtgcgggaactgaccgctatgccatgtataaagtaggaccggtgctgtctgtcagtcatggtatgggcattccttctatctcaatcatgttgcatgagctcataaagctgctgtactatgcccggtgctccaacgtcactatcatccgcattggcacttctggtgggataggt

SEQ ID NO: 289867 - protein, 156 aa, Artificial Sequence
  derived and/or modified sequence
MTTNPKPNKALKVKKEAGENAPVLSDDELVSMSVRELNQHLRGLTKEEVTRLKQRRRTLKNRGYAASCRIKRVTQKEELERQRVELQQEVEKLARENSSMRLELDALRSKYEALQTFARTVARGPVAPSKVATTSVITIVKSTELSSTSVPFSAAS

SEQ ID NO: 289868 - DNA, 471 bp, Artificial Sequence
  derived and/or modified sequence
atgaccaccaaccccaagcccaacaaggccctgaaggtgaagaaggaggccggcgagaacgcccccgtgctgagcgacgacgagctggtgagcatgagcgtgagagagctgaaccagcacctgagaggcctgaccaaggaggaggtgaccagactgaagcagagaagaagaaccctgaagaacagaggctacgccgccagctgcagaatcaagagagtgacccagaaggaggagctggagagacagagagtggagctgcagcaggaggtggagaagctggccagagagaacagcagcatgagactggagctggacgccctgagaagcaagtacgaggccctgcagaccttcgccagaaccgtggccagaggccccgtggcccccagcaaggtggccaccaccagcgtgatcaccatcgtgaagagcaccgagctgagcagcaccagcgtgcccttcagcgccgccagctag

SEQ ID NO: 289869 - DNA, 471 bp, Artificial Sequence
  derived and/or modified sequence
atgaccactaatccgaaacctaacaaagcactcaaagtgaaaaaggaagcaggcgagaacgcgccagtgctatcagatgacgagcttgtgtccatgtcagttcgagaactgaaccagcaccttcgagggcttacaaaggaggaggtcacccgtttgaagcagcgcagacgaactctgaagaaccgtggctacgcagcttcctgtaggattaagagggtgactcaaaaggaggagctcgaaaggcaacgcgtggaactgcagcaggaggtcgaaaagctggcaagggagaatagtagcatgcggctcgagctggatgctcttaggtctaagtatgaagctctccagactttcgcaagaaccgtggcacggggcccagttgccccttcgaaagtcgctacaacaagtgttattacgattgtgaaatccacagaattaagtagcacatcagtccctttcagtgcggcatcctag

SEQ ID NO: 289870 - DNA, 471 bp, Artificial Sequence
  derived and/or modified sequence
atgaccaccaatcccaagcccaataaggcgctgaaggtgaagaaggaagcaggggaaaacgctcctgtcctctcggacgacgaattggtgtctatgtcggttagggagctgaaccagcacctgcgcggattaaccaaggaagaggtgacacgtttaaaacagcgccggaggactctgaagaacagaggttacgccgcttcatgcaggataaaacgggtgactcagaaagaggagctggaacgtcaacgggtggaactgcagcaggaagttgaaaagctcgcacgggaaaacagttcaatgcgccttgagctggatgcactacgctccaagtacgaagccctccagacatttgcaaggactgttgcccggggcccggttgccccaagcaaagtcgcgacaacttcagtgataactattgtcaagagtacggagctttcttcaacctccgtcccttttagcgctgcgagctag

SEQ ID NO: 289871 - DNA, 471 bp, Artificial Sequence
  derived and/or modified sequence
atgacaaccaatcccaaacccaataaggctttgaaagtcaaaaaggaggccggcgagaacgcccctgtgctgtcagacgacgagctggtgtccatgagtgtccgcgaactaaaccagcacctgagggggctcacaaaagaagaagttactcgcttaaaacagcggaggaggaccctaaagaatcgcggctatgctgctagttgccgaattaagcgcgtaacccaaaaagaagaactggagcgccagcgcgtagaactgcagcaggaagtggagaagctggcacgagaaaatagtagcatgcgacttgaactggacgctttacgctctaagtatgaggccctgcagaccttcgctagaactgttgctcggggtcccgttgcaccctccaaggtggctactacctctgtgatcactattgtcaaaagcacagagctcagctccaccagtgtgccattctccgccgcctcctag

SEQ ID NO: 289872 - DNA, 471 bp, Artificial Sequence
  derived and/or modified sequence
atgaccaccaaccccaagcccaacaaggccctgaaggtgaagaaggaggccggagaaaatgcccctgtgctgagtgatgatgagctggtgtccatgtctgtgcgggagctgaaccagcacctgcggggcctgaccaaggaggaggtgacccggctgaagcagaggaggaggaccctgaagaacagaggctatgctgccagctgccgcatcaagagggtgacccagaaggaggagctggagcggcagagggtggagctgcagcaggaggtggagaagctggcccgggagaacagctccatgaggctggagctggatgccctgcggagcaaatatgaggccctgcagacctttgccaggacagtggcccggggccctgtggcccccagcaaggtggccaccaccagcgtcatcaccatcgtgaagagcacagagctgagcagcacctctgtgcccttctctgctgccagctag

SEQ ID NO: 289873 - DNA, 471 bp, Artificial Sequence
  derived and/or modified sequence
atgaccaccaaccccaagcccaacaaggccctgaaggtgaagaaggaagcgggggaaaatgctccagtcctgagtgatgatgaactggtctctatgtcagtccgtgaactgaaccaacatctgcggggactgactaaggaagaagtgacccgcctcaagcagcggagaagaaccctcaagaatcggggatatgctgcttcctgccgcattaagcgggtgacacagaaggaagagctagagcggcagagggtcgagctacagcaggaggtagaaaaacttgctcgcgaaaactcgtcaatgcgattggagctcgatgctcttcgaagtaagtacgaagcattacagacattcgcacgcactgttgctaggggcccagtcgccccatctaaggtggcgactacttcggtcataactattgtgaaaagtacggagcttagttcaacctctgtgcccttcagtgcagccagttag

SEQ ID NO: 289874 - DNA, 471 bp, Artificial Sequence
  derived and/or modified sequence
atgaccaccaaccccaagcccaacaaggccctgaaggtgaagaaggaagccggtgagaatgcacctgtgctgagcgacgacgaactggtttcaatgagcgtccgcgaactaaaccaacatttgcggggattaaccaaggaggaggtgactaggcttaagcagcgaaggaggacactcaagaaccgggggtacgccgctagttgcagaatcaaacgggtcacccagaaagaagaattagagagacaacgcgtggagcttcaacaggaagttgagaagctagcgcgtgagaattcctctatgcgcttagagttggatgctctgcgcagtaagtacgaagcccttcagacctttgcacggaccgtagcccgggggcccgtcgctccaagcaaagtcgccacgactagcgtgatcaccatagttaagagcaccgaactgagctctacctctgtaccattctcagctgcaagctag

SEQ ID NO: 289875 - DNA, 471 bp, Artificial Sequence
  derived and/or modified sequence
atgaccaccaaccccaagcccaacaaggccctgaaggtgaagaaggaggcaggcgaaaatgcccccgtgctgtccgacgacgagctggtatctatgtccgtacgggagctcaaccagcatttacgagggctgaccaaggaggaggtgactaggctcaagcagcgaaggcggaccctcaagaatagaggctatgccgcctcctgtagaataaaacgggtcacacagaaggaggagcttgaacggcagcgtgtggagttgcaacaggaggtcgaaaagttggctcgggagaatagctctatgagattggagttagacgccttgcggtctaaatacgaagcgcttcagacgtttgctagaactgtggctagagggcccgttgctccctctaaggtggccactaccagtgtcatcacgatcgtaaagagtacagaactgtcgtccacatccgtcccattctcagccgccagctag

SEQ ID NO: 289876 - DNA, 471 bp, Artificial Sequence
  derived and/or modified sequence
atgacaacaaatccgaaaccaaataaagcactcaaggtgaaaaaggaggccggtgaaaatgccccagtcctgagtgacgatgagttagtctccatgagtgttagggagctaaaccagcacctgcggggactcacaaaggaagaggtcactcgcctgaagcagcgccgaagaacacttaaaaatcggggttacgcagcgtcgtgtagaatcaaaagagttacacagaaagaggaattagagcgccaacgagtggagctgcagcaagaggttgaaaaacttgctagagagaacagctccatgcggctcgaactggatgcgctgagatccaaatacgaggcattgcagacattcgcccgaaccgtcgccagaggaccggtcgcgccaagcaaggtggctaccacttcggtgatcacaatagtcaaatctacggaattatccagcacatctgtaccattctccgctgccagttag

SEQ ID NO: 289877 - DNA, 471 bp, Artificial Sequence
  derived and/or modified sequence
atgacgacaaaccctaaacctaataaggccctgaaagtgaaaaaggaggctggcgagaacgcacccgtcttgagtgatgatgagctggtctctatgtctgtcagagagctgaaccagcatttacgaggtctcacaaaggaggaggtcacccggttgaagcagcggagaaggacactgaagaatcgtgggtacgcagcatcttgtaggatcaagcgcgttactcagaaagaagaattggagcgacagcgcgttgaattgcagcaggaggtggaaaagttagcccgagagaacagtagcatgcggctcgaattagacgcactgagaagcaaatacgaagccctacaaaccttcgccaggaccgtggccaggggccctgtggccccatctaaggtggccaccacttcagttataacaattgtgaagtccactgagctttcatctacgagtgtgccattttccgctgcttcttag

SEQ ID NO: 289878 - DNA, 471 bp, Artificial Sequence
  derived and/or modified sequence
atgacaacaaatcctaagcctaacaaggctctcaaagttaagaaggaagcaggcgagaacgcgccagtgttaagtgacgacgagctggtctctatgagtgtccgggagttgaaccagcacctccggggtcttaccaaagaggaagtcaccaggctgaaacagcgacgcaggacattaaagaaccgaggctacgccgcaagttgccgtattaagcgtgtgacccaaaaggaagagctggagaggcagcgcgtggaactccagcaggaggtggagaaactggcccgagagaactcttctatgaggttggagttagatgcattgagatctaagtatgaggcactgcagacctttgcccgaactgtcgcacggggacccgtggcaccatctaaagtcgccacaacatctgttatcaccattgtgaagtcgacagaactgtcctccaccagcgtccccttttccgcggcttcatag

SEQ ID NO: 289879 - DNA, 3368 bp, Artificial Sequence
  derived and/or modified sequence
ggagccgggcgggcgggtgcggtggcggcgggcggcgcgggggcacttgttgttcttcgcgaagtcggagcccgagcgccaggcggcggcggcggccgaggggagcgcgacagtgagcgccggcgcgaggacagcgcgtgcccgcgaggagccgccgcgcgcccgcgccctccgcgcgacgccagctacgagttccagggagctctgtcctggtgaccgtgcccgggttatgacgactaatcccaaaccgaataaggcattaaaggtcaagaaggaggcgggcgagaacgccccggtgctcagcgatgatgagctggtgtccatgtcggtgcgggagctgaaccagcacctgcggggtctcaccaaggaggaggtgacccgcctgaagcagcgtcggcgcacactcaagaaccgcggctacgcggccagctgccgcatcaagcgggtgacgcagaaggaggagctggagcggcagcgcgtggagctgcagcaggaggtggagaagctggcgcgtgagaacagcagcatgcggctggagctggacgccctgcgctccaagtacgaggcgctgcagaccttcgcgcgcaccgtggcccggggacctgtggcgccctccaaggtggccaccaccagcgtcatcaccatcgtcaagtccaccgagctctcctccacctccgtgcccttctcggctgcatcctagtgccggccgggggcggggggtggcgggcggcgggcggcgggcaggcgggtgggggcacacccctcgtacctgtcactgggatgcagactctcgacatccgagtccaagcgcaggcccctcgggcgcaggcagctcacaccaggaagagactgtattgcagggtgaagagtgggctcccgtgggcccagagctgcacgccggtccacagacacactcacgcccgccacctgctccccgcaggatgtgtctgtgtgtgggaattggtatcttgcacccgtgggagtcgggacatataatggaaaggccctcgggaagttccgcgtcctctgtgggggctgccggaagacacggccccaggagtcaggcccctgtggtcaggtctagcatggggcttgttttccactcctgctgtaagcagccttcgacacctgtcctgccacggcctcccagccggtgcgggagcccctcactgccctgaccgactccgcagtccccggggaggagcatggatggtgtgtcggcagctccgtccttccagctgtcccgttgcagtgcccgtgatccgcgtctgccttagcaggggcctgcgtgagtgggcacggtgtgggaggtcgcctgcgtggggtggtgtctgtgtgtgtgcacgcacgcctgccatcaaagcagcagggctgagggggtgcagcttgctggtgttcactgggggagggcctgtgggcacacatggcagagagagtggctcacacgtcgtgaggtctcccctgtgctctggtgacccgaggaggtcgtgcagcacagcgcagaagcccctgcccacgggatccggccccccagacaccgaccccacaggccgtcccggatctcagcggacacaggcaggagcgccccatcatttgacggtgagcaggactcaggctgtgtgtcctggagctacttctcaccaactgtggtcagtgcagggggaacgaggaggtcttttgggggcctggcgaggggaagggctgctgcagtctagggagagggggtgcagcctgggggatgttggtggacatggatgtggaggtggaaggaggaggacgttgcgtggagtggtgggaggaggcgggagccgtgtgcgagagcaggtggaaagccttgaggggcaggaccaggatgcagctggcttgtagaagagctcaggagtgagcctggcactccagagggcgcggcgggtggggaggcagcaggcaccagtccaggagagcttcgtggacgtggctcctgcgcgcacacccccaggagcacagccacgggctgcaggtgtggctggcctcagcactcagtcctcacccggagcctttgcctgctcctccttccaagagcactgaggcaccagtgggcttggcactccaccttgggcttccttttcctggagagccgccttgagggtccctcctgtgactggggtctctgcagcgagagccgcgggggttgcggagcccctgcctgggggagctggcggaatgtgagccgccggccgggggccgccacataagacctgcaaggtggtgcctggggccctggctccttctcggctgcccctgcccacccagtaacagcccccaccagctacagagcccaggcgggtgccagccacgctgggagggcagaggacagacagccccggggctgcgacttggttctgtgtctactgttagaagttgagtgggaagctgcaggcccgccaggaccactgggtccctacagagcaaaggcctgcgtgttcccaaacagccgttgcccccgtggccgtggtaggtaatccatattggatgtcataaggaccagggggatatttaaagagagaaacagaaaatatatagagatataaaattatattcacagtttatctacagatttttcgtaacaatctttcttttccagtttgatactgtaaatctatcagagcagagccgggggcacgggcacaggtgggagttgggagcaaagcggaggcccgggctgcccgccgtcccccttcatctccccacggactgtaccaggcagctgggccccgcaggacaggccgcagcgggtggccggttctgtcccgtcttggggttcttggtgtccacgtcttgtgggccgtgggcttctacctgcccttggcctgcagtgctttgctggagaagggactccctggtccccagggtggacggagccgctgtcaccgcccagagctgggccggggaagcacggtgtgttctgcttttcttttcagattgttgaaatttcattgtcatgatttaatatatggatttttttatttaagaaaaagacgagggactctttgtcacgtgggtttgttttctgtctccgtgcctccggcttcccaaagagatccaggtctttgcgtttccagggcgtggggaccccggccccctatgccgccacgccgccacaccgcctcaccctggcttctgtgctacttggcagttccatttcattatttattttttgtgctgctttttatcatgatataaattattgaaaacagatcacatgtgggcccgtgtctggccgccgccgccctgccccgtccctgcggccaccacctaatttattgccgtgcgtcctgctgctgtgactgcttttgtacctttgcaataaagaattttctggtttcaga

SEQ ID NO: 289880 - DNA, 2773 bp, Artificial Sequence
  derived and/or modified sequence
tttgcaggtccccacggtggcggaggcagctgggccccagcctctccactgtcaccctcaccccaggacgtggtgcgaaggagcctggagcccacctggccgtccccgggaccggctggtgccatcctgtgccatctacgtcagcgccctgagatcagctggccttggcaggggcagcggactcggcagcctggcgcaggaccctgtctcacctgtgcggccctcttgttgtgggggtttgtgggttgcgggggtggggcccccatcggaggcagggctggagggtggagggatttgggcccgagggctccctggcccagggtgtggggagggtcctgggctggcagggaggacgggatgcggtcacccgcccccatgatgcccatgtccagtggaggtgctgaccaaggacaccccccaccgccgtgtgctgctctgatgttcctgtgggaacctgtgtctggtatttggggtatgggagtgggtgctgtgaacccctgtcccgcgagctgcccggcgccttctgcccgcccgtcccggccgccgggtgcaaatgggtttgttgactgcctgccggcctcgtgatgtctgtgcaacctgacctgaagtcaggatcgcgtttgggcttctcggtttccatgacaaccgtgggggctggctcggtcccaaggtcgccatggcaactatcggagggctcatgccggggatgctttggctgggtttttcatgaatgattagaatgtgtgacacaatgcagacgtgaggacggcgggggcggcggcggggacgactcccgccagacggtcaaatgctcggcagggcggcggctcccccacctccctggtctctggctgcggcccccggacctgccgcccctcaggaaccccacacccccttgggccgcagggtcctcgctcgggggcagcttaggtggaggtggtgatgtcacagccgcagcggccagggccgtgctacgagttccagggagctctgtcctggtgaccgtgcccgggttatgacgactaatcccaaaccgaataaggcattaaaggtcaagaaggaggcgggcgagaacgccccggtgctcagcgatgatgagctggtgtccatgtcggtgcgggagctgaaccagcacctgcggggtctcaccaaggaggaggtgacccgcctgaagcagcgtcggcgcacactcaagaaccgcggctacgcggccagctgccgcatcaagcgggtgacgcagaaggaggagctggagcggcagcgcgtggagctgcagcaggaggtggagaagctggcgcgtgagaacagcagcatgcggctggagctggacgccctgcgctccaagtacgaggcgctgcagaccttcgcgcgcaccgtggcccggggacctgtggcgccctccaaggtggccaccaccagcgtcatcaccatcgtcaagtccaccgagctctcctccacctccgtgcccttctcggctgcatcctagtgccggccgggggcggggggtggcgggcggcgggcggcgggcaggcgggtgggggcacacccctcgtacctgtcactgggatgcagactctcgacatccgagtccaagcgcaggcccctcgggcgcaggcagctcacaccaggaagagactgtattgcagggtgaagagtgggctcccgtgggcccagagctgcacgccggtccacagacacactcacgcccgccacctgctccccgcaggatgtgtctgtgtgtgggaattggtatcttgcacccgtgggagtcgggacatataatggaaaggccctcgggaagttccgcgtcctctgtgggggctgccggaagacacggccccaggagtcaggcccctgtggtcaggtctagcatggggcttgttttccactcctgctgtaagcagccttcgacacctgtcctgccacggcctcccagccggtgcgggagcccctcactgccctgaccgactccgcagtccccggggaggagcatggatggtgtgtcggcagctccgtccttccagctgtcccgttgcagtgcccgtgatccgcgtctgccttagcaggggcctgcgtgagtgggcacggtgtgggaggtcgcctgcgtggggtggtgtctgtgtgtgtgcacgcacgcctgccatcaaagcagcagggctgagggggtgcagcttgctggtgttcactgggggagggcctgtgggcacacatggcagagagagtggctcacacgtcgtgaggtctcccctgtgctctggtgacccgaggaggtcgtgcagcacagcgcagaagcccctgcccacgggatccggccccccagacaccgaccccacaggccgtcccggatctcagcggacacaggcaggagcgccccatcatttgacgtttgatactgtaaatctatcagagcagagccgggggcacgggcacaggtgggagttgggagcaaagcggaggcccgggctgcccgccgtcccccttcatctccccacggactgtaccaggcagctgggccccgcaggacaggccgcagcgggtggccggttctgtcccgtcttggggttcttggtgtccacgtcttgtgggccgtgggcttctacctgcccttggcctgcagtgctttgctggagaagggactccctggtccccagggtggacggagccgctgtcaccgcccagagctgggccggggaagcacggtgtgttctgcttttcttttcagattgttgaaatttcattgtcatgatttaatatatggatttttttatttaag

SEQ ID NO: 289881 - DNA, 632 bp, Artificial Sequence
  derived and/or modified sequence
ggggcaccttgtgctgtgcaggtgcagacgtcttctctgacctcagggagagtcagaacaggaagcagccactgccggcgcctgctggtcaccccacagtgccggcggctgcagcccagctacgagttccagggagctctgtcctggtgaccgtgcccgggttatgacgactaatcccaaaccgaataaggcattaaaggtcaagaaggaggcgggcgagaacgccccggtgctcagcgatgatgagctggtgtccatgtcggtgcgggagctgaaccagcacctgcggggtctcaccaaggaggaggtgacccgcctgaagcagcgtcggcgcacactcaagaaccgcggctacgcggccagctgccgcatcaagcgggtgacgcagaaggaggagctggagcggcagcgcgtggagctgcagcaggaggtggagaagctggcgcgtgagaacagcagcatgcggctggagctggacgccctgcgctccaagtacgaggcgctgcagaccttcgcgcgcaccgtggcccggggacctgtggcgccctccaaggtggccaccaccagcgtcatcaccatcgtcaagtccaccgagctctcctccacctccgtgcccttctcggctgcatcct

SEQ ID NO: 289882 - protein, 92 aa, Artificial Sequence
  derived and/or modified sequence
MEQSKVLIKEGGVQLLLTIVDTPGFGDAVDNSNCWQPAINYIDSKFEDYLNAESRVNRCQMPGNRVQCCLYFIAPSGHGWQTRNMDYCVEFH

SEQ ID NO: 289883 - protein, 125 aa, Artificial Sequence
  derived and/or modified sequence
MVDYYEVLGVQRHASPEDIKKAYRKLALKWHPDKNPENKEEAERKFKQVAEAYEVLSDAKKRDIYDKYGKEGLNGGGGGGSHFDSPFEFGFTFRNPDDVFREFFGGRDPFSFDFFEDPFEDFFGN

SEQ ID NO: 289884 - protein, 146 aa, Artificial Sequence
  derived and/or modified sequence
MVDYYEVLGVQRHASPEDIKKAYRKLALKWHPDKNPENKEEAERKFKQVAEAYEVLSDAKKRDIYDKYGKEGLNGGGGGGSHFDSPFEFGFTFRNPDDVFREFFGGRDPFSFDFFEDPFEDFFGNRRGPRGSRSRGTGSFFSAFSG

SEQ ID NO: 289885 - protein, 98 aa, Artificial Sequence
  derived and/or modified sequence
MVDYYEVLGVQRHASPEDIKKAYRKLALKWHPDKNPENKEEAERKFKQVAEAYEVLSDAKKRDIYDKYGKEGLNGGGGGGSHFDSPFEFGFTFRNPDD

SEQ ID NO: 289886 - DNA, 1704 bp, Artificial Sequence
  derived and/or modified sequence
atggaggatgttaagcaggtattcggccagacgactatccatcagcatatcccttttaattgggatagcgaatttgttcagctacatttcgggaaggaacggaagcggcacttgacctacgcggagttcacccagttcctactggagattcagttggagcacgcgaaacaagcctttgtccaaagggacaatgcacgtaccggcagggtgacagccatagactttcgggacatcatggttacaatcaggccacacgttctcacgccctttgtagaagaatgtctggtcgcagctgccggtgggaccaccagccaccaagttagcttctcctacttcaatgggtttaattccctgctgaacaatatggagctaattcggaaaatatactcaacgctggcaggcacaagaaaggatgttgaggtgacgaaggaggaatttgttctcgcagcacagaagttcggacaggtgacacctatggaagtggacattctgttccagctagccgatctctatgaaccccgagggcgcatgacactagcggacatcgagcgcatcgcccccctggaagaaggaacccttccgtttaatctggccgaagcgcaacggcagaaggcaagcggggattcagcccgtcccgtcctgttacaggtagctgaatcagcataccgattcggcttaggtagcgtcgcaggtgccgtgggggctactgccgtttatccgattgacctggttaagacgagaatgcagaaccagcgatccactggatcctttgtcggggagctgatgtataagaattccttcgactgctttaaaaaagtgctgagatacgaaggtttttttggactgtacagaggcctcctcccacaacttttaggtgtcgcccctgagaaagccatcaaactgacggtcaacgattttgtgcgggataagttcatgcacaaggatggaagtgtgccgctggccgcagagatcctagccggggggtgcgcaggaggctcccaggtgatcttcaccaaccccctggagattgtcaaaatccggctgcaggtggccggggagataacgacaggtcctagggtgtcagcccttagcgtcgtccgggatctggggttttttggaatttataaaggggctaaagcatgctttctgagagatatccctttctctgcgatttatttcccttgttacgcgcatgtgaaggcttcgttcgccaacgaggacggtcaagtttcacctggtagcctgttactcgctggcgccatcgcaggcatgcccgccgcttccctggtgacgcctgcagatgtgattaagacaaggctgcaggtggcagcccgagccgggcagactacatacagtggcgtgatcgactgcttccggaagatcctccgggaggaaggtcccaaagccctctggaaaggtgcaggcgcccgagtatttaggagttcccctcagtttggcgtgaccctgctcacctatgaacttcttcagaggtggttctacatcgacttcggaggtgtaaaaccaatgggctccgaacctgtgccgaaaagcaggattaacttgccagcccctaacccagatcacgtggggggttacaagcttgctgtcgcgacatttgccggaatcgaaaataaattcggcctatacctacctctgttcaaaccctctgtaagcaccagcaaagccatcggtggtggtccttag

SEQ ID NO: 289887 - DNA, 1704 bp, Artificial Sequence
  derived and/or modified sequence
atggaggatgtgaagcaggtgtttggccagaccaccatccaccagcacatccccttcaactgggacagcgagtttgtgcagctgcactttgggaaggagaggaagaggcacctgacctatgcagagttcacccagttcctgctggagatccagctggagcacgccaagcaggcctttgtgcagagggacaatgccaggacaggccgggtgacagccatcgacttccgggacatcatggtgaccatccggccccacgtgctgaccccatttgtggaggagtgcctggtggccgctgctgggggcaccaccagccaccaggtgtccttctcctacttcaacggcttcaacagcctgctgaacaacatggagctgatcaggaagatctacagcaccctggccggcaccaggaaggatgtggaggtgaccaaggaggagtttgtgctggccgcccagaagtttggccaggtgacccccatggaggtggacatcctcttccagctggccgacctgtatgagccccggggccgcatgaccctggccgacatcgagagaattgcccccctggaggagggcaccctgcccttcaacctggccgaggcccagaggcagaaggccagcggggacagcgcccggcctgtgctgctgcaggtggccgagagcgcctaccgcttcggcctgggctctgtggccggggctgtgggcgccacagctgtgtaccccatcgacctggtgaagaccaggatgcagaaccagaggagcacaggcagctttgtgggggagctgatgtacaagaacagctttgactgcttcaagaaggtgctgcgctatgagggcttcttcggcctgtaccggggcctgctgccccagctgctgggcgtggcccctgagaaggccatcaagctgactgtgaatgactttgtgcgggacaagttcatgcacaaggatggctctgtgcccctggccgctgagatcctggccggcggctgtgccggcggcagccaggtgatcttcaccaaccccctggagatcgtgaagatccggctgcaggtggccggggagatcaccaccggcccccgggtgtctgccctgtctgtggtgcgggacctgggcttcttcggcatctacaagggggccaaggcctgcttcctgcgggacatccccttcagcgccatctacttcccctgctacgcccacgtgaaggccagctttgccaatgaagatggccaggtgtccccaggcagcctgctgctggccggggccatcgccggcatgcctgctgccagcctggtgaccccagcagatgtgatcaagacccggctgcaggtggccgcccgggccggccagaccacctacagcggcgtgattgactgcttcaggaagatcctgcgggaggagggccccaaggccctgtggaagggggccggggcccgggtcttccgcagcagcccccagtttggagtgaccctgctgacctatgagctgctgcagcgctggttctacatcgactttggaggagtgaagcccatgggcagcgagcctgtgcccaagagccgcatcaacctgcctgcccccaacccagaccacgtgggcggctacaagctggccgtggccacctttgctggcatcgagaacaagtttggcctgtacctgcccctcttcaagcccagcgtgtccaccagcaaggccatcggcggcggcccctag

SEQ ID NO: 289888 - DNA, 1704 bp, Artificial Sequence
  derived and/or modified sequence
atggaggacgtgaagcaggtgttcggccagaccaccatccaccagcatattccattcaactgggattccgagttcgtccagttgcattttgggaaggagcggaagcgccacctgacttacgccgagtttacccagtttctattggaaatccaactcgagcacgcaaagcaggcattcgttcagcgtgacaatgcaaggacagggagggtgacagctattgattttagggatatcatggtcaccataaggcctcatgtgctaactccgtttgttgaggagtgcctggttgctgcagctggcggcacaacatctcaccaggtttctttttcctacttcaatggattcaattcactactcaacaacatggagttgatccggaagatttactctactctggcaggaaccaggaaagacgtggaggtgacaaaggaagaatttgtgctcgccgcgcagaaatttggacaggttacccctatggaagtcgacatcctatttcagttggcagacctgtacgaacctcggggacggatgaccctggccgatattgaaaggattgccccgctggaggaaggtactctaccattcaatctggcggaggcccagcgccagaaggccagtggagacagcgccagacccgtactcctgcaggtcgcggaaagtgcctatcgtttcggcctcgggtccgtcgccggcgcggttggtgctacagctgtctaccctatcgacctggtaaaaactcgtatgcagaatcagcgcagtacgggcagttttgtcggagagctgatgtacaagaactcttttgactgcttcaaaaaagtgctaagatacgaagggttctttggactctaccgcggtctcctaccacagttgctgggtgttgctcccgagaaagcaataaagttgaccgtcaacgattttgtcagggacaaattcatgcataaggatggttctgtccccctggccgcagaaattctagcaggtggctgcgcaggggggagccaggtgatcttcactaatcctctcgagatcgtcaagatacggctgcaggtggccggggaaatcactacgggccctcgtgtctccgccttgagcgtggtgcgagacctggggtttttcgggatctataagggggctaaggcttgttttttacgggatatccccttttcagccatctatttcccgtgttacgcgcacgttaaggcttcctttgctaatgaggacggtcaggtttcccctggcagcctgctcctggccggagccattgccggaatgcccgccgcatcccttgtgactcccgccgatgtgatcaagacaaggctgcaagttgcagcacgagcggggcaaacgacttactctggggtgattgattgttttagaaagatattaagagaggagggtccaaaagcattgtggaagggcgctggggcacgcgtgtttcgaagtagccctcagtttggggtgacgcttctaacatatgaactccttcagaggtggttttatattgattttggcggcgtgaagccaatggggtctgagccggtgcccaagagccgtatcaacttgcctgcacccaatcccgatcacgtaggaggctataagttggctgtggctacgttcgctggcattgaaaacaagttcggtttatacctacctcttttcaagccaagcgtctctaccagcaaagccatcggaggtggcccatag

SEQ ID NO: 289889 - DNA, 1704 bp, Artificial Sequence
  derived and/or modified sequence
atggaggatgtgaaacaggtctttggtcaaacgactatccaccagcatattccttttaactgggatagcgaattcgtgcaactgcacttcggcaaggagcgaaagcgtcacctgacatacgcagaattcacccagtttttgctggagatccagctagagcacgccaagcaggctttcgttcagagggataatgcacgcacagggagggtgacagcaattgactttcgtgatatcatggtgaccatccggccacatgtgcttactcccttcgtggaggaatgtctcgtggccgcagccggtggaaccacatcgcaccaggtctcattctcctactttaacggattcaatagcctgttgaacaatatggaactcatcaggaagatctattctactctggccggtactagaaaggacgtggaagtgacgaaagaagagttcgtgctcgccgctcagaaattcggccaggtgactccaatggaggtggacattttgtttcaacttgccgatctatacgagcccagaggaagaatgaccttggccgacatcgagcggatcgcacccctggaggaaggtacactgccgttcaacctcgccgaggcacagcgtcaaaaagcttctggggacagcgctcgacccgtacttcttcaagtagccgaaagcgcctataggttcgggttaggtagtgtggccggtgccgtgggggctaccgctgtgtacccaattgacctagtcaaaacccggatgcagaaccaacgcagtaccggatccttcgtaggcgagcttatgtacaagaacagtttcgattgtttcaagaaagtgctccgatacgaagggttctttggtttataccgcggtctgctacctcagctgctcggtgtggctcctgaaaaggctatcaagctgaccgtgaatgactttgtgagagacaagtttatgcataaggatgggagcgtgcctctggctgctgaaatcttggctggcggttgtgccggtggatcccaggtcatcttcaccaatccactagagattgttaagattagactgcaggtggctggggagattacgacaggtcctagggtgagtgccctgtctgtcgtgcgggatctcggattctttggaatctacaagggggcaaaagcttgctttctgcgagatattcccttctcagccatctatttcccttgttacgcccacgtgaaagcatccttcgcaaacgaggatggccaggtgtctcccggaagccttcttttggcaggagcgatcgccggaatgcccgcagcaagtctcgtcactcccgctgacgtcattaagacacgcttgcaagtcgcagcacgggcaggccagactacctacagcggggtgatcgattgtttccgaaaaattcttcgtgaagagggaccaaaagctctctggaagggggctggagctagagtgtttaggagttctccacagttcggggtgacactactgacgtatgagctgcttcagcgttggttctatatagactttgggggagtgaaaccgatgggaagtgaaccagtgcccaagtcacgcatcaacttaccagctcccaacccagatcatgttggcggatataagcttgcagtagcaacctttgcagggatagagaataagttcggactgtacctgcctttgtttaagccctccgtgtctactagcaaggctatcggcggtgggccatag

SEQ ID NO: 289890 - DNA, 2258 bp, Artificial Sequence
  derived and/or modified sequence
aaacgccagccagccagtcagtgggtcccgcagtcgcccgcaaccggggcgaatcatggcggccgccaaggtggctttaaccaagagagcagatccagctgagcttagaacaatatttttgaagtatgcaagcattgagaaaaacggtgaatttttcatgtcccccaatgactttgtcactcgatacttgaacatttttggagaaagccagcctaatccaaagactgtggaacttttaagtggagtggtggatcagaccaaagatggaggatgttaagcaagtttttggacagaccacaattcatcaacatattccatttaactgggattcagaatttgtgcaactacattttggaaaagaaagaaaaagacacctgacatatgcggaatttactcagtttttattggaaatacaactggagcacgcaaagcaagcctttgtgcaacgggacaatgctaggactgggagagtcacagccatcgacttccgagacatcatggtcaccatccgcccccatgtcttgactccttttgtagaagaatgtctagtagctgctgctggaggtaccacatcccatcaagttagtttctcctattttaatggatttaattcgctccttaacaacatggaactcattagaaagatctatagcactctggctggcaccaggaaagatgttgaagtgactaaggaggagtttgttctggcagctcagaaatttggtcaggttacacccatggaagttgacatcttgtttcagttagcagatttatatgagccaaggggacgtatgaccttagcagacattgaacggattgctcctctggaagagggaactctgccctttaacttggctgaggcccagaggcagaaggcctcaggtgattcagctcgaccagttcttctacaagttgcagagtcggcctacaggtttggtctgggttctgttgctggagctgttggagccactgctgtgtatcctatcgatcttgtaaaaactcgaatgcagaaccaacgatcaactggctcttttgtgggagaactcatgtataaaaacagctttgactgttttaagaaagtgctacgctatgaaggcttctttggactgtatagaggtctgttgccacagttattgggagttgccccagagaaggccataaaacttacagtgaacgattttgtgagggataaatttatgcacaaagatggttcggtcccacttgcagcagaaattcttgctggaggctgcgctggaggctcccaggtgattttcacaaatcctttagaaatcgtcaagatccgtttgcaagtggcaggagaaatcaccactggtcctcgagtcagtgctctgtctgtcgtgcgggacctggggttttttgggatctacaagggtgccaaagcatgctttctgcgggacattcctttctcggccatctactttccgtgctatgctcatgtgaaggcttcctttgcaaatgaagatgggcaggttagcccaggaagcctgctcttagctggtgccatagctggtatgcctgcagcatctttagtgacccctgctgatgttatcaagacgagattacaggtggctgcccgggctggccaaaccacttacagcggagtgatagactgctttagaaagatactgcgtgaagaaggaccaaaagctctgtggaagggagctggtgctcgtgtatttcgatcctcaccccagtttggtgtaactttgctgacttacgaattgctacagcgatggttctacattgattttggaggagtaaaacccatgggatcagagccagttcctaaatccaggatcaacctgcctgccccgaatcctgatcacgttgggggctacaaactggcagttgctacatttgcagggattgaaaacaaatttggactttacctacctctcttcaagccatcagtatctacctcaaaggctattggtggaggcccataggaagatcagccctgggatagtgctgtctttttgtgggtactgcagtaaagaacatccctcctgggaatgaagcaatgcttcatcccttttacgtccatctcttgtttaaattcaagtccaggcttttttatcatgtgaaatcattcattttctgggtgttttcttaaccagatcattgtgaaattattcataattattatttggccctctgcccagaaacctttgtttgcatctgaaaattgatgggatttggtcaacactaacatgatttggggaaaggagcaagtcaga

SEQ ID NO: 289891 - DNA, 1704 bp, Artificial Sequence
  derived and/or modified sequence
atggaggacgtgaagcaggtgttcggccagaccaccatccaccagcacatccccttcaactgggacagcgagttcgtgcagctgcacttcggcaaggagagaaagagacacctgacctacgccgagttcacccagttcctgctggagatccagctggagcacgccaagcaggccttcgtgcagagagacaacgccagaaccggcagagtgaccgccatcgacttcagagacatcatggtgaccatcagaccccacgtgctgacccccttcgtggaggagtgcctggtggccgccgccggcggcaccaccagccaccaggtgagcttcagctacttcaacggcttcaacagcctgctgaacaacatggagctgatcagaaagatctacagcaccctggccggcaccagaaaggacgtggaggtgaccaaggaggagttcgtgctggccgcccagaagttcggccaggtgacccccatggaggtggacatcctgttccagctggccgacctgtacgagcccagaggcagaatgaccctggccgacatcgagagaatcgcccccctggaggagggcaccctgcccttcaacctggccgaggcccagagacagaaggccagcggcgacagcgccagacccgtgctgctgcaggtggccgagagcgcctacagattcggcctgggcagcgtggccggcgccgtgggcgccaccgccgtgtaccccatcgacctggtgaagaccagaatgcagaaccagagaagcaccggcagcttcgtgggcgagctgatgtacaagaacagcttcgactgcttcaagaaggtgctgagatacgagggcttcttcggcctgtacagaggcctgctgccccagctgctgggcgtggcccccgagaaggccatcaagctgaccgtgaacgacttcgtgagagacaagttcatgcacaaggacggcagcgtgcccctggccgccgagatcctggccggcggctgcgccggcggcagccaggtgatcttcaccaaccccctggagatcgtgaagatcagactgcaggtggccggcgagatcaccaccggccccagagtgagcgccctgagcgtggtgagagacctgggcttcttcggcatctacaagggcgccaaggcctgcttcctgagagacatccccttcagcgccatctacttcccctgctacgcccacgtgaaggccagcttcgccaacgaggacggccaggtgagccccggcagcctgctgctggccggcgccatcgccggcatgcccgccgccagcctggtgacccccgccgacgtgatcaagaccagactgcaggtggccgccagagccggccagaccacctacagcggcgtgatcgactgcttcagaaagatcctgagagaggagggccccaaggccctgtggaagggcgccggcgccagagtgttcagaagcagcccccagttcggcgtgaccctgctgacctacgagctgctgcagagatggttctacatcgacttcggcggcgtgaagcccatgggcagcgagcccgtgcccaagagcagaatcaacctgcccgcccccaaccccgaccacgtgggcggctacaagctggccgtggccaccttcgccggcatcgagaacaagttcggcctgtacctgcccctgttcaagcccagcgtgagcaccagcaaggccatcggcggcggcccctag

SEQ ID NO: 289892 - protein, 326 aa, Artificial Sequence
  derived and/or modified sequence
MEKDGLCRADQQYECVAEIGEGAYGKVFKARDLKNGGRFVALKRVRVQTGEEGMPLSTIREVAVLRHLETFEHPNVVRLFDVCTVSRTDRETKLTLVFEHVDQDLTTYLDKVPEPGVPTETIKDMMFQLLRGLDFLHSHRVVHRDLKPQNILVTSSGQIKLADFGLARIYSFQMALTSVVVTLWYRAPEVLLQSSYATPVDLWSVGCIFAEMFRRKPLFRGSSDVDQLGKILDVIGLPGEEDWPRDVALPRQAFHSKSAQPIEKFVTDIDELGKDLLLKCLTFNPAKRISAYSALSHPYFQDLERCKENLDSHLPPSQNTSELNTA

SEQ ID NO: 289893 - DNA, 981 bp, Artificial Sequence
  derived and/or modified sequence
atggagaaggacggcctgtgcagagccgaccagcagtacgagtgcgtggccgagatcggcgagggcgcctacggcaaggtgttcaaggccagagacctgaagaacggcggcagattcgtggccctgaagagagtgagagtgcagaccggcgaggagggcatgcccctgagcaccatcagagaggtggccgtgctgagacacctggagaccttcgagcaccccaacgtggtgagactgttcgacgtgtgcaccgtgagcagaaccgacagagagaccaagctgaccctggtgttcgagcacgtggaccaggacctgaccacctacctggacaaggtgcccgagcccggcgtgcccaccgagaccatcaaggacatgatgttccagctgctgagaggcctggacttcctgcacagccacagagtggtgcacagagacctgaagccccagaacatcctggtgaccagcagcggccagatcaagctggccgacttcggcctggccagaatctacagcttccagatggccctgaccagcgtggtggtgaccctgtggtacagagcccccgaggtgctgctgcagagcagctacgccacccccgtggacctgtggagcgtgggctgcatcttcgccgagatgttcagaagaaagcccctgttcagaggcagcagcgacgtggaccagctgggcaagatcctggacgtgatcggcctgcccggcgaggaggactggcccagagacgtggccctgcccagacaggccttccacagcaagagcgcccagcccatcgagaagttcgtgaccgacatcgacgagctgggcaaggacctgctgctgaagtgcctgaccttcaaccccgccaagagaatcagcgcctacagcgccctgagccacccctacttccaggacctggagagatgcaaggagaacctggacagccacctgccccccagccagaacaccagcgagctgaacaccgcctag

SEQ ID NO: 289894 - DNA, 11612 bp, Artificial Sequence
  derived and/or modified sequence
aacctctccgcgcgaagacggcttcagccctgcagggaaagaaaagtgcaatgattctggactgagacgcgcttgggcagaggctatgtaatcgtgtctgtgttgaggacttcgcttcgaggagggaagaggagggatcggctcgctcctccggcggcggcggcggcggcgactctgcaggcggagtttcgcggcggcggcaccagggttacgccagccccgcggggaggtctctccatccagcttctgcagcggcgaaagccccagcgcccgagcgcctgagccggcggggagcaagtaaagctagaccgatctccggggagccccggagtaggcgagcggcggccgccagctagttgagcgcaccccccgcccgccccagcggcgccgcggcgggcggcgtccaggcggcatggagaaggacggcctgtgccgcgctgaccagcagtacgaatgcgtggcggagatcggggagggcgcctatgggaaggtgttcaaggcccgcgacttgaagaacggaggccgtttcgtggcgttgaagcgcgtgcgggtgcagaccggcgaggagggcatgccgctctccaccatccgcgaggtggcggtgctgaggcacctggagaccttcgagcaccccaacgtggtcaggttgtttgatgtgtgcacagtgtcacgaacagacagagaaaccaaactaactttagtgtttgaacatgtcgatcaagacttgaccacttacttggataaagttccagagcctggagtgcccactgaaaccataaaggatatgatgtttcagcttctccgaggtctggactttcttcattcacaccgagtagtgcatcgcgatctaaaaccacagaacattctggtgaccagcagcggacaaataaaactcgctgacttcggccttgcccgcatctatagtttccagatggctctaacctcagtggtcgtcacgctgtggtacagagcacccgaagtcttgctccagtccagctacgccacccccgtggatctctggagtgttggctgcatatttgcagaaatgtttcgtagaaagcctctttttcgtggaagttcagatgttgatcaactaggaaaaatcttggacgtgattggactcccaggagaagaagactggcctagagatgttgcccttcccaggcaggcttttcattcaaaatctgcccaaccaattgagaagtttgtaacagatatcgatgaactaggcaaagacctacttctgaagtgtttgacatttaacccagccaaaagaatatctgcctacagtgccctgtctcacccatacttccaggacctggaaaggtgcaaagaaaacctggattcccacctgccgcccagccagaacacctcggagctgaatacagcctgaggcctcagcagccgccttaagctgatcctgcggagaacacccttggtggcttatgggtccccctcagcaagccctacagagctgtggaggattgctatctggaggccttccagctgctgtcttctggacaggctctgcttctccaaggaaaccgcctagtttactgttttgaaatcaatgcaagagtgattgcagctttatgttcatttgtttgtttgtttgtctgtttgtttcaagaacctggaaaaattccagaagaagagaagctgctgaccaattgtgctgccatttgatttttctaaccttgaatgctgccagtgtggagtgggtaatccaggcacagctgagttatgatgtaatctctctgcagctgccgggcctgatttggtacttttgagtgtgtgtgtgcatgtgtgtgtgtgtgtgtgtgtgtgtgtgtgtgtatgtgagagattctgtgatcttttaaagtgttactttttgtaaacgacaagaataattcaattttaaagactcaaggtggtcagtaaataacaggcatttgttcactgaaggtgattcaccaaaatagtcttctcaaattagaaagttaaccccatgtcctcagcatttcttttctggccaaaagcagtaaatttgctagcagtaaaagatgaagttttatacacacagcaaaaaggagaaaaaattctagtatattttaagagatgtgcatgcattctatttagtcttcagaatgctgaatttacttgttgtaagtctattttaaccttctgtatgacatcatgctttatcatttcttttggaaaatagcctgtaagctttttattacttgctataggtttagggagtgtacctcagatagattttaaaaaaaagaatagaaagcctttatttcctggtttgaaattcctttcttccctttttttgttgttgttattgttgtttgttgttgttattttgtttttgtttttaggaatttgtcagaaactctttcctgttttggtttggagagtagttctctctaactagagacaggagtggccttgaaattttcctcatctattacactgtactttctgccacacactgccttgttggcaaagtatccatcttgtctatctcccggcacttctgaaatatattgctaccattgtataactaataacagattgcttaagctgttcccatgcaccacctgtttgcttgctttcaatgaacctttcataaattcgcagtctcagcttatggtttatggcctcgattctgcaaacctaacagggtcacatatgttctctaatgcagtccttctacctggtgtttacttttgttacctaaataatgagtaggatcttgttttgttttatcaccagcacacagattgctataaactgttactttgtgaattacatttttatagaagatattttcagtgtctttacctgagggtatgtctttagctatgttttagggccatacatttactctatcaaatgatcttttctccatcccccaggctgtgcttatttctagtgccttgtgctcactcctgctctctacagagccagcctggcctgggcattgtaaacagcttttcctttttctcttactgttttctctacagtcctttatatttcataccatctctgccttataagtggtttagtgctcagttggctctagtaaccagaggacacagaaagtatcttttggaaagtttagccacctgtgctttctgactcagagtgcatgcaacagttagatcatgcaacagttagattatgtttagggttaggattttcaaagaatggaggttgctgcactcagaaaataattcagatcatgtttatgcattattaagttgtactgaattctttgcagcttaatgtgatatatgactatcttgaacaagagaaaaaactaggagatgtttctcctgaagagcttttggggttgggaactattcttttttaattgctgtactacttaacattgttctaattcagtagcttgaggaacaggaacattgttttctagagcaagataataaaggagatgggccatacaaatgttttctactttcgttgtgacaacattgattaggtgttgtcagtactataaatgcttgagatataatgaatccacagcattcaaggtcaggtctactcaaagtctcacatggaaaagtgagttctgcctttcctttgatcgagggtcaaaatacaaagacatttttgctagggcctacaaattgaatttaaaaactcactgcactgattcatctgagctttttggttagtattcatggctagagtgaacatagctttagtttttgctgttgtaaaagtgttttcataagttcactcaagaaaaatgcagctgttctgaactggaatttttcagcattctttagaattttaaatgagtagagagctcaacttttattcctagcatctgcttttgactcatttctaggcagtgcttatgaagaaaaattaaagcacaaacattctggcattcaatcgttggcagattatcttctgatgacacagaatgaaagggcatctcagcctctctgaactttgtaaaaatctgtccccagttcttccatcggtgtagttgttgcatttgagtgaatactctcttgatttatgtattttatgtccagattcgccatttctgaaatccagatccaacacaagcagtcttgccgttagggcattttgaagcagatagtagagtaagaacttagtgactacagcttattcttctgtaacatatggtttcaaacatctttgccaaaagctaagcagtggtgaactgaaaagggcatattgccccaaggttacactgaagcagctcatagcaagttaaaatattgtgacagatttgaaatcatgtttgaatttcatagtaggaccagtacaagaatgtccctgctagtttctgtttgatgtttggttctggcggctcaggcattttgggaactgttgcacagggtggagtcaaaacaacctacatataaaaagagaaaaagagaaacttgtccatttagctttcataagaaatcccatggcaaagggtaataaaaaggacctaatcttaaaaatacaatttctaagcacttgtaagaacccagtgggttggagcctcccactttgtccctcctttgaagtggatgggaactcaaggtgcaaagaacctgttttggaagaaagcttggggccatttcagccccctgtattctcatgattttctctcaggaagcacacactgtgaatggcagacttttcatttagccccaggtgacttactaaaaatagttgaaaattattcacctaagaatagaatctcagcattgtgttaaataaaaatgaaagctttagaaggcatgagatgttcctatcttaaataaagcatgtttcttttctatagagaaatgtatagtttgactctccagaatgtactatccatcttgatgagaaaactcttaaatagtaccaaacattttgaactttaaattatgtatttaaagtgagtgtttaagaaactgtagctgcttcttttacaagtggtgcctattaaagtcagtaatggccattattgttccattgtggaaattaaattatgtaagcttcctaatatcataaacatattaaaattcttctaaaatattgcttttcttttaagtgacaatttgactattcttatgataagcacatgagagtgtcttacattttccaaaagcaggctttaattgcatagttgagtctaggaaaaaataatgttaaaagtgaatatgccaccataattacttaattatgttagtatagaaactacagaatatttaccctggaaagaaaatattggaatgttattataaactcttagatatttatataattcaaaagaatgcatgtttcacattgtgacagataaagatgtatgatttctaaggctttaaaaattattcataaaacagtgggcaatagataaaggaaattctggagaaaatgaaggtatttaaagggtagtttcaaagctatatatattttgaaggatatattctttatgaacaaatatattgtaaaaatttatactaaggtcatctggtaactgtgggattaatatggtcgaaaacaaatgttatggagaagctgtcccaagcaaactaaattacctgtacttttttcccatttcaagggaagaggcaaccacatgaagcaatacttcttacacatgcctaagaacgttcattgaaaaaataaatttttaaaaggcatgtgtttcctatgccaccaatacttttgaaaaattgtgaaccttacccaaaaccatttatcatgtccattaagtatatttgggtatataattaggaagatatttacatgttccatctccacagtggaaaaacttattgaggctaccaaagtgtgccaagaaatgtaagtccttagagtaattagaaatgctgttttcctcaaaagcatgagaaactagcattttcatttcttatttactccctttctatatcaatgcaattcacaacccaattttaatacatccctatatctcaagcatttctatcttgtactttttcagaaaataaaccaaaaataatcctttggtctctctatcttctgacctttgtaagcaacagaaatgtaaaaacagaaggggtccaatttttacacgtttttttctcaagtagcctttctggggatttttattttcttaatgaagtgccaatcagcttttcaaaatgttttctatttctcagcatttccaggaagtgataacgtttagctaaatgagtagaagtggacttccttcaacatattgttaccttgtctagccttaggaagaaaacaagagccacctgaaaataaatacaggctcttttcgagcatctgctgaaatactgttacagcaatttgaagttgatgtggtaggaaaggaaggtgacttttcttgcaaaagtctttctaaacattcacactgtcctaagagatgagctttcttgttttattccggtatattccacaaggtggcacttttagagaaaaacaaatctgatgaagactaaagaggtacttctaaaagagatttcattctaactttatttttctgcgcatatttaactctttcctagcacttgttttttgggatgattaatagtctctataatgttctgtaacttcaatattttacttgttacctaggttctgaacaattgtctgcaaataaattgttcttaaggatggataatacacccattttgatcatttaagtaaagaaagcctagtcattcattcagtcaagaaaaaatttttgaagtacccagttaccttacttttctagattaaaacaggcttagttactaaaaaggcagtcctcatctgtgaacaggatagtttcgttagaagtataaaactcctttagtggccccagttaaaacacacataccctctctgctgctttcaaattccctagcatggtggcctttcaacattgattaaattttaaaatcctaatttaaagatcaggtgagcaaaatgagtagcacatcagtaattcagtagacaaaacttttgtctgaaaaattgctgtattgaaacagagccctaaaataccaaaagaccaggtaattttaacatttgtggaatcacaaatgtaaattcataagaagctctaattaaaaaaaaaaagtctgaagtatatgagcataacaacttaggagtgtgtctacatacttaacttttgaagttttttggcaactttatatactttttttaaatttacaagtctacttaaagacttcttataccccaaatgattaagttaattttagaggtcacctttctcacagcagtgtcacttgaaatttagtagggaaggatattgcagtatttttcagtttccttagcacagcaccacagaaagcagcttattccttttgagtggcagacactcgacggtgcctgcccaactttcctcctgagtggcaagcagatgagtctcagtaattcatactgaaccaaaatgccacatacactaggggcagtcagaaactggctgagaaatcccccgcctcattcgcccctctgctcccaggaactagagtccagttaaagcccctatgcgaaaggccgaattccaccccagggtttgttataacagtggccagtctgaaccccatttgctcgtgctcaaaacttgattcccacttgaaagccttccgggcgcgctgcctcgttgccccgcccctttggcaggagagaggcagtgggcgaggccgggctggggccccgcctcccactcacctgccggtgcctgaaattatgtgcggccccgcgggctgctttccgaggtcagagtgccctgctgctgtctcagaggcatctgttctgcaaatcttaggaagaaaaatgtccctagtagcaaacgggtgtcttctgtgcataaataagtacaacacaattctccgaaagttcgggtaaaaagagatgcggtagcagctgccctgtgtgaagctgtctaccccgcatctctcaggcgctaagctcagtttttgtttttgtttttgtttttttaaagaaaagatgtataattgcaggaatttttttttatttttttattttccatcattctatatatgtgatggtgaaagatatgcctggaaaagttttgttttgaaaagtttattttctgcttcgtcttcagttggcaaaagctctcaattctttagcttccagtttcttttctctctttttctttgttaggtaattaaaggtatgtaaacaaattatctcatgtagcaggggattttcatgttgagaggaatcttccgtgtgagttgtttggtcacacaaataaccctttctcaattttaggagtttggattgtcaaatgtaggtttttctcaaagggggcatataactacatattgactgccaagaactatgactgtagcactaatcagcacacatagagccacacaattatttaatttctaactctctgtggtccctagaaaaattccgttgatgtgcttaggttaaagttctgaagatacccgttgtacccttacttgaaagtttctaatcttaagttttatgaaatgcaataatatgtatcagctagcaatatttctgtgatcaccaacaactctcagtttgatcttaaagtctgaataataaaacaaatcccagcagtaatacatttcttaaacctcacagtgcatgatatatcttttcattctgatcctgtgtttgcaaaaatatacacatgtatatcatagttcctcactttttattcatttgttttcctattacctgtagtaaatatattagttagtacatggaatttatagcatcagctacccccaggaacagcacctgacaggcgggggattttttttcaagttgttctacatttgcataaattatttctattattattcatgtatgttatttatttctgaatcacactagtcctgtgaaagtacaactgaaggcagaaagtgttaggattttgcatctaatgttcattatcatggtattgatggacctaagaaaataaaaattagactaagcccccaaataagctgcatgcatttgtaacatgattagtagatttgaatatatagatgtagtattttgggtatctaggtgttttatcattatgtaaaggaattaaagtaaaggactttgtagttgtttttattaaatatgcatatagtagagtgcaaaaatatagcaaaaataaaaactaaaggtagaaaagcattttagatatgccttaatttagaaactgtgccaggtggccctcggaatagatgccaggcagagaccagtgcctgggtggtgcctcctcttgtctgccctcatgaagaagcttccctcacgtgatgtagtgccctcgtaggtgtcatgtggagtagtgggaacaggcagtactgttgagaggagagcagtgtgagagtttttctgtagaagcagaactgtcagcttgtgccttgaggcttccagaacgtgtcagatggagaagtccaagtttccatgcttcaggcaacttagctgtgtacagaagcaatccagtgtggtaataaaaagcaaggattgcctgtataatttattataaaataaaagggattttaacaaccaacaattcccaacacctcaaaagcttgttgcattttttggtatttgaggtttttatctgaaggttaaagggcaagtgtttggtatagaagagcagtatgtgttaagaaaagaaaaatattggttcacgtagagtgcaaattagaactagaaagttttatacgattatcattttgagatgtgttaaagtaggttttcactgtaaaatgtattagtgtttctgcattgccatagggcctggttaaaactttctcttaggtttcaggaagactgtcacatacagtaagcttttttccttctgacttataatagaaaatgttttgaaagtaaaaaaaaaaaatctaatttggaaatttgacttgttagtttctgtgtttgaaatcatggttctagaaatgtagaaattgtgtatatcagatactcatctaggctgtgtgaaccagcccaagatgaccaacatccccacacctctacatctctgtcccctgtatctcttcctttctaccactaaagtgttccctgctaccatcctggcttgtccacatggtgctctccatcttcctccacatcatggaccacaggtgtgcctgtctaggcctggccaccactcccaacttgacctagccacattcatctagagatggttcctgatgctgggcacagactgtgctcatggcacccattagaaatgcctctagcatctttgtatgcatcttgatttttaaaccaagtcattgtacagagcattcagttttggctgtggtaccaagagaaaaactaatcaagaatataaaccacattccaggctgctgttttctctccatctacaggccacacttttactgtatttcttcatacttgaaattcattctgctattttcatatcagggtacagacttataagggtgcatgttccttaaaggtgcataattattcttattccgtttgcttatattgctacagaatgctctgttttggtgctttgagttctgcagacccaagaagcagtgtggaaattcactgcctgggacacagtcttataagaatgttggcaggtgactttgtatcagatgttgcttctcttttctctgtacacagattgagagttaccacagtggcctgtcgggtccaccctgtgggtgcagcacagctctctgaaagcaagaaccttcctacctattctaacgtttttgccctctaagaaaaatggcctcaggtatggtatagacatagcaagaggggaagggctgtctcactctagcaaccatccctccattacacacagaaagccctcttgaagcaaaagaagaagaaagaaagaaagcttatctctaaggctactgtcttcagaatgctctgagctgaatgctcttgctcctttcccaagaggcagatgaaaatatagccagtttatctatacccttcctatctgaggaggagaatagaaaagtagggtaaatatgtaacgtaaaatatgtcattcaaggaccaccaaaactttaagtaccctatcattaaaaatctggttttaaaagtagctcaagtaagggatgctttgtgacccagggtttctgaagtcagatagccattcttacctgccccttactctgacttattgggaaagggagaactgcagtggtgtttctgttgcagtggcaaaggtaacatgtcagaaaattcagagggttgcataccaataatcctttggaaactggatgtcttactgggtgctagaatgaaaatgtaggtatttattgtcagatgatgaagttcattgtttttttcaaaattggtgttgaaatatcactgtccaatgtgttcacttatgtgaaagctaaattgaatgaggcaaaaagagcaaatagtttgtatatttgtaataccttttgtatttcttacaataaaaatattggtagcaaataaaaataataaaaacaataactttaaactgctttctggagatgaattactctcctggctattttcttttttactttaatgtaaaatgagtataactgtagtgagtaaaattcattaaattccaagttttagcagaa

SEQ ID NO: 289895 - DNA, 1465 bp, Artificial Sequence
  derived and/or modified sequence
gctggtaactccttccccagagtctgattacctgctccgcgaggccgcggacacgtgcggagagccgactgacactcgcagccccctcgggaggcccgacgcgactgggcccctcaggtgcaatgattctggactgagacgcgcttgggcagaggctatgtaatcgtgtctgtgttgaggacttcgcttcgaggagggaagaggagggatcggctcgctcctccggcggcggcggcggcggcgactctgcaggcggagtttcgcggcggcggcaccagggttacgccagccccgcggggaggtctctccatccagcttctgcagcggcgaaagccccagcgcccgagcgcctgagccggcggggagcaagtaaagctagaccgatctccggggagccccggagtaggcgagcggcggccgccagctagttgagcgcaccccccgcccgccccagcggcgccgcggcgggcggcgtccaggcggcatggagaaggacggcctgtgccgcgctgaccagcagtacgaatgcgtggcggagatcggggagggcgcctatgggaaggtgttcaaggcccgcgacttgaagaacggaggccgtttcgtggcgttgaagcgcgtgcgggtgcagaccggcgaggagggcatgccgctctccaccatccgcgaggtggcggtgctgaggcacctggagaccttcgagcaccccaacgtggtcaggttgtttgatgtgtgcacagtgtcacgaacagacagagaaaccaaactaactttagtgtttgaacatgtcgatcaagacttgaccacttacttggataaagttccagagcctggagtgcccactgaaaccataaaggatatgatgtttcagcttctccgaggtctggactttcttcattcacaccgagtagtgcatcgcgatctaaaaccacagaacattctggtgaccagcagcggacaaataaaactcgctgacttcggccttgcccgcatctatagtttccagatggctctaacctcagtggtcgtcacgctgtggtacagagcacccgaagtcttgctccagtccagctacgccacccccgtggatctctggagtgttggctgcatatttgcagaaatgtttcgtagaaagcctctttttcgtggaagttcagatgttgatcaactaggaaaaatcttggacgtgattggactcccaggagaagaagactggcctagagatgttgcccttcccaggcaggcttttcattcaaaatctgcccaaccaattgagaagtttgtaacagatatcgatgaactaggcaaagacctacttctgaagtgtttgacatttaacccagccaaaagaatatctgcctacagtgccctgtctcacccatacttccaggacctggaaaggtgcaaagaaaacctggattcccacctgccgcccagccagaacacctcggagctgaatacagcctga

SEQ ID NO: 289896 - DNA, 981 bp, Artificial Sequence
  derived and/or modified sequence
atggaaaaagatggactgtgccgcgccgaccagcagtacgaatgcgtggccgagattggtgaaggcgcgtacgggaaggtgttcaaggccagagacctgaagaacgggggtcgctttgtcgctctgaaacgcgttcgggtccagaccggcgaagagggtatgcccctgtcgactattcgtgaagttgccgttctgagacatttggaaactttcgagcaccctaacgtggtgaggcttttcgatgtatgcacagtgtcccgcacagaccgcgagacaaagctgacccttgtgttcgaacatgtcgaccaggatctcaccacatatctggataaagtgcctgaacccggagtgccaacagagactatcaaggacatgatgttccagctgttaaggggactggatttcctgcatagccaccgcgtagttcatcgcgacctgaaaccccagaatatcttagtgacatcgtctgggcagatcaagctggccgactttggcctcgctcgaatctactcgtttcagatggcactgactagtgtcgttgttacgctgtggtatcgagcgcccgaggttctcctgcagtcctcctacgcaactcccgtagatttgtggtccgtgggatgtatctttgccgagatgtttcgcagaaagccactgttcagggggtctagtgacgtggaccagctgggcaagattttagatgtgattggactccctggcgaggaggactggcccagagacgttgcgttgcccagacaagcctttcatagcaagtctgcgcagccgatcgagaaattcgttactgacatagacgagctggggaaagacctcctgttgaagtgcctcacgttcaaccctgctaagcgaatctccgcctatagtgcattatcccacccctactttcaggacctggagaggtgcaaggaaaatctcgatagtcacttgcccccctctcaaaacacatccgagctcaatacagcgtag

SEQ ID NO: 289897 - DNA, 981 bp, Artificial Sequence
  derived and/or modified sequence
atggagaaagatgggctatgccgcgccgaccagcagtacgaatgtgtggctgaaatcggagaaggagcctacggaaaagtttttaaggccagagacctgaagaacgggggacgcttcgtcgcgctcaagagggtccgggtacagaccggcgaagaagggatgccactttctacaattagagaagttgccgttctgcggcatctcgaaacatttgagcaccccaatgttgtgcgactgttcgacgtctgtacagtttcgcggaccgacagagagacaaagcttacgctggtctttgaacacgtggaccaggacttgaccacctatctggacaaggtcccagaacccggagtgccaaccgaaaccatcaaggatatgatgtttcaattactcaggggcctcgacttcctgcacagccaccgggtcgtgcaccgagatctcaaaccacagaacatactagtcacttcctccggacagatcaagcttgctgatttcggtcttgcaagaatctactcatttcagatggctctgactagcgttgttgtaactttgtggtatagagccccggaggtgcttttgcagtccagttacgcgacaccagtggatctgtggtcagtcggttgtatttttgccgaaatgttcagaagaaagcctctgttccggggaagttccgatgtagaccaactgggaaaaattctggacgtgattggccttcctggtgaagaggactggccacgagacgtcgcactgcctaggcaggcatttcacagtaagagcgcccagcctattgagaaattcgttactgacattgatgaactggggaaagacctgttgcttaagtgcctgacatttaatccagccaaaagaatctctgcatactctgcactgagccatccatattttcaagatctggaaagatgtaaggaaaatttagatagccacctacctccctctcagaacacatctgagcttaatactgcctag

SEQ ID NO: 289898 - DNA, 981 bp, Artificial Sequence
  derived and/or modified sequence
atggagaaggatggcctgtgcagagctgaccagcagtatgaatgtgtggccgagattggagagggcgcctacggcaaggtgttcaaggcccgggacctgaagaatggaggccgctttgtggccctgaagagggtgcgggtgcagacaggagaggagggcatgcccctgagcaccatccgggaggtggccgtgctgcggcacctggagacctttgagcaccccaacgtggtgcggctgtttgatgtgtgcaccgtgtccaggacagaccgggagaccaagctgaccctggtgtttgagcacgtggaccaggacctgaccacctacctggacaaggtgcctgagcccggggtgcccacagagaccatcaaggacatgatgttccagctgctgcggggcctggacttcctgcacagccaccgggtggtgcaccgggacctgaagccccagaacatcctggtgaccagcagcggccagatcaagctggccgactttggcctggcccgcatctacagcttccagatggccctgacctctgtggtggtgaccctgtggtaccgggcccctgaggtgctgctgcagagcagctatgccacccctgtggacctgtggagcgtgggctgcatctttgctgagatgttccggaggaagcccctcttccggggcagcagtgatgtggaccagctgggcaagatcctggatgtgattggcctgcccggggaggaggactggcccagagatgtggccctgccccggcaggccttccacagcaagagcgcccagcccatcgagaagtttgtgacagacattgatgagctgggcaaggacctgctgctgaagtgcctgaccttcaacccagccaagaggatcagcgcctacagcgccctgagccacccctacttccaggacctggagcgctgcaaggagaacctggacagccacctgccccccagccagaacaccagcgagctgaacacagcctag

SEQ ID NO: 289899 - DNA, 981 bp, Artificial Sequence
  derived and/or modified sequence
atggagaaggacggcctgtgccgggccgaccagcagtacgagtgcgtagctgagatcggggaaggcgcatacgggaaagttttcaaagcccgtgatctaaagaatggcggacgattcgtcgcgttgaagagggttagggtgcagaccggtgaagaggggatgccactcagtactatacgggaagtggccgtgctgcgacacctggagacatttgagcacccgaacgtggttagactgttcgacgtttgtaccgtgtcccgcaccgatcgagagactaaattgacccttgtctttgaacacgtcgatcaagatctgacaacatacttggataaagtccccgagccgggtgtgccaactgagacgatcaaggacatgatgttccagctgctcaggggtctggactttctgcacagccatagagtagtccatcgggacctgaaacctcagaacatcttagttacaagctccggacagattaagctagcagattttggcctggcaagaatttattcatttcaaatggcgttgacatctgtcgtcgtcacattatggtatagagccccagaagttctcctgcagtcttcgtatgccactccagttgatttgtggtccgtgggctgcatcttcgcagagatgtttagaagaaagcctctgttccgcggctcctctgacgtagatcagctaggtaaaatcctcgatgtaatcggactgcctggtgaggaagactggccccgagacgttgctctccctcgacaggcatttcacagcaaatccgcccagccaatcgagaagttcgtgaccgacattgatgagttgggcaaagacctcctgcttaagtgcctcacattcaaccctgcaaaacggatcagcgcttactctgctctgtcacatccatatttccaggacctcgagcgctgcaaggaaaatttagacagtcatttaccaccatctcagaatacatcagaacttaacactgcttag

SEQ ID NO: 289900 - DNA, 981 bp, Artificial Sequence
  derived and/or modified sequence
atggagaaggacggcctgtgccgggccgaccagcagtacgagtgcgtcgccgaaatcggcgaaggggcgtacggaaaggtttttaaagcgcgagatctgaagaacggtggacggtttgttgcgctgaagcgtgtgagggtccaaacaggggaagaggggatgcccctgagcacaatcagggaagtcgctgttctgagacacctcgaaacttttgagcaccctaacgtggtaaggctctttgatgtttgtaccgtgtcgaggactgatcgcgagactaagcttaccctcgtgttcgagcacgtggatcaagacctcactacttacctcgacaaggtaccagaacccggcgtgcccactgagaccatcaaggacatgatgttccagctccttagaggattggactttctgcactcccatcgtgtggtgcaccgcgacttgaagccccaaaatatcctagttaccagtagtggccagattaagctggccgatttcggcttggcaaggatatactctttccagatggccctgacctcagtcgttgttaccctctggtatcgcgcccccgaagtgttgcttcagtcatcttatgctacgccggtggacttgtggtcagtgggttgtatctttgctgagatgtttagaaggaagcccctgtttcgcggttccagcgatgttgaccagctagggaaaattctcgacgtcattggcctccccggcgaagaagactggcctagggatgttgcccttcccaggcaagccttccatagcaaatctgcccaacccatcgagaaatttgtgacggacatcgacgagctaggtaaagatcttctgctgaaatgcctcacctttaatcccgcgaagcgcataagtgcatatagtgctctgtcgcatccctattttcaggaccttgagcgctgtaaggagaatctggactcccacttgccacccagccagaatacctcagagctgaatacagcctag

SEQ ID NO: 289901 - DNA, 981 bp, Artificial Sequence
  derived and/or modified sequence
atggagaaggacgggctgtgtcgggcagatcagcagtacgagtgtgtagcagaaattggtgaaggggcttatggtaaggtttttaaggctcgagatctgaagaacggtggacgttttgtcgctctgaagcgagtgcgtgtccagaccggcgaggaagggatgccactaagcacgattcgcgaagtggctgttctgaggcaccttgagacctttgagcatcccaatgtggtcaggttgttcgacgtgtgcaccgttagccgaactgaccgggaaactaagctgactctagtatttgaacacgtcgaccaagatctgaccacatacctggataaggtgcccgagcccggtgtgcccacggaaacaatcaaagacatgatgttccagttgctccgaggcctggatttcctccattctcatagggttgtacacagggacttgaagccgcagaatattctcgtaacgtcctcaggacagattaagctggccgactttggcctagcgagaatctactctttccaaatggccctaacgagcgtggtggtgacactgtggtacagggcccctgaggtcctgcttcagtcctcctatgcaactccggtggacctgtggtctgtgggctgcattttcgcggagatgtttcggcgtaagcccttatttcgcggatcttctgacgttgaccagcttggaaagatcctcgacgtcattgggttgccaggcgaagaggactggccgagagacgtggctttgcctcggcaagcttttcattctaaatctgcccaacccattgaaaaatttgtgacagatatcgacgaattaggtaaggatttgcttctcaagtgcctgacctttaaccccgcaaagcgcatctccgcttactccgcgttatcccatccatactttcaggatctggagcgttgcaaggaaaatctggattctcatctgccgccaagtcaaaacacatctgagctaaatacagcctag

SEQ ID NO: 289902 - DNA, 981 bp, Artificial Sequence
  derived and/or modified sequence
atggaaaaagacggattgtgccgagcagaccagcagtacgagtgcgtggcagagatcggagaaggagcatacgggaaggttttcaaggccagagacttgaagaacggagggagattcgtggcgttaaaaagagtgcgtgttcagacaggagaagaagggatgccattgtctaccatcagggaggttgctgtgttgagacacctggagacgtttgagcacccaaatgtcgtgagactgtttgatgtgtgtaccgtctctcgtactgatagagagaccaaactgactcttgtctttgagcatgtggaccaagatctcactacatacttggataaggttcccgagcctggcgtcccgactgagaccattaaggatatgatgtttcaactactgcggggattggattttttacacagccatagagtagtgcatcgggatctgaagccccagaatatcttggttacctctagtggccagattaaactagccgactttggtctggccaggatatactcattccagatggccctcacctctgtggtggtgactttatggtacagagcaccggaggtcttgttgcagtctagctacgctacccccgtggacctgtggagcgtcggctgtatttttgcagaaatgtttaggcgtaagccactgttccgcggttcctctgacgttgaccagctaggcaaaatactcgatgtgattggtctgccaggagaggaagactggcccagggacgtggctctgcctaggcaggctttccattcaaagagtgctcagcccatagagaaattcgtgactgacatcgacgaactggggaaggatctgctcctgaaatgcctgaccttcaaccctgctaaacgcattagtgcatactccgccctcagccacccatactttcaggatttagagcggtgcaaagaaaacctcgactcacaccttcccccatctcaaaatacatccgagttaaatacggcctag

SEQ ID NO: 289903 - protein, 771 aa, Artificial Sequence [sequence omitted]

SEQ ID NO: 289904 - protein, 149 aa, Artificial Sequence
  derived and/or modified sequence
MGWLTRIVCLFWGVLLTARANYQNGKNNVPRLKLSYKEMLESNNVITFNGLANSSSYHTFLLDEERSRLYVGAKDHIFSFDLVNIKDFQKIVWPVSYTRRDECKWAGKDILKECANFIKVLKAYNQTHLYACGTGAFHPICTYIEIGHH

SEQ ID NO: 289905 - DNA, 2316 bp, Artificial Sequence
  derived and/or modified sequence
atgggatggttaacacgcatagtctgcctcttctggggcgtcctgctcaccgctcgggcaaactatcagaatgggaagaacaacgttccacgccttaaattgagttataaagaaatgttggagtcaaataatgttatcacgtttaacggtctggctaattcctcaagctatcacacgttcttactggatgaggagcgctcgagattgtacgttggcgcaaaggaccatatcttctcatttgatttagtgaacatcaaagacttccaaaagattgtgtggcccgtatcgtacaccagacgggatgagtgtaaatgggccggtaaggacatcctaaaggaatgcgccaactttatcaaagtactgaaggcatacaaccagactcatttgtacgcctgcggaaccggggcattccatcccatttgcacatatatcgaaatcgggcaccacccggaagacaacatctttaaactcgagaattcccattttgagaacggaagaggtaagtccccgtacgaccctaagctattgacagcttctcttctgattgatggggaactgtattccgggacagccgctgatttcatgggacgagattttgcgatttttagaactttggggcatcaccatcccattagaacggagcagcacgactctaggtggcttaatgaccccaagtttatcagcgcacacttgatctcagagagtgacaaccccgaggacgataaggtgtacttcttctttagagaaaacgcgatcgacggagagcatagtggaaaggccacccacgcacggattggtcagatttgtaagaatgatttcggtgggcacagaagtctagtgaataagtggactacgtttttaaaagctcgattaatctgttcagttcccggacctaatgggatcgatacccatttcgatgaacttcaggatgtgtttctgatgaatttcaaagacccaaagaaccctgtggtctacggggtattcactacgtcctcaaatatctttaagggctccgcggtgtgcatgtactcaatgagtgacgtcaggcgcgtttttctgggtccatatgcacaccgcgacggtccaaattatcagtgggtgccctatcaaggtagggtcccttatccgaggcccggtacgtgtcccagtaagacattcggaggcttcgattccacgaaagatctcccagacgacgtcattacctttgctaggtcccaccccgctatgtataatccggtctttcccatgaacaaccgaccaatcgtaatcaagacagacgtgaattatcaatttactcaaatagtcgttgaccgggtggatgctgaagacggtcagtacgacgttatgtttattggcacagacgtcggaaccgtgctaaaagttgtgtctattcctaaagagacctggtacgacctcgaagaggtcctgttagaggaaatgactgttttccgcgagcctacagccatttccgccatggaactctcaacaaaacaacagcagctgtacatcgggtccactgctggcgttgcccagctccccctacacagatgcgatatctatggcaaagcttgcgccgagtgctgtctggccagagatccctattgcgcgtgggatggcagcgcttgcagtcgatacttccccacagcgaagcgtagaactcgacgacaagatattcggaacggtgatcctctgacccactgcagcgatctccaccatgacaaccaccatggccactcacccgaagagagaattatatacggcgtggagaactcttctacttttctggaatgctcaccgaagtcacaacgggcactggtgtactggcagttccagagaagaaacgaggagcgaaaagaggagattagagtggacgaccacatcatccgaaccgaccaaggactgcttctgcgctcactccagcagaaagattctggtaattacctctgccatgcagttgagcacggttttatacaaactctgctcaaagtgactctggaagtgattgacaccgagcacttagaggagttgcttcacaaagatgacgacggtgacggcagtaaaaccaaagagatgtcaaattctatgaccccctcccagaaggtgtggtacagggattttatgcaactcatcaaccacccaaacttgaataccatggacgagttttgtgagcaggtgtggaagagagacagaaagcagcggaggcagaggccaggccatacacccggtaatagtaacaaatggaaacacctgcaagaaaataagaaaggcaggaatagacgaactcacgagttcgagcgggcacccagatctgtttag

SEQ ID NO: 289906 - DNA, 60 bp, Artificial Sequence
  derived and/or modified sequence
atggggtggctgacgcgcattgtgtgcctgttctggggtgttctgctgactgcccgatag

SEQ ID NO: 289907 - DNA, 2316 bp, Artificial Sequence
  derived and/or modified sequence
atgggatggttaaccaggattgtgtgcttattttggggtgtcctcctgacagccagggcaaactaccagaatggcaaaaataatgtccctcggctgaaattaagctacaaggagatgctcgagtcgaataatgtgattaccttcaatggactggccaacagttcatcataccacacctttctactggacgaggagagatctcgcctgtatgttggggctaaagaccatatttttagttttgacctggtgaacataaaagactttcagaagatcgtatggccggtatcgtacactaggcgtgacgaatgcaagtgggccggaaaggacatcctgaaagagtgcgccaactttattaaagttctgaaggcatataaccagacacatctttacgcatgcggaacaggcgcattccaccctatctgtacctatatcgagatcggtcaccatccagaggacaacattttcaagcttgagaacagtcacttcgagaatggccgaggcaaaagtccctatgatccaaagcttctgaccgcgtcgctgctaatcgatggagaattgtactcagggaccgccgctgatttcatgggcagagattttgccatcttcaggactttgggccaccaccaccctataaggactgagcagcatgattctagatggctgaacgatcctaaattcatatctgcccatttaatatctgaatccgacaatccagaggacgataaggtgtacttcttcttcagagagaacgccatcgatggagaacactccggtaaagcaacacacgctaggatcgggcaaatctgcaagaatgattttggcggacaccggagcctggtaaataaatggacaaccttcttaaaggcgcgactgatctgctcagtgcccggacctaatggaattgacacacacttcgacgagctgcaggatgttttcttaatgaatttcaaggaccctaaaaacccagtggtttacggagtcttcacgacatcatctaatatatttaaaggatctgccgtctgcatgtatagtatgagcgacgttcggagggtctttcttggaccatacgctcaccgggacggcccaaactaccagtgggtgccttaccagggcagagttccctatcctaggcccggaacctgcccaagcaaaactttcggcggtttcgactcaaccaaagatctccccgacgacgtcatcacattcgcgagaagccaccctgcaatgtataaccctgtgttcccgatgaacaatcggcctatcgtcatcaagaccgacgtaaactatcaattcacacaaattgtggttgacagagtcgacgcagaggacggccagtatgatgtgatgttcatcggaaccgatgttggaaccgtgctgaaggttgtctcgatacctaaggaaacctggtatgatctcgaagaggtgctcctcgaggagatgaccgtatttcgagagcctaccgcaatcagcgctatggagctctctacgaagcagcagcagttgtatatcggcagcactgccggtgtagcacagctacccttacatcgctgcgacatatatggcaaagcctgcgcagaatgttgcttggctcgagacccctattgtgcctgggatgggtccgcatgcagcagatacttcccaactgccaagaggagaactcgtcgacaggacatcaggaatggagaccctctgactcattgctcggatctccaccatgacaaccaccatggacattcgcctgaagaacgaattatttatggagttgaaaatagttccactttcttagaatgttcccctaagagtcagagagctttggtttactggcaattccagcggcgaaacgaagaacgaaaagaggagattcgagtggacgatcatattattaggaccgaccaaggcctcttgctgcgaagcttacaacagaaggactctggaaattatctttgtcatgcggtggagcatggatttatccagacgctgctgaaggtaaccctggaagtaatcgatactgaacacctggaggagttactgcacaaagacgatgacggagacggaagcaagacgaaggagatgagcaattcaatgactccctctcagaaggtttggtacagagattttatgcagctcattaaccatccaaacctcaataccatggatgagttctgtgaacaggtctggaaaagagacaggaaacaacggcgtcagcgcccagggcacacaccgggaaactctaataagtggaaacatctgcaggagaacaagaaaggtcggaatcgtcggactcacgaatttgaaagagcccctagatctgtctag

SEQ ID NO: 289908 - DNA, 114 bp, Artificial Sequence
  derived and/or modified sequence
atggggtggctgactcggattgtgtgcctcttttggggggtcctcctgacagctagggcaaactaccaaaatggaaagaataatgttccgagattaaaactgtcttacaaatag

SEQ ID NO: 289909 - DNA, 2316 bp, Artificial Sequence
  derived and/or modified sequence
atggggtggctcaccaggatcgtgtgcctattttggggagtgcttttgaccgccagagctaactatcagaacggtaaaaataacgttccacgtcttaaactgagctataaagaaatgctggaatcaaacaatgtgataaccttcaatggcctggcgaattcctcttcatatcatacctttctgctggatgaagagaggtctcgcctttacgtcggcgcaaaagatcacattttctcgttcgatttggtgaacataaaggatttccagaagatcgtgtggcctgttagttacacacgacgggacgaatgcaagtgggccggcaaggacatactgaaggagtgtgccaacttcatcaaagtacttaaggcatacaatcaaacacatttgtatgcatgtggaacgggggcatttcaccctatatgcacgtacattgaaattggtcatcatcctgaggataacatcttcaagctggagaacagccatttcgagaatggacgaggcaagtccccctatgacccaaaactcctgacagcctcacttttgatcgacggggaactctattccgggactgccgccgatttcatgggtcgtgattttgcaatatttaggacattggggcaccatcaccccatcagaacagaacagcatgactcccgatggcttaatgatcctaaattcataagtgctcacctcatcagcgaatctgacaacccagaggacgataaggtgtatttcttcttccgcgagaacgcgattgacggagaacactccggaaaggccactcatgccagaattggtcagatctgtaaaaacgactttgggggacataggtccttagtcaataagtggacaacatttctcaaggctcgattgatatgttcagttccaggtcctaacggaattgacactcatttcgatgaactgcaggacgttttcctcatgaattttaaagatcctaagaacccagtcgtctatggtgtattcaccacaagttccaacatcttcaaaggatctgctgtgtgcatgtattctatgagtgacgtgcgccgggttttccttggcccctatgcacaccgcgacggccccaattaccagtgggtcccttatcaaggtagggtcccctatcctcggcctgggacatgtcctagcaagactttcggaggatttgactccacgaaggacctaccggatgatgttataacctttgcgcgatctcatcctgctatgtataacccagtcttcccaatgaataaccgccccatagtaatcaagactgacgtgaattaccagtttacccagatagttgtcgatcgtgtggatgctgaagacggacaatacgacgttatgttcattggtacagatgttgggacagtgctaaaggtggtttccatccccaaggagacctggtatgatctggaggaagtactgcttgaagaaatgacagtgttcagagagcccaccgcaatttctgccatggagttgagtaccaaacaacagcagctgtatattggaagcaccgcaggcgtcgcccagttgcccctgcaccggtgtgacatctatgggaaggcttgcgcagagtgttgtctggcacgagatccatattgtgcctgggacggctcggcttgctccagatacttccctaccgctaaaagacgaacgagacgacaagacattcgcaatggggaccccctgacacactgctctgatctacatcacgacaatcaccatggccattcgccagaagagcgaataatttacggagtggaaaactcttcaaccttcctagaatgttctcccaaaagccagagagcactggtgtattggcagttccagcggcgaaatgaggaaagaaaagaagaaatcagggtagacgaccacataataagaactgaccagggactgctattaagatcccttcagcagaaagactcaggcaattatctatgtcacgccgttgagcacggcttcatccaaactctgctgaaagtgactctggaggttattgatactgagcaccttgaagaactcctgcacaaggatgacgatggcgacggctccaagaccaaggaaatgtctaattccatgaccccttcccaaaaagtgtggtaccgtgactttatgcagctgattaatcatccgaacctaaatacaatggacgagttctgtgaacaggtgtggaagcgagaccggaagcaaaggcgccagagacccggacatacacccgggaactccaacaagtggaagcatctccaggaaaacaagaaaggtcgcaaccgccgtacgcacgagttcgagcgggcaccaaggtcagtctag

SEQ ID NO: 289910 - DNA, 60 bp, Artificial Sequence
  derived and/or modified sequence
atggggtggttgaccaggattgtttgcttgttttggggagtgcttctaacggccaggtag

SEQ ID NO: 289911 - DNA, 2316 bp, Artificial Sequence
  derived and/or modified sequence
atggggtggttgacaaggatcgtttgtctcttttggggagtgctcttaaccgctagggcaaactaccagaacggaaaaaataacgtgcctcggctaaaattatcctacaaagagatgttggagagcaataacgtcatcaccttcaatggcctcgcaaatagttcctcataccacacattcttgctggacgaggaacgtagccggctgtacgttggtgccaaggaccatatcttctccttcgacctggtcaacattaaagactttcagaagatcgtgtggcccgtctcatacacgaggagagatgaatgcaagtgggcgggcaaagacattctcaaggagtgcgccaactttattaaggttcttaaggcctataaccagacacacctttacgcctgcggtacaggcgcctttcaccccatctgcacatatattgagatcggccatcaccccgaggataacattttcaagcttgaaaactcacacttcgagaacggacgcgggaaatccccctatgaccccaagttactgactgcctctctactaattgatggggagctctactccggtactgctgctgactttatgggccgcgactttgccatttttcgtaccctcggacaccatcatcctattcgaactgagcagcatgattcccgatggctaaatgatcctaaattcatctcagctcacttaatctcagaatctgacaaccccgaagatgataaggtgtatttttttttccgagagaatgctatcgacggcgaacatagcgggaaagccactcatgccaggattgggcaaatttgcaagaacgattttggcgggcacaggtccctcgtgaataagtggactacttttctgaaagccaggttaatctgttcagtgccaggcccaaacggaatagacacccactttgatgagttgcaggatgtgttcttaatgaacttcaaggatccgaagaatccggtagtatacggcgtgttcacgacgagtagcaatattttcaaaggatcagccgtctgtatgtattctatgtctgacgtgagacgagttttcctcgggccatacgcacaccgtgatggaccaaattatcaatgggttccataccaaggcagggttccctacccacgtcccggcacatgtcccagcaagaccttcggcgggtttgacagcaccaaggatttgcccgacgacgtgataacattcgccagatctcaccccgccatgtacaacccggttttcccaatgaataacaggcccatcgtgattaagacggacgtgaattatcaatttacacagatcgtggtggatcgagttgatgccgaagatggacagtacgacgttatgttcataggtaccgatgtgggaactgtcctcaaggttgtgagtattcctaaggagacttggtacgatttggaggaggtgttactggaagaaatgaccgttttccgagagcccacggccattagtgcgatggaattaagcacaaaacaacagcagctgtatatcggcagtaccgcaggggtcgcccaactcccattacatcgctgcgacatttacggcaaggcttgtgcagagtgctgtctggcccgagacccttattgcgcatgggacgggtctgcctgctcaaggtattttcccactgccaaaaggcgcacccggagacaggatattcggaatggagatcccttgactcactgttcggatctgcaccatgataaccatcacggccacagtccagaggagagaatcatctacggagtggaaaatagttcgacatttcttgagtgcagcccaaaaagccagcgtgcgctggtgtactggcagtttcagagacggaacgaggaaaggaaggaagaaatcagagtcgacgatcacataattagaacggatcagggcctgctgctccgaagcttgcaacaaaaagacagcggcaactacctgtgtcacgccgtggaacatggttttatccaaacactactgaaggtgaccctggaggtcatcgacacggagcacctcgaggaacttttgcacaaagacgatgatggggacggatccaagactaaagagatgtcaaactcaatgacaccttcccagaaagtatggtatcgagacttcatgcaattaatcaaccacccaaacctgaatacaatggacgagttctgtgaacaagtttggaagcgggatcggaagcaacgccggcagcgccctggacacacgcccggcaattccaacaagtggaagcacctccaggaaaataagaaaggtcggaatcgccgaactcacgagtttgagcgagcgcctcgatcagtatag

SEQ ID NO: 289912 - DNA, 2550 bp, Artificial Sequence
  derived and/or modified sequence
cacacacacacacacacacacacgcacacatacaatgcacaagttcagcaggattgtataatgagcatgaattgtaaatttttttccagattgtttgaacttctctggccgcacaatacaggaaggaagactaaagcagcaaagggacctacagcgtctgcagcatgggctggttaactaggattgtctgtcttttctggggagtattacttacagcaagagcaaactatcagaatgggaagaacaatgtgccaaggctgaaattatcctacaaagaaatgttggaatccaacaatgtgatcactttcaatggcttggccaacagctccagttatcataccttccttttggatgaggaacggagtaggctgtatgttggagcaaaggatcacatattttcattcgacctggttaatatcaaggattttcaaaagattgtgtggccagtatcttacaccagaagagatgaatgcaagtgggctggaaaagacatcctgaaagaatgtgctaatttcatcaaggtacttaaggcatataatcagactcacttgtacgcctgtggaacgggggcttttcatccaatttgcacctacattgaaattggacatcatcctgaggacaatatttttaagctggagaactcacattttgaaaacggccgtgggaagagtccatatgaccctaagctgctgacagcatcccttttaatagatggagaattatactctggaactgcagctgattttatggggcgagactttgctatcttccgaactcttgggcaccaccacccaatcaggacagagcagcatgattccaggtggctcaatgatccaaagttcattagtgcccacctcatctcagagagtgacaatcctgaagatgacaaagtatactttttcttccgtgaaaatgcaatagatggagaacactctggaaaagctactcacgctagaataggtcagatatgcaagaatgactttggagggcacagaagtctggtgaataaatggacaacattcctcaaagctcgtctgatttgctcagtgccaggtccaaatggcattgacactcattttgatgaactgcaggatgtattcctaatgaactttaaagatcctaaaaatccagttgtatatggagtgtttacgacttccagtaacattttcaagggatcagccgtgtgtatgtatagcatgagtgatgtgagaagggtgttccttggtccatatgcccacagggatggacccaactatcaatgggtgccttatcaaggaagagtcccctatccacggccaggaacttgtcccagcaaaacatttggtggttttgactctacaaaggaccttcctgatgatgttataacctttgcaagaagtcatccagccatgtacaatccagtgtttcctatgaacaatcgcccaatagtgatcaaaacggatgtaaattatcaatttacacaaattgtcgtagaccgagtggatgcagaagatggacagtatgatgttatgtttatcggaacagatgttgggaccgttcttaaagtagtttcaattcctaaggagacttggtatgatttagaagaggttctgctggaagaaatgacagtttttcgggaaccgactgctatttcagcaatggagctttccactaagcagcaacaactatatattggttcaacggctggggttgcccagctccctttacaccggtgtgatatttacgggaaagcgtgtgctgagtgttgcctcgcccgagacccttactgtgcttgggatggttctgcatgttctcgctattttcccactgcaaagagacgcacaagacgacaagatataagaaatggagacccactgactcactgttcagacttacaccatgataatcaccatggccacagccctgaagagagaatcatctatggtgtagagaatagtagcacatttttggaatgcagtccgaagtcgcagagagcgctggtctattggcaattccagaggcgaaatgaagagcgaaaagaagagatcagagtggatgatcatatcatcaggacagatcaaggccttctgctacgtagtctacaacagaaggattcaggcaattacctctgccatgcggtggaacatgggttcatacaaactcttcttaaggtaaccctggaagtcattgacacagagcatttggaagaacttcttcataaagatgatgatggagatggctctaagaccaaagaaatgtccaatagcatgacacctagccagaaggtctggtacagagacttcatgcagctcatcaaccaccccaatctcaacacaatggatgagttctgtgaacaagtttggaaaagggaccgaaaacaacgtcggcaaaggccaggacataccccagggaacagtaacaaatggaagcacttacaagaaaataagaaaggtagaaacaggaggacccacgaatttgagagggcacccaggagtgtctgagctgcattacctctagaaacctcaaacaagtagaaacttgcctagacaataactggaaaaacaaatgcaa

SEQ ID NO: 289913 - DNA, 114 bp, Artificial Sequence
  derived and/or modified sequence
atgggctggcttacgcggatcgtgtgtctattctggggcgtgctcttgaccgctcgggcaaattaccagaacgggaagaataatgtaccaagactgaaattatcatacaaatag

SEQ ID NO: 289914 - DNA, 2316 bp, Artificial Sequence
  derived and/or modified sequence
atgggctggttaacaagaatagtgtgcttgttttggggagtgcttctgaccgcaagagccaactatcagaatggtaaaaataatgtgccgagactaaaactgagctacaaggagatgctagaatctaacaacgtgatcacatttaatggactggcaaactcttcaagctaccatacatttctactggatgaagagcgcagtaggctgtatgtgggggccaaagatcatattttttcattcgacctcgttaatatcaaagactttcagaaaatagtgtggcctgtgagttatacacgcagagacgagtgcaaatgggccggcaaagatattttaaaagaatgtgccaacttcattaaagtcctaaaggcatataatcagacgcacctttatgcatgcgggactggggccttccatccaatctgcacatacatcgagatcggacaccaccccgaagataacatatttaagctggagaattcacacttcgagaacggaagaggtaagagcccttatgatccaaaactgctgactgcgtcattactgatcgacggtgagctctactctggcacagccgctgactttatgggtagggacttcgcaatctttcgcacgttaggacaccatcatccaatacggacagagcagcacgattccaggtggttgaacgaccccaaatttatttccgcccacctaatcagcgaatcagacaatccagaggacgacaaagtgtacttcttctttcgcgaaaatgctatcgatggcgaacactctgggaaagcaacacacgctcgaataggacagatttgtaaaaacgacttcggtggacaccgctcactggtcaacaagtggaccaccttcctcaaagcccggctgatatgttccgtgcctggccccaatgggattgatacccactttgacgaacttcaggacgtgtttttgatgaacttcaaggacccgaaaaaccccgtcgtgtatggagtattcaccaccagttctaatatcttcaaagggtctgcggtctgtatgtattccatgtctgacgtgagacgagtgtttctgggtccttacgctcaccgagatggaccgaactatcaatgggtgccctaccagggacgtgtaccatatccccggcctggaacttgcccttctaaaacgttcggaggcttcgactccacgaaagatctgcccgatgatgttatcacttttgcacgctcccacccagccatgtataatcccgtcttcccaatgaacaatagacctatagtgattaaaaccgacgttaattaccagtttactcagatagttgtggatcgagtcgatgctgaagatggacaatacgacgtcatgtttattggcactgacgtgggcaccgtgttaaaggttgtcagcatccccaaagagacatggtacgatctggaggaggtgctgctcgaggagatgacagtctttcgcgaaccaacagcaatatctgccatggaactaagtacaaaacagcagcagctgtatataggcagcacggcaggagtggctcagctccccttacatagatgcgatatatatggaaaggcatgcgcagaatgttgtttagcgcgagacccgtattgtgcctgggatggttccgcctgctcaaggtacttcccgaccgcaaaaaggagaacacgtcgtcaagacattaggaatggcgatcctctgacccattgtagcgatctgcatcatgataaccaccacgggcactccccagaagaaaggatcatctatggcgtggaaaattcaagtacctttctggaatgttcgcctaagtcgcaaagggccctggtatactggcagttccaaagaagaaatgaggagagaaaagaggaaatccgcgttgatgatcacattattcggactgatcaggggttattattacgtagcctccaacaaaaggactccggaaattacctctgccatgctgtagaacatgggttcattcagacgttgttaaaggtgaccctcgaagttatagacacagaacatttagaggagctgctgcataaagatgacgacggggatgggtctaagaccaaggaaatgagtaactctatgacacctagccagaaagtatggtatcgggactttatgcagctcattaaccatcccaatcttaacactatggacgaattttgcgagcaagtgtggaagagagaccgtaaacaacgccgccagcgcccaggccatacccccgggaattcaaacaaatggaagcatctacaggaaaacaagaaaggcaggaacagaaggactcatgagttcgaacgagcaccgagaagcgtatag

SEQ ID NO: 289915 - DNA, 2316 bp, Artificial Sequence
  derived and/or modified sequence
atgggatggttgaccagaatcgtgtgtttattctggggagttctattgacggcccgagcaaactatcagaacggcaaaaacaacgtgccgagattaaaactcagttataaggagatgttggaaagcaataatgtgataacctttaacggactggcaaattcaagctcataccacaccttccttctcgatgaggagagatcaaggctgtatgttggagccaaagatcacatatttagcttcgacctcgtgaacatcaaagattttcaaaaaattgtttggcctgtatcctacacccgacgagatgaatgcaagtgggctggaaaagacattctgaaagaatgcgcaaatttcataaaggttctgaaggcttacaatcaaacccacctgtacgcttgcggtactggcgcttttcatccaatctgcacctatattgaaataggccatcacccagaggataacatctttaagctggaaaattcgcacttcgaaaacggtagaggcaagtctccctacgacccaaagcttcttactgcatcccttctcattgatggcgaactctactccggcactgctgcggactttatgggccgggactttgctatttttcgaacacttgggcaccaccaccctatcaggaccgaacaacacgactcccggtggctcaacgaccctaaattcatttcagctcatctgatttccgagtccgacaatccagaagacgacaaggtttattttttttttcgtgagaatgccatagatggagagcacagcggcaaggctacacatgctaggataggacaaatctgtaagaatgattttggagggcaccgctctctcgtcaataaatggaccaccttcttaaaagccagactcatctgctctgtgccaggccccaatggcattgacactcacttcgacgaattacaggacgtcttccttatgaattttaaggatccaaaaaaccccgtcgtttatggtgtgtttacaacaagcagtaacatatttaaagggtctgccgtatgcatgtatagcatgtctgacgtccggagggttttcctcggaccctacgcacacagagatggcccaaactaccaatgggttccctaccaaggtcgggttccctaccccaggcctggaacctgtcccagcaagactttcggcggcttcgactctacaaaagacttgcccgatgatgtaattaccttcgctcgatctcaccccgccatgtacaaccctgttttcccaatgaataaccggcccatagtgatcaagacagacgtaaactatcagttcactcaaatagtggtagacagggtggacgcagaggacggtcaatacgatgtgatgtttattggtaccgatgttgggacagtactgaaggttgtgtctattcctaaggaaacctggtacgacctggaagaagtgctactggaagagatgacggtgtttagggaacccaccgcaatatcagcgatggagctttctactaaacaacagcaattatacatagggagtactgctggtgtagcccagctaccactgcacagatgcgacatctacgggaaagcatgcgcagagtgttgtctcgcccgtgatccatattgcgcatgggacggcagtgcatgttcaagatactttcctactgccaagcgtcgtacgagaagacaagacataagaaacggcgacccactgactcactgtagcgacttgcaccacgataatcaccacggacatagcccagaggagaggattatttatggcgtagaaaactcgagcacctttctggagtgttcccctaaatcccaaagagctctcgtgtattggcaatttcagaggaggaacgaagaacggaaagaggagattcgcgtcgacgaccacattatccgtacagatcagggtctacttctaaggagtctgcaacaaaaagatagtgggaactatctgtgccacgccgtcgaacatggattcatccagacactgctgaaagtcacgttggaggtgattgacactgaacatttagaagagttgctccacaaagacgatgatggggacggcagtaagaccaaagagatgagcaattctatgaccccgtcacaaaaggtttggtaccgcgattttatgcagttaattaatcacccaaacttaaacacaatggacgaattttgtgaacaggtgtggaagagagatagaaaacagaggagacaaaggccaggacatacccccggaaacagcaataagtggaagcatcttcaggaaaataagaaaggaagaaaccgtcgcacacacgagtttgagcgcgcaccaagaagcgtgtag

SEQ ID NO: 289916 - DNA, 5659 bp, Artificial Sequence
  derived and/or modified sequence
aagcaccactgcagcagaccttgttaattttttttttttttctttccacacaacagttgtgcctcattatccggtgcctggctcggaatttttttttttttttttctttttggagggtttgaagtttctgtgcttcagtgactgttacagaagaagaggtgttagtgttgccatgaggtcttgattgtctgcatttatgaatgaaactgacctaaatcacctgttacctccagtttccagattgtttgaacttctctggccgcacaatacaggaaggaagactaaagcagcaaagggacctacagcgtctgcagcatgggctggttaactaggattgtctgtcttttctggggagtattacttacagcaagagcaaactatcagaatgggaagaacaatgtgccaaggctgaaattatcctacaaagaaatgttggaatccaacaatgtgatcactttcaatggcttggccaacagctccagttatcataccttccttttggatgaggaacggagtaggctgtatgttggagcaaaggatcacatattttcattcgacctggttaatatcaaggattttcaaaagattgtgtggccagtatcttacaccagaagagatgaatgcaagtgggctggaaaagacatcctgaaagaatgtgctaatttcatcaaggtacttaaggcatataatcagactcacttgtacgcctgtggaacgggggcttttcatccaatttgcacctacattgaaattggacatcatcctgaggacaatatttttaagctggagaactcacattttgaaaacggccgtgggaagagtccatatgaccctaagctgctgacagcatcccttttaatagatggagaattatactctggaactgcagctgattttatggggcgagactttgctatcttccgaactcttgggcaccaccacccaatcaggacagagcagcatgattccaggtggctcaatgatccaaagttcattagtgcccacctcatctcagagagtgacaatcctgaagatgacaaagtatactttttcttccgtgaaaatgcaatagatggagaacactctggaaaagctactcacgctagaataggtcagatatgcaagaatgactttggagggcacagaagtctggtgaataaatggacaacattcctcaaagctcgtctgatttgctcagtgccaggtccaaatggcattgacactcattttgatgaactgcaggatgtattcctaatgaactttaaagatcctaaaaatccagttgtatatggagtgtttacgacttccagtaacattttcaagggatcagccgtgtgtatgtatagcatgagtgatgtgagaagggtgttccttggtccatatgcccacagggatggacccaactatcaatgggtgccttatcaaggaagagtcccctatccacggccaggaacttgtcccagcaaaacatttggtggttttgactctacaaaggaccttcctgatgatgttataacctttgcaagaagtcatccagccatgtacaatccagtgtttcctatgaacaatcgcccaatagtgatcaaaacggatgtaaattatcaatttacacaaattgtcgtagaccgagtggatgcagaagatggacagtatgatgttatgtttatcggaacagatgttgggaccgttcttaaagtagtttcaattcctaaggagacttggtatgatttagaagaggttctgctggaagaaatgacagtttttcgggaaccgactgctatttcagcaatggagctttccactaagcagcaacaactatatattggttcaacggctggggttgcccagctccctttacaccggtgtgatatttacgggaaagcgtgtgctgagtgttgcctcgcccgagacccttactgtgcttgggatggttctgcatgttctcgctattttcccactgcaaagagacgcacaagacgacaagatataagaaatggagacccactgactcactgttcagacttacaccatgataatcaccatggccacagccctgaagagagaatcatctatggtgtagagaatagtagcacatttttggaatgcagtccgaagtcgcagagagcgctggtctattggcaattccagaggcgaaatgaagagcgaaaagaagagatcagagtggatgatcatatcatcaggacagatcaaggccttctgctacgtagtctacaacagaaggattcaggcaattacctctgccatgcggtggaacatgggttcatacaaactcttcttaaggtaaccctggaagtcattgacacagagcatttggaagaacttcttcataaagatgatgatggagatggctctaagaccaaagaaatgtccaatagcatgacacctagccagaaggtctggtacagagacttcatgcagctcatcaaccaccccaatctcaacacaatggatgagttctgtgaacaagtttggaaaagggaccgaaaacaacgtcggcaaaggccaggacataccccagggaacagtaacaaatggaagcacttacaagaaaataagaaaggtagaaacaggaggacccacgaatttgagagggcacccaggagtgtctgagctgcattacctctagaaacctcaaacaagtagaaacttgcctagacaataactggaaaaacaaatgcaatatacatgaacttttttcatggcattatgtggatgtttacaatggtgggaaattcagctgagttccaccaattataaattaaatccatgagtaactttcctaataggctttttttcctaataccaccacctaacagagaacacaggtgaatgcagatgttcactttagcagacttaatgtttcctatgagatttcactgtacaggtttgtctttcttctttgcctgagaaataaaaatgtcatttgccatattgccatctaaaggagaaaaactgcatcagcaaagccattgtattgaactaaaagtttaaaatgaactgcatggatttactaagctgatgaatattccaaaacgtggttggattcaaggatatattttgtctaccggccctcatgtttgtatgtacttgaggagtaaaatgagtaaaatgatactgaatgaaatgttctgtggaaatattaaaaaaaaaaaaaaacataagccatccatcatccagaagaaaaatggaatacactgatctactactgatgtcttctttcagctttgatctaaagatgtattttattaaaactataatttaaatgtaccatgaaaaatatgcagtaaaaattagttgttttctaagctagagtaggatttgtcttacaattattgtgctatgtagtttttgttttaaaaattccaatggtgtgctgctttctttggacattttattttcaattctataagagggatagatgacattgttctagaaacacatatacatcattaagagtgaatctctaaaaccaggatataaattatgctttatttctctgagaaaatcaaacaaatggaagctgttcacacctccccttctttaagcattatctaaattaatttttacttgcataatgttcttagaaaaaaaaacagaacatttaagcaggaaaaaaggaagaaacaagttgatttttaagtgcattttactataatgaatcaatgaagggaaaaggaactgcatatttcatgaaaataataagcattgtcttaatatactgttaatagaaaatgtgtcttaattccgtgcttgaatccctgcatgatatttgagactaagatctctcttatgattctaccaagaattatatctgtgtcacttaatttttttaaaagagagagatcaataactattcagagcaacatgttaaaggcaaagtttccaatcatttacatctgtatcaggtgcctcttacctttccttatttaagacaattatttgtacaagaaacacatgactcttttcatatcaatgggagggacttttctacaaagtattttccaggatgcaacccacatttaaacaatgtaaaattctttgtttcctgcaacaacttacaaaataaggtaaaagactaaaattcaagatttgcttccttcattgtcctaagacgattcgttgagaatcactgactttgagatatttaaaactttcagcattatactgtggtttcttttgcactgcactcacctattcaggactcctcccccaggttcctcatcatgcacaaaaatgcaaagaaaacatcttattagtaattaatgaagcaacattgaaattctaactctagctgtctttggattctaattaactcagcatcaatttctcacctcagactacagtgaatttttatttcctatcagctgaaatatttcacagatggaagctcatgtttcagttttaatgactgccttgaataaacaagttgttgccacttgtttcaaacaaaagcctaaaaataatctacattcaattttaggctccattgactaatatggtgttgcttttggaagtactgtatatcctcacatggaagccaaattgttaaattatttgaaggacacaccactgtacagaaagtagtgtttcaaatataaatcgaagaacaaagagtgctccaaaaaataggtcattcttttattttcataaagtatctaaactgtactaacattcagtgttgtgtttcattctaaatttgcagctgaaataaatttatttgcgatagcagaaatatcttattattcatcctcagaaataaaggatttgaagggatagagattatatgataaatttatagaagactttcagaatttgaatgcattttgtttagtgttatgaaatgacaatagaaaaaagtctcgacttcaattaaaagttacacaaacaaacaaatctacaggcatgtctttatataccatcaggtctaagttttcaaagaaaattgtagatataacttgcagataactcattacagtcataatctctgcccatgtgtattgagagggggcagtttgcacgaaaaagaattattggcccatttaataattcagctttaaatagactttgtcatatgcatgaatcatcagagatgaaactgtttgagagactcatgtgaccttacgaaaattacaacagcagtcttaaagtatgaaaaagatgcatcacagcagagacattatggcccagttgatatcaaatgtaaaatgtaaatgcatgtaaatgcacacttcattttatgtattatttagtaatttgcagtggtatgtgtttaatatttttgctacctacacattaggcaaaaaaaagatgtaaataatttgggagaaaaagaggaagaacagtgtaaaataaaactttctataagtactccatttcaatgtgttcaacatcatcctaaaaggcaagattttcccacgcaggtgacaaggtggtttatgtactatttaagggcggaaggtgcgtgcccgttcaataagcatgttttttgccaggtaggaaatatgttccatatctttacttatcattgcatttcagatgggaactagaaaaactggagagaaaaatgtaatgaaactgctgctgtaaattattccttttagcatgtattcacttgctaaatacacatttcttcaaaata

SEQ ID NO: 289917 - DNA, 2316 bp, Artificial Sequence
  derived and/or modified sequence
atgggctggctgaccagaatcgtgtgcctgttctggggcgtgctgctgaccgccagagccaactaccagaacggcaagaacaacgtgcccagactgaagctgagctacaaggagatgctggagagcaacaacgtgatcaccttcaacggcctggccaacagcagcagctaccacaccttcctgctggacgaggagagaagcagactgtacgtgggcgccaaggaccacatcttcagcttcgacctggtgaacatcaaggacttccagaagatcgtgtggcccgtgagctacaccagaagagacgagtgcaagtgggccggcaaggacatcctgaaggagtgcgccaacttcatcaaggtgctgaaggcctacaaccagacccacctgtacgcctgcggcaccggcgccttccaccccatctgcacctacatcgagatcggccaccaccccgaggacaacatcttcaagctggagaacagccacttcgagaacggcagaggcaagagcccctacgaccccaagctgctgaccgccagcctgctgatcgacggcgagctgtacagcggcaccgccgccgacttcatgggcagagacttcgccatcttcagaaccctgggccaccaccaccccatcagaaccgagcagcacgacagcagatggctgaacgaccccaagttcatcagcgcccacctgatcagcgagagcgacaaccccgaggacgacaaggtgtacttcttcttcagagagaacgccatcgacggcgagcacagcggcaaggccacccacgccagaatcggccagatctgcaagaacgacttcggcggccacagaagcctggtgaacaagtggaccaccttcctgaaggccagactgatctgcagcgtgcccggccccaacggcatcgacacccacttcgacgagctgcaggacgtgttcctgatgaacttcaaggaccccaagaaccccgtggtgtacggcgtgttcaccaccagcagcaacatcttcaagggcagcgccgtgtgcatgtacagcatgagcgacgtgagaagagtgttcctgggcccctacgcccacagagacggccccaactaccagtgggtgccctaccagggcagagtgccctaccccagacccggcacctgccccagcaagaccttcggcggcttcgacagcaccaaggacctgcccgacgacgtgatcaccttcgccagaagccaccccgccatgtacaaccccgtgttccccatgaacaacagacccatcgtgatcaagaccgacgtgaactaccagttcacccagatcgtggtggacagagtggacgccgaggacggccagtacgacgtgatgttcatcggcaccgacgtgggcaccgtgctgaaggtggtgagcatccccaaggagacctggtacgacctggaggaggtgctgctggaggagatgaccgtgttcagagagcccaccgccatcagcgccatggagctgagcaccaagcagcagcagctgtacatcggcagcaccgccggcgtggcccagctgcccctgcacagatgcgacatctacggcaaggcctgcgccgagtgctgcctggccagagacccctactgcgcctgggacggcagcgcctgcagcagatacttccccaccgccaagagaagaaccagaagacaggacatcagaaacggcgaccccctgacccactgcagcgacctgcaccacgacaaccaccacggccacagccccgaggagagaatcatctacggcgtggagaacagcagcaccttcctggagtgcagccccaagagccagagagccctggtgtactggcagttccagagaagaaacgaggagagaaaggaggagatcagagtggacgaccacatcatcagaaccgaccagggcctgctgctgagaagcctgcagcagaaggacagcggcaactacctgtgccacgccgtggagcacggcttcatccagaccctgctgaaggtgaccctggaggtgatcgacaccgagcacctggaggagctgctgcacaaggacgacgacggcgacggcagcaagaccaaggagatgagcaacagcatgacccccagccagaaggtgtggtacagagacttcatgcagctgatcaaccaccccaacctgaacaccatggacgagttctgcgagcaggtgtggaagagagacagaaagcagagaagacagagacccggccacacccccggcaacagcaacaagtggaagcacctgcaggagaacaagaagggcagaaacagaagaacccacgagttcgagagagcccccagaagcgtgtag

SEQ ID NO: 289918 - DNA, 60 bp, Artificial Sequence
  derived and/or modified sequence
atgggctggctgaccagaatcgtgtgcctgttctggggcgtgctgctgaccgccagatag

SEQ ID NO: 289919 - DNA, 114 bp, Artificial Sequence
  derived and/or modified sequence
atgggctggctgaccagaatcgtgtgcctgttctggggcgtgctgctgaccgccagagccaactaccagaacggcaagaacaacgtgcccagactgaagctgagctacaagtag

SEQ ID NO: 289920 - DNA, 2316 bp, Artificial Sequence
  derived and/or modified sequence
atgggctggctcacgagaatcgtttgcttgttctggggtgtgttgctcacggcccgtgctaattaccagaacggaaaaaataatgtacccaggttgaagctctcctataaggagatgctcgagtctaataacgtgatcaccttcaacggattggcgaattctagttcttaccacactttcctcctcgatgaggaaaggtccagactatacgtgggagcaaaagatcacattttctcatttgatctcgtgaatatcaaggactttcaaaagatcgtgtggcccgtcagctatactaggagggacgagtgcaagtgggcaggcaaggatatcctaaaagaatgtgccaactttatcaaggtcttgaaggcctacaaccagacccacctgtacgcctgtggtaccggcgctttccacccgatttgcacctacatcgagatcggacaccaccctgaagacaatatttttaaactcgagaactcccactttgaaaatggcagggggaaaagcccgtatgaccccaagcttcttacagcctctcttctgatagatggagaactgtacagtggaacagccgctgacttcatgggccgcgactttgctatcttccgcacactcgggcaccatcatccaatccggactgaacagcacgattctagatggctgaacgatcccaagttcattagtgcgcatctcatttccgaatccgataatcctgaggacgataaagtctattttttcttccgagagaacgcaatcgacggggagcacagcggcaaagctacccacgctagaataggtcagatatgcaagaacgactttggtggacatcgatccttggttaacaaatggaccaccttcttgaaggcaaggctcatctgttctgtgcccggacctaacggtatcgacactcacttcgatgaactgcaggacgtgtttctaatgaacttcaaagaccccaaaaaccccgttgtttatggcgttttcactacatccagcaatatattcaaaggttccgccgtctgtatgtactcaatgtcagatgtgcgccgcgtttttttgggcccttacgcccaccgagatggacctaactatcagtgggtcccataccaaggccgcgtaccttaccctaggccagggacgtgtccctcgaaaacttttgggggctttgacagcacaaaggatctgcctgatgatgtgatcaccttcgcccggagccaccctgcaatgtacaatcctgtcttcccaatgaacaaccgtcccatcgtgattaaaacggacgtgaactaccaattcacccagattgttgtcgatcgcgtagacgcagaggatgggcagtacgacgtaatgtttatcgggaccgacgttggcactgtgctcaaggtggtatccatcccaaaggaaacttggtatgatttagaggaggtactgttggaagagatgactgtgtttcgcgaacctacagccatttcggccatggagctttcaaccaagcagcagcaactctacataggctcgacagctggcgttgcacagctgcctcttcaccggtgcgatatctacggaaaggcgtgtgccgagtgctgcctcgccagggatccgtactgtgcgtgggacggatctgcatgctcacggtatttccccacagccaagcgccgcaccagacggcaagacattcgaaacggcgatcccctgacccattgtagcgacctccaccacgacaatcatcatgggcattcgcctgaggaaaggattatctacggcgtcgagaattcgagtacttttctcgaatgttctcctaaaagccaacgcgcacttgtgtactggcagtttcagcggcgcaatgaagagcgcaaagaggagattcgcgtggacgaccacatcatccgcacagaccagggactcctcctgcggtccctccagcaaaaggacagcggcaattacctgtgccacgctgttgagcacggatttattcagactctcctcaaggtgacccttgaggtcatagacaccgaacatctcgaggagctattgcacaaggacgacgatggtgatggcagtaagacaaaagagatgagcaacagcatgacacctagccagaaggtgtggtacagggacttcatgcagctgatcaatcatcctaatctcaacaccatggatgaattttgcgaacaagtttggaaacgggacagaaagcagcgcagacagagaccaggacatacaccggggaattccaataagtggaagcacctgcaagagaataaaaagggtagaaaccgcaggacccatgagttcgagcgagctccaagatccgtgtag

SEQ ID NO: 289921 - DNA, 60 bp, Artificial Sequence
  derived and/or modified sequence
atgggatggttgaccagaatcgtatgtctgttctggggcgtgctgctgacagcccggtag

SEQ ID NO: 289922 - DNA, 2316 bp, Artificial Sequence
  derived and/or modified sequence
atgggctggctgaccaggatcgtttgcctgttttggggcgtgctcctcactgcccgcgccaattaccagaatggaaaaaacaacgttccacgactgaagctttcttacaaggaaatgctcgaatcaaacaacgtcatcacctttaacggattggcaaattcgtcctcctaccatacctttctgctggatgaagaacgttcaagattgtatgtcggtgccaaggaccacatcttcagttttgatcttgtgaatataaaagattttcagaagatcgtgtggcctgtgtcctacacacgaagggatgagtgtaaatgggcgggtaaagacatcttaaaggaatgcgccaacttcataaaggtgctgaaagcttacaaccaaacacatctgtatgcttgcggaacaggggccttccaccctatttgtacatacattgaaatcgggcaccacccagaggacaatattttcaaacttgagaactcccacttcgagaacggccggggcaagtccccctatgatccgaagctgctgacagcttctctgctgatcgacggggagctctactctggtacagctgctgacttcatgggcagggacttcgccattttccggactttgggccaccaccaccctatcaggaccgagcagcacgatagccggtggcttaacgatccaaaatttatcagcgcacacctcatctcagaatctgacaacccagaagatgacaaagtgtactttttcttccgagaaaatgcgattgacggggagcacagcgggaaggccactcacgctaggattggtcagatctgtaaaaacgacttcggaggtcacaggtctctggtgaataagtggaccacttttctaaaagccagattgatctgcagcgttcccggaccaaacggcatcgacacccacttcgacgaactccaggatgtatttttgatgaactttaaagacccaaaaaacccagtcgtgtatggagtttttacgactagcagcaatatctttaagggttctgccgtctgcatgtactccatgtcggacgtgcgacgggtgttcctaggtccatacgcccatagagacggccctaattaccaatgggttccgtatcagggccgagtgccttatccccggcccgggacctgtccatccaagacctttgggggttttgattctactaaggacttacctgatgacgttatcacattcgcccggagccaccccgccatgtacaatccagtctttcccatgaataatcgccccatcgttatcaaaaccgatgtgaactaccagttcacccagatagtcgtcgatcgagtggacgcagaagatggccaatatgatgttatgtttatcggaaccgacgttggcacagtgctaaaagtcgttagcatccctaaggagacgtggtatgaccttgaagaggttctgctggaggaaatgaccgtgtttcgagagccaacggcgatttccgctatggaactgagtaccaagcagcagcagctttacattggctctactgccggggtagctcaattgccattacacagatgtgacatttacggcaaagcatgcgccgagtgttgcctggccagagatccgtactgtgcctgggacgggagcgcatgcagtaggtacttcccaaccgccaaacgccggacacggcggcaggatattcgtaatggagaccccttgactcattgttccgatctgcaccacgacaaccatcacgggcattctcctgaagagcgaatcatctacggggtggagaacagtagcacatttttggaatgcagccctaaaagtcagcgggccttagtatattggcagtttcagaggagaaacgaggaaaggaaggaagaaatccgcgtggacgaccatattatcaggaccgatcagggactgctgctgcgttctctccagcaaaaggattctgggaattacttgtgtcatgcagtcgaacatggcttcatacagaccctattgaaggtgacacttgaggtgattgacacagagcacttggaagagctgcttcacaaggacgacgacggggacggttccaaaactaaagaaatgagtaactccatgactccctctcagaaagtgtggtatagagatttcatgcagctgataaatcacccaaacctgaataccatggatgagttttgcgaacaggtttggaagagggatcgcaaacagcgccggcagcgtcctggacacactccaggaaattccaacaaatggaagcacctccaggagaacaaaaaagggcgaaaccgtcggactcatgaattcgagcgagctccgagatctgtctag

SEQ ID NO: 289923 - DNA, 114 bp, Artificial Sequence
  derived and/or modified sequence
atgggttggttaacacgcattgtctgcctgttctggggcgtactgctgaccgcgcgggccaattatcagaatgggaagaacaatgttcccagactcaagctgtcatacaaatag

SEQ ID NO: 289924 - DNA, 2316 bp, Artificial Sequence
  derived and/or modified sequence
atgggctggctgaccagaattgtgtgcctcttctggggcgtgctgctgacagcccgggccaactaccagaatggcaagaacaacgtgccccggctgaagctgagctacaaggagatgctggagagcaacaacgtcatcaccttcaacggcctggccaacagcagcagctaccacaccttcctgctggatgaggagaggagccggctgtatgtgggcgccaaggaccacatcttctcctttgacctggtgaacatcaaggacttccagaagatcgtgtggcctgtgtcctacaccaggagagatgagtgcaagtgggccggcaaggacatcctgaaggaatgtgccaacttcatcaaggtgctgaaggcctacaaccagacccacctgtatgcctgtggcaccggggccttccaccccatctgcacctacatcgagatcggccaccaccctgaggacaacatcttcaagctggagaacagccactttgaaaatggccggggcaagagcccctatgaccccaagctgctgacagccagcctgctgattgatggagagctgtacagcggcacagctgctgacttcatgggccgggactttgccatcttccgcaccctgggccaccaccaccccatcagaacagagcagcacgacagccgctggctgaatgaccccaagttcatcagcgcccacctgatcagcgagagtgacaacccagaagatgacaaggtgtacttcttcttcagagaaaatgccattgatggagagcacagcggcaaggccacccacgccagaattggccagatctgcaagaatgactttggaggccacaggagcctggtgaacaagtggaccaccttcctgaaggcccggctcatctgcagcgtgcccggccccaatggaattgacacccactttgatgagctgcaggatgtgttcctgatgaacttcaaggaccccaagaaccctgtggtgtatggagtcttcaccaccagcagcaacatcttcaagggcagcgctgtgtgcatgtacagcatgtctgatgtgagaagagtcttcctgggcccctatgcccacagagatggccccaactaccagtgggtgccctaccagggccgggtgccctacccccggcccggcacctgccccagcaagaccttcggcggctttgacagcaccaaggacctgcctgatgatgtgatcacctttgcccggagccacccagccatgtacaaccctgtgttccccatgaacaaccggcccatcgtcatcaagacagatgtgaactaccagttcacccagatcgtggtggacagagtggatgctgaagatggccagtatgatgtgatgtttattggaacagatgtgggcaccgtgctgaaggtggtgtccatccccaaggagacctggtatgacctggaggaggtgctgctggaggagatgacagtgttccgggagcccacagccatcagcgccatggagctgagcaccaagcagcagcagctgtacatcggcagcacagctggggtggcccagctgcccctgcaccgctgtgacatctacggcaaggcctgtgccgagtgctgcctggcccgggacccctactgtgcctgggatggcagcgcctgcagccgctacttccccacagccaagaggaggacccggcggcaggacatcagaaatggagaccccctgacccactgcagcgacctgcaccacgacaaccaccacggccacagccctgaggagcgcatcatctacggcgtggagaacagcagcaccttcctggagtgcagccccaagagccagagggccctggtgtactggcagttccagaggagaaatgaggagaggaaggaggagatccgggtggatgaccacatcatcagaacagaccagggcctgctgctgcggagcctgcagcagaaggacagcggcaactacctgtgccacgctgtggagcacggcttcatccagaccctgctgaaggtgaccctggaggtgattgacacagagcacctggaggagctgctgcacaaggatgatgatggagatggcagcaagaccaaggagatgagcaacagcatgacccccagccagaaggtgtggtacagagacttcatgcagctgatcaaccaccccaacctgaacaccatggatgagttctgtgagcaggtgtggaagagggacaggaagcagaggcggcagaggcctggccacaccccaggcaacagcaacaagtggaagcacctgcaggagaacaagaagggcaggaacagaaggacccatgaatttgagcgggcccccaggtctgtgtag

SEQ ID NO: 289925 - DNA, 60 bp, Artificial Sequence
  derived and/or modified sequence
atgggctggctgaccagaattgtgtgcctcttctggggcgtgctgctgacagccaggtag

SEQ ID NO: 289926 - DNA, 114 bp, Artificial Sequence
  derived and/or modified sequence
atgggctggctgaccagaattgtgtgcctcttctggggcgtgctgctgacagcccgggccaactaccagaatggcaagaacaacgtgccccggctgaagctgagctacaagtag

SEQ ID NO: 289927 - DNA, 2316 bp, Artificial Sequence
  derived and/or modified sequence
atgggctggctgacccggatcgtgtgcctgttctggggcgtgctgctgacagctcgcgccaattatcagaacggcaagaataacgttccacggctgaagctgtcctacaaggaaatgctggagtctaataatgtcataacttttaacgggcttgccaacagcagttcttaccacacttttctgcttgatgaggagaggagtagactctacgttggggcgaaggaccacatcttctcatttgatctggttaacattaaagactttcagaaaattgtttggcccgttagctacacacgtcgggacgaatgtaagtgggccggtaaggacatattaaaggagtgtgctaatttcatcaaggtcctaaaggcctacaaccagacccacttgtacgcttgcggcaccggagctttccaccccatctgcacctacattgaaatcggccatcatccagaagacaatattttcaagctggaaaacagtcatttcgagaatggacgcggcaagagcccatatgaccccaagctgctcactgcttctctcttaattgacggggagctctacagcggtacggccgcagatttcatgggtcgcgatttcgccattttccgcactctgggtcatcatcatccgatcagaaccgaacagcatgactcgcggtggcttaacgaccctaagtttattagcgcccacttgatttctgagtccgacaaccctgaggacgacaaagtgtatttttttttccgcgagaacgctatagatggagagcacagtggaaaagccacacacgcccggatagggcagatctgcaaaaacgatttcggaggccaccgaagcttggtgaataagtggacgacatttctgaaagctaggctgatttgctcggtcccaggccctaacggcattgatacgcactttgacgaattacaggatgtgtttctcatgaatttcaaagacccaaagaatcctgtggtttacggggtattcaccaccagctctaatatctttaagggctcggccgtctgcatgtactccatgagtgatgtgcggcgggttttcttagggccttatgctcaccgggacggaccgaactatcagtgggtgccgtaccagggcagagtcccctatccgaggcctgggacctgtccatcaaagacctttggaggatttgacagcactaaggatctgccagacgacgttatcacttttgcgcgcagtcaccctgccatgtataacccagtgtttccaatgaacaatcggccaatcgtcatcaaaacagacgtgaattatcaatttacccaaatagtcgtggaccgggtcgacgcagaagacggccagtatgacgttatgtttatcgggacagacgtgggaacagttctgaaggtggtaagcattccgaaagagacatggtatgatctggaagaggttctgctggaggagatgaccgtgtttagggaacctacggccataagcgccatggagctatccacaaaacaacagcagttatatatcggctccaccgcgggggtagctcaactccccttgcacaggtgtgacatctacggcaaagcttgtgccgaatgctgcttggctcgggacccttactgcgcgtgggacggtagtgcttgctccaggtacttccctaccgccaaaagacgtacacggcggcaggatatccgcaatggcgaccctctgacacattgctcagatcttcaccacgataaccaccatggccactcaccagaggaacgtatcatctacggtgtcgagaactcatctacttttctggaatgttcacccaaatcacagcgggccctggtgtactggcagttccagcgccgtaatgaggaacgcaaggaagagattagggtcgacgaccacataattagaacggatcagggcctgctgttgagatccctccaacagaaggactccggaaattatctttgccacgcggtcgagcacggattcatccaaaccttgttaaaagttaccttggaggttatcgacacggaacatctggaagagttgctgcacaaggacgacgatggcgacggaagcaagaccaaggagatgagcaattccatgaccccaagccagaaggtctggtatcgtgactttatgcagcttattaatcaccccaatttaaatacaatggatgagttctgtgagcaggtatggaagagggaccgaaagcagagaagacagagaccgggccacaccccgggcaacagcaataagtggaaacacctccaggaaaacaagaaaggccgtaatcgtcggacccacgagtttgagagggcaccacgtagtgtgtag

SEQ ID NO: 289928 - DNA, 60 bp, Artificial Sequence
  derived and/or modified sequence
atgggctggctgacccggatcgtgtgcctgttctggggcgtgctgctgaccgccaggtag

SEQ ID NO: 289929 - DNA, 2316 bp, Artificial Sequence
  derived and/or modified sequence
atgggctggctgacccggatcgtgtgcctgttctggggcgtgctgctcaccgcacgggcgaactatcagaatgggaaaaacaacgtcccacggctgaagctgtcttacaaagagatgttggaatccaacaacgtgattacctttaacggtctggctaattccagcagctatcacacctttctgctcgacgaggagcgcagcagattatatgtcggcgctaaagaccatatcttttctttcgatctcgtgaatataaaagactttcagaaaattgtgtggcctgtgtcttacactcgacgggatgagtgtaaatgggccggtaaagacattctcaaggagtgcgctaactttattaaggtgcttaaagcctacaatcagacccacctgtatgcttgtggcactggtgctttccatcctatctgcacctatattgaaataggacaccaccctgaagacaatattttcaaactggaaaacagccatttcgaaaacggaaggggaaagtcaccgtatgatcctaagctgctgacagccagcttactgattgatggcgaactctattccggcacggcagctgactttatgggtcgggactttgcgattttcagaactttaggccatcatcacccaatccgcaccgagcagcacgacagtcgatggctcaacgatcccaaattcattagcgcccacttgattagcgagtccgataatcctgaggatgacaaggtgtatttcttctttcgggaaaacgccatcgacggagagcatagcggaaaggctacgcatgcccgcattggacaaatttgtaaaaacgatttcggcggtcacagaagcctggttaataagtggacaaccttcttgaaggcccgactgatttgttccgtgcccggccctaacggtatcgacactcattttgatgagctgcaggacgtgttcctcatgaacttcaaggatccaaagaaccccgtagtatacggagtttttaccacatcaagtaacatctttaaggggagtgcagtctgtatgtattctatgagtgatgtgaggagagtctttctcgggccatatgcacaccgcgacgggccaaactatcagtgggtgccttaccagggcagggtgccataccctcgacccggcacttgtccaagcaagacctttggtggattcgattctaccaaggacctgcccgacgacgtcatcacttttgcaagatctcaccccgccatgtacaatccagtttttcctatgaataatcggccaattgtgatcaagactgatgttaactatcagttcacacagatcgtcgtcgatagggtggacgctgaggacggccagtatgatgtgatgttcattggcactgacgtagggactgtgttaaaagtagtctccattcctaaggaaacatggtacgatctcgaagaagtgctgctggaagagatgaccgtgtttagagagcccaccgcaatctctgctatggaattgtcaaccaagcagcagcagctttatattggcagtactgctggtgtggcccaacttccactgcaccgttgcgacatatatggcaaagcatgtgcagagtgctgtcttgcacgtgatccttactgtgcctgggacggttcagcatgctccaggtactttccaaccgctaagaggagaactcggcggcaagacatccgcaatggcgatcctcttacacattgcagcgacctgcaccatgataaccaccacggacactcccccgaggagagaatcatctacggtgtggaaaacagtagcactttcttagaatgtagtcccaagtcccagcgagccctggtgtactggcagttccaaagaagaaatgaagaaaggaaggaggaaataagagttgacgaccatatcatcaggacggaccagggactgcttctgaggagcttacagcaaaaagattctgggaactacctttgccacgccgtggagcatgggttcatacaaaccctgcttaaggttactctcgaagttatcgatacggagcacttggaagaactgctgcacaaggacgatgacggggatggttcaaaaacaaaggagatgtctaattctatgaccccatcacagaaagtgtggtatagagatttcatgcagctgattaaccatcctaatctgaatactatggatgagttctgcgagcaggtgtggaaaagggataggaagcagcggaggcaacgaccaggccatactcctggaaatagtaacaagtggaagcatctgcaggaaaataagaaaggaagaaatcgtcgaacgcatgagttcgagagggcaccacgttccgtgtag

SEQ ID NO: 289930 - DNA, 114 bp, Artificial Sequence
  derived and/or modified sequence
atgggctggctgacccggatcgtgtgcctgttctggggcgtgctgctaactgccagggcgaactatcagaacggtaaaaataatgttccgaggctgaagctgagctacaaatag

SEQ ID NO: 289931 - RNA, 2316 nt, Artificial Sequence
  derived and/or modified sequence
augggguggcucaccaggaucgugugccuauuuuggggagugcuuuugaccgccagagcuaacuaucagaacgguaaaaauaacguuccacgucuuaaacugagcuauaaagaaaugcuggaaucaaacaaugugauaaccuucaauggccuggcgaauuccucuucauaucauaccuuucugcuggaugaagagaggucucgccuuuacgucggcgcaaaagaucacauuuucucguucgauuuggugaacauaaaggauuuccagaagaucguguggccuguuaguuacacacgacgggacgaaugcaagugggccggcaaggacauacugaaggagugugccaacuucaucaaaguacuuaaggcauacaaucaaacacauuuguaugcauguggaacgggggcauuucacccuauaugcacguacauugaaauuggucaucauccugaggauaacaucuucaagcuggagaacagccauuucgagaauggacgaggcaagucccccuaugacccaaaacuccugacagccucacuuuugaucgacggggaacucuauuccgggacugccgccgauuucaugggucgugauuuugcaauauuuaggacauuggggcaccaucaccccaucagaacagaacagcaugacucccgauggcuuaaugauccuaaauucauaagugcucaccucaucagcgaaucugacaacccagaggacgauaagguguauuucuucuuccgcgagaacgcgauugacggagaacacuccggaaaggccacucaugccagaauuggucagaucuguaaaaacgacuuugggggacauagguccuuagucaauaaguggacaacauuucucaaggcucgauugauauguucaguuccagguccuaacggaauugacacucauuucgaugaacugcaggacguuuuccucaugaauuuuaaagauccuaagaacccagucgucuaugguguauucaccacaaguuccaacaucuucaaaggaucugcugugugcauguauucuaugagugacgugcgccggguuuuccuuggccccuaugcacaccgcgacggccccaauuaccagugggucccuuaucaagguaggguccccuauccucggccugggacauguccuagcaagacuuucggaggauuugacuccacgaaggaccuaccggaugauguuauaaccuuugcgcgaucucauccugcuauguauaacccagucuucccaaugaauaaccgccccauaguaaucaagacugacgugaauuaccaguuuacccagauaguugucgaucguguggaugcugaagacggacaauacgacguuauguucauugguacagauguugggacagugcuaaaggugguuuccauccccaaggagaccugguaugaucuggaggaaguacugcuugaagaaaugacaguguucagagagcccaccgcaauuucugccauggaguugaguaccaaacaacagcagcuguauauuggaagcaccgcaggcgucgcccaguugccccugcaccggugugacaucuaugggaaggcuugcgcagaguguugucuggcacgagauccauauugugccugggacggcucggcuugcuccagauacuucccuaccgcuaaaagacgaacgagacgacaagacauucgcaauggggacccccugacacacugcucugaucuacaucacgacaaucaccauggccauucgccagaagagcgaauaauuuacggaguggaaaacucuucaaccuuccuagaauguucucccaaaagccagagagcacugguguauuggcaguuccagcggcgaaaugaggaaagaaaagaagaaaucaggguagacgaccacauaauaagaacugaccagggacugcuauuaagaucccuucagcagaaagacucaggcaauuaucuaugucacgccguugagcacggcuucauccaaacucugcugaaagugacucuggagguuauugauacugagcaccuugaagaacuccugcacaaggaugacgauggcgacggcuccaagaccaaggaaaugucuaauuccaugaccccuucccaaaaagugugguaccgugacuuuaugcagcugauuaaucauccgaaccuaaauacaauggacgaguucugugaacagguguggaagcgagaccggaagcaaaggcgccagagacccggacauacacccgggaacuccaacaaguggaagcaucuccaggaaaacaagaaaggucgcaaccgccguacgcacgaguucgagcgggcaccaaggucagucuag

SEQ ID NO: 289932 - RNA, 60 nt, Artificial Sequence
  derived and/or modified sequence
auggggugguugaccaggauuguuugcuuguuuuggggagugcuucuaacggccagguag

SEQ ID NO: 289933 - RNA, 2316 nt, Artificial Sequence
  derived and/or modified sequence
auggggugguugacaaggaucguuugucucuuuuggggagugcucuuaaccgcuagggcaaacuaccagaacggaaaaaauaacgugccucggcuaaaauuauccuacaaagagauguuggagagcaauaacgucaucaccuucaauggccucgcaaauaguuccucauaccacacauucuugcuggacgaggaacguagccggcuguacguuggugccaaggaccauaucuucuccuucgaccuggucaacauuaaagacuuucagaagaucguguggcccgucucauacacgaggagagaugaaugcaagugggcgggcaaagacauucucaaggagugcgccaacuuuauuaagguucuuaaggccuauaaccagacacaccuuuacgccugcgguacaggcgccuuucaccccaucugcacauauauugagaucggccaucaccccgaggauaacauuuucaagcuugaaaacucacacuucgagaacggacgcgggaaaucccccuaugaccccaaguuacugacugccucucuacuaauugauggggagcucuacuccgguacugcugcugacuuuaugggccgcgacuuugccauuuuucguacccucggacaccaucauccuauucgaacugagcagcaugauucccgauggcuaaaugauccuaaauucaucucagcucacuuaaucucagaaucugacaaccccgaagaugauaagguguauuuuuuuuuccgagagaaugcuaucgacggcgaacauagcgggaaagccacucaugccaggauugggcaaauuugcaagaacgauuuuggcgggcacaggucccucgugaauaaguggacuacuuuucugaaagccagguuaaucuguucagugccaggcccaaacggaauagacacccacuuugaugaguugcaggauguguucuuaaugaacuucaaggauccgaagaauccgguaguauacggcguguucacgacgaguagcaauauuuucaaaggaucagccgucuguauguauucuaugucugacgugagacgaguuuuccucgggccauacgcacaccgugauggaccaaauuaucaauggguuccauaccaaggcaggguucccuacccacgucccggcacaugucccagcaagaccuucggcggguuugacagcaccaaggauuugcccgacgacgugauaacauucgccagaucucaccccgccauguacaacccgguuuucccaaugaauaacaggcccaucgugauuaagacggacgugaauuaucaauuuacacagaucgugguggaucgaguugaugccgaagauggacaguacgacguuauguucauagguaccgaugugggaacuguccucaagguugugaguauuccuaaggagacuugguacgauuuggaggagguguuacuggaagaaaugaccguuuuccgagagcccacggccauuagugcgauggaauuaagcacaaaacaacagcagcuguauaucggcaguaccgcaggggucgcccaacucccauuacaucgcugcgacauuuacggcaaggcuugugcagagugcugucuggcccgagacccuuauugcgcaugggacgggucugccugcucaagguauuuucccacugccaaaaggcgcacccggagacaggauauucggaauggagaucccuugacucacuguucggaucugcaccaugauaaccaucacggccacaguccagaggagagaaucaucuacggaguggaaaauaguucgacauuucuugagugcagcccaaaaagccagcgugcgcugguguacuggcaguuucagagacggaacgaggaaaggaaggaagaaaucagagucgacgaucacauaauuagaacggaucagggccugcugcuccgaagcuugcaacaaaaagacagcggcaacuaccugugucacgccguggaacaugguuuuauccaaacacuacugaaggugacccuggaggucaucgacacggagcaccucgaggaacuuuugcacaaagacgaugauggggacggauccaagacuaaagagaugucaaacucaaugacaccuucccagaaaguaugguaucgagacuucaugcaauuaaucaaccacccaaaccugaauacaauggacgaguucugugaacaaguuuggaagcgggaucggaagcaacgccggcagcgcccuggacacacgcccggcaauuccaacaaguggaagcaccuccaggaaaauaagaaaggucggaaucgccgaacucacgaguuugagcgagcgccucgaucaguauag

SEQ ID NO: 289934 - RNA, 114 nt, Artificial Sequence
  derived and/or modified sequence
augggcuggcuuacgcggaucgugugucuauucuggggcgugcucuugaccgcucgggcaaauuaccagaacgggaagaauaauguaccaagacugaaauuaucauacaaauag

SEQ ID NO: 289935 - RNA, 2316 nt, Artificial Sequence
  derived and/or modified sequence
augggcugguuaacaagaauagugugcuuguuuuggggagugcuucugaccgcaagagccaacuaucagaaugguaaaaauaaugugccgagacuaaaacugagcuacaaggagaugcuagaaucuaacaacgugaucacauuuaauggacuggcaaacucuucaagcuaccauacauuucuacuggaugaagagcgcaguaggcuguaugugggggccaaagaucauauuuuuucauucgaccucguuaauaucaaagacuuucagaaaauaguguggccugugaguuauacacgcagagacgagugcaaaugggccggcaaagauauuuuaaaagaaugugccaacuucauuaaaguccuaaaggcauauaaucagacgcaccuuuaugcaugcgggacuggggccuuccauccaaucugcacauacaucgagaucggacaccaccccgaagauaacauauuuaagcuggagaauucacacuucgagaacggaagagguaagagcccuuaugauccaaaacugcugacugcgucauuacugaucgacggugagcucuacucuggcacagccgcugacuuuauggguagggacuucgcaaucuuucgcacguuaggacaccaucauccaauacggacagagcagcacgauuccaggugguugaacgaccccaaauuuauuuccgcccaccuaaucagcgaaucagacaauccagaggacgacaaaguguacuucuucuuucgcgaaaaugcuaucgauggcgaacacucugggaaagcaacacacgcucgaauaggacagauuuguaaaaacgacuucgguggacaccgcucacuggucaacaaguggaccaccuuccucaaagcccggcugauauguuccgugccuggccccaaugggauugauacccacuuugacgaacuucaggacguguuuuugaugaacuucaaggacccgaaaaaccccgucguguauggaguauucaccaccaguucuaauaucuucaaagggucugcggucuguauguauuccaugucugacgugagacgaguguuucuggguccuuacgcucaccgagauggaccgaacuaucaaugggugcccuaccagggacguguaccauauccccggccuggaacuugcccuucuaaaacguucggaggcuucgacuccacgaaagaucugcccgaugauguuaucacuuuugcacgcucccacccagccauguauaaucccgucuucccaaugaacaauagaccuauagugauuaaaaccgacguuaauuaccaguuuacucagauaguuguggaucgagucgaugcugaagauggacaauacgacgucauguuuauuggcacugacgugggcaccguguuaaagguugucagcauccccaaagagacaugguacgaucuggaggaggugcugcucgaggagaugacagucuuucgcgaaccaacagcaauaucugccauggaacuaaguacaaaacagcagcagcuguauauaggcagcacggcaggaguggcucagcuccccuuacauagaugcgauauauauggaaaggcaugcgcagaauguuguuuagcgcgagacccguauugugccugggaugguuccgccugcucaagguacuucccgaccgcaaaaaggagaacacgucgucaagacauuaggaauggcgauccucugacccauuguagcgaucugcaucaugauaaccaccacgggcacuccccagaagaaaggaucaucuauggcguggaaaauucaaguaccuuucuggaauguucgccuaagucgcaaagggcccugguauacuggcaguuccaaagaagaaaugaggagagaaaagaggaaauccgcguugaugaucacauuauucggacugaucagggguuauuauuacguagccuccaacaaaaggacuccggaaauuaccucugccaugcuguagaacauggguucauucagacguuguuaaaggugacccucgaaguuauagacacagaacauuuagaggagcugcugcauaaagaugacgacggggaugggucuaagaccaaggaaaugaguaacucuaugacaccuagccagaaaguaugguaucgggacuuuaugcagcucauuaaccaucccaaucuuaacacuauggacgaauuuugcgagcaaguguggaagagagaccguaaacaacgccgccagcgcccaggccauacccccgggaauucaaacaaauggaagcaucuacaggaaaacaagaaaggcaggaacagaaggacucaugaguucgaacgagcaccgagaagcguauag

SEQ ID NO: 289936 - RNA, 2316 nt, Artificial Sequence
  derived and/or modified sequence
augggaugguugaccagaaucguguguuuauucuggggaguucuauugacggcccgagcaaacuaucagaacggcaaaaacaacgugccgagauuaaaacucaguuauaaggagauguuggaaagcaauaaugugauaaccuuuaacggacuggcaaauucaagcucauaccacaccuuccuucucgaugaggagagaucaaggcuguauguuggagccaaagaucacauauuuagcuucgaccucgugaacaucaaagauuuucaaaaaauuguuuggccuguauccuacacccgacgagaugaaugcaagugggcuggaaaagacauucugaaagaaugcgcaaauuucauaaagguucugaaggcuuacaaucaaacccaccuguacgcuugcgguacuggcgcuuuucauccaaucugcaccuauauugaaauaggccaucacccagaggauaacaucuuuaagcuggaaaauucgcacuucgaaaacgguagaggcaagucucccuacgacccaaagcuucuuacugcaucccuucucauugauggcgaacucuacuccggcacugcugcggacuuuaugggccgggacuuugcuauuuuucgaacacuugggcaccaccacccuaucaggaccgaacaacacgacucccgguggcucaacgacccuaaauucauuucagcucaucugauuuccgaguccgacaauccagaagacgacaagguuuauuuuuuuuuucgugagaaugccauagauggagagcacagcggcaaggcuacacaugcuaggauaggacaaaucuguaagaaugauuuuggagggcaccgcucucucgucaauaaauggaccaccuucuuaaaagccagacucaucugcucugugccaggccccaauggcauugacacucacuucgacgaauuacaggacgucuuccuuaugaauuuuaaggauccaaaaaaccccgucguuuaugguguguuuacaacaagcaguaacauauuuaaagggucugccguaugcauguauagcaugucugacguccggaggguuuuccucggacccuacgcacacagagauggcccaaacuaccaauggguucccuaccaaggucggguucccuaccccaggccuggaaccugucccagcaagacuuucggcggcuucgacucuacaaaagacuugcccgaugauguaauuaccuucgcucgaucucaccccgccauguacaacccuguuuucccaaugaauaaccggcccauagugaucaagacagacguaaacuaucaguucacucaaauagugguagacaggguggacgcagaggacggucaauacgaugugauguuuauugguaccgauguugggacaguacugaagguugugucuauuccuaaggaaaccugguacgaccuggaagaagugcuacuggaagagaugacgguguuuagggaacccaccgcaauaucagcgauggagcuuucuacuaaacaacagcaauuauacauagggaguacugcugguguagcccagcuaccacugcacagaugcgacaucuacgggaaagcaugcgcagaguguugucucgcccgugauccauauugcgcaugggacggcagugcauguucaagauacuuuccuacugccaagcgucguacgagaagacaagacauaagaaacggcgacccacugacucacuguagcgacuugcaccacgauaaucaccacggacauagcccagaggagaggauuauuuauggcguagaaaacucgagcaccuuucuggaguguuccccuaaaucccaaagagcucucguguauuggcaauuucagaggaggaacgaagaacggaaagaggagauucgcgucgacgaccacauuauccguacagaucagggucuacuucuaaggagucugcaacaaaaagauagugggaacuaucugugccacgccgucgaacauggauucauccagacacugcugaaagucacguuggaggugauugacacugaacauuuagaagaguugcuccacaaagacgaugauggggacggcaguaagaccaaagagaugagcaauucuaugaccccgucacaaaagguuugguaccgcgauuuuaugcaguuaauuaaucacccaaacuuaaacacaauggacgaauuuugugaacagguguggaagagagauagaaaacagaggagacaaaggccaggacauacccccggaaacagcaauaaguggaagcaucuucaggaaaauaagaaaggaagaaaccgucgcacacacgaguuugagcgcgcaccaagaagcguguag

SEQ ID NO: 289937 - protein, 123 aa, Artificial Sequence
  derived and/or modified sequence
MADPQSCFMTRQKPGNTFASEGSLNTAGRPGVGKRQVAPVAGVARKGRRIWGSRMIDIQTRMAGRALELLYLPENKPCYLLDIGCGTGLSGSYLSDEGHYWVGLDISPAMLGPGIPSCPAAVP

SEQ ID NO: 289938 - protein, 1483 aa, Artificial Sequence
  derived and/or modified sequence
MLCVAGARLKRELDATATVLANRQDESEQSRKRLIEQSREFKKNTPEDLRKQVAPLLKSFQGEIDALSKRSKEAEAAFLNVYKRLIDVPDPVPALDLGQQLQLKVQRLHDIETENQKLRETLEEYNKEFAEVKNQEVTIKALKEKIREYEQTLKNQAETIALEKEQKLQNDFAEKERKLQETQMSTTSKLEEAEHKVQSLQTALEKTRTELFDLKTKYDEETTAKADEIEMIMTDLERANQRAEVAQREAETLREQLSSANHSLQLASQIQKAPDVEQAIEVLTRSSLEVELAAKEREIAQLVEDVQRLQASLTKLRENSASQISQLEQQLSAKNSTLKQLEEKLKGQADYEEVKKELNILKSMEFAPSEGAGTQDAAKPLEVLLLEKNRSLQSENAALRISNSDLSGSARRKGKDQPESRRPGSLPAPPPSQLPRNPGEQASNTNGTHQFSPAGLSQDFFSSSLASPSLPLASTGKFALNSLLQRQLMQSFYSKAMQEAGSTSMIFSTGPYSTNSISSQSPLQQSPDVNGMAPSPSQSESAGSVSEGEEMDTAEIARQVKEQLIKHNIGQRIFGHYVLGLSQGSVSEILARPKPWNKLTVRGKEPFHKMKQFLSDEQNILALRSIQGRQRGNITTRIRASETGSDEAIKSILEQAKRELQVQKTAEPAQPSSASGSGNSDDAIRSILQQARREMEAQQAALDPALKQAPLSQSDITILTPKLLSTSPMPTVSSYPPLAISLKKPSAAPEAGASALPNPPALKKEAQDAPGLDPQGAADCAQGVLRQVKNEVGRSGAWKDHWWSAVQPERRNAASSEEAKAEETGGGKEKGSGGSGGGSQPRAERSQLQGPSSSEYWKEWPSAESPYSQSSELSLTGASRSETPQNSPLPSSPIVPMSKPTKPSVPPLTPEQYEVYMYQEVDTIELTRQVKEKLAKNGICQRIFGEKVLGLSQGSVSDMLSRPKPWSKLTQKGREPFIRMQLWLNGELGQGVLPVQGQQQGPVLHSVTSLQDPLQQGCVSSESTPKTSASCSPAPESPMSSSESVKSLTELVQQPCPPIEASKDSKPPEPSDPPASDSQPTTPLPLSGHSALSIQELVAMSPELDTYGITKRVKEVLTDNNLGQRLFGETILGLTQGSVSDLLARPKPWHKLSLKGREPFVRMQLWLNDPNNVEKLMDMKRMEKKAYMKRRHSSVSDSQPCEPPSVGTEYSQGASPQPQHQLKKPRVVLAPEEKEALKRAYQQKPYPSPKTIEDLATQLNLKTSTVINWFHNYRSRIRRELFIEEIQAGSQGQAGASDSPSARSGRAAPSSEGDSCDGVEATEGPGSADTEEPKSQGEAEREEVPRPAEQTEPPPSGTPGPDDARDDDHEGGPVEGPGPLPSPASATATAAPAAPEDAATSAAAAPGEGPAAPSSAPPPSNSSSSSAPRRPSSLQSLFGLPEAAGARDSRDNPLRKKKAANLNSIIHRLEKAASREEPIEWEF

SEQ ID NO: 289939 - protein, 1449 aa, Artificial Sequence
  derived and/or modified sequence
MLCVAGARLKRELDATATVLANRQDESEQSRKRLIEQSREFKKNTPEDLRKQVAPLLKSFQGEIDALSKRSKEAEAAFLNVYKRLIDVPDPVPALDLGQQLQLKVQRLHDIETENQKLRETLEEYNKEFAEVKNQEVTIKALKEKIREYEQTLKNQAETIALEKEQKLQNDFAEKERKLQETQMSTTSKLEEAEHKVQSLQTALEKTRTELFDLKTKYDEETTAKADEIEMIMTDLERANQRAEVAQREAETLREQLSSANHSLQLASQIQKAPDVEQAIEVLTRSSLEVELAAKEREIAQLVEDVQRLQASLTKLRENSASQISQLEQQLSAKNSTLKQLEEKLKGQADYEEVKKELNILKSMEFAPSEGAGTQDAAKPLEVLLLEKNRSLQSENAALRISNSDLSGSARRKGKDQPESRRPGSLPAPPPSQLPRNPGEQASNTNGTHQFSPAGLSQDFFSSSLASPSLPLASTGKFALNSLLQRQLMQSFYSKAMQEAGSTSMIFSTGPYSTNSISSQSPLQQSPDVNGMAPSPSQSESAGSVSEGEEMDTAEIARQVKEQLIKHNIGQRIFGHYVLGLSQGSVSEILARPKPWNKLTVRGKEPFHKMKQFLSDEQNILALRSIQGRQRAEPAQPSSASGSGNSDDAIRSILQQARREMEAQQAALDPALKQAPLSQSDITILTPKLLSTSPMPTVSSYPPLAISLKKPSAAPEAGASALPNPPALKKEAQDAPGLDPQGAADCAQGVLRQVKNEVGRSGAWKDHWWSAVQPERRNAASSEEAKAEETGGGKEKGSGGSGGGSQPRAERSQLQGPSSSEYWKEWPSAESPYSQSSELSLTGASRSETPQNSPLPSSPIVPMSKPTKPSVPPLTPEQYEVYMYQEVDTIELTRQVKEKLAKNGICQRIFGEKVLGLSQGSVSDMLSRPKPWSKLTQKGREPFIRMQLWLNGELGQGVLPVQGQQQGPVLHSVTSLQDPLQQGCVSSESTPKTSASCSPAPESPMSSSESVKSLTELVQQPCPPIEASKDSKPPEPSDPPASDSQPTTPLPLSGHSALSIQELVAMSPELDTYGITKRVKEVLTDNNLGQRLFGETILGLTQGSVSDLLARPKPWHKLSLKGREPFVRMQLWLNDPNNVEKLMDMKRMEKKAYMKRRHSSVSDSQPCEPPSVGTEYSQGASPQPQHQLKKPRVVLAPEEKEALKRAYQQKPYPSPKTIEDLATQLNLKTSTVINWFHNYRSRIRRELFIEEIQAGSQGQAGASDSPSARSGRAAPSSEGDSCDGVEATEGPGSADTEEPKSQGEAEREEVPRPAEQTEPPPSGTPGPDDARDDDHEGGPVEGPGPLPSPASATATAAPAAPEDAATSAAAAPGEGPAAPSSAPPPSNSSSSSAPRRPSSLQSLFGLPEAAGARDSRDNPLRKKKAANLNSIIHRLEKAASREEPIEWEF

SEQ ID NO: 289940 - DNA, 4452 bp, Artificial Sequence
  derived and/or modified sequence
atgttgtgcgtagccggagccaggttgaagagagaactcgatgccaccgcaacggtattggcgaaccggcaggatgaaagtgagcagtccagaaagcggcttatcgaacagagccgggagttcaagaagaacactccagaggatttgcgcaagcaggtagcgccgctgctgaagagtttccaaggagagattgatgcactgagtaaaagaagcaaggaagctgaagcagctttcttgaatgtctacaaaagattgattgacgtcccagatcccgtaccagctttggatctcggacagcaactccagctcaaagtgcagcgcctgcacgatattgaaacagagaaccagaaacttagggaaactctggaagaatacaacaaggaatttgctgaagtgaaaaatcaagaggttacgataaaagcacttaaagagaaaatccgagaatatgaacagacactgaagaaccaagccgaaaccatagctcttgagaaggaacagaagttacagaatgactttgcagaaaaggagagaaagctgcaggagacacagatgtccaccacctcaaagctggaggaagctgagcataaggttcagagcctacaaacagccctggaaaaaactcgaacagaattatttgacctgaaaaccaaatacgatgaagaaactactgcaaaggccgacgagattgaaatgatcatgacggaccttgaaagggcaaaccagagggcagaggtggctcagagagaggcggagaccttaagggaacagctctcatcggccaatcactccctccagctggcctcacagatccagaaggcaccagacgtggagcaggccatagaggtgctgacccgctccagcctagaagttgagttggccgccaaggagcgggagatcgcacagctggtggaggacgtgcagagactccaggccagcctcaccaagctgcgggagaattcggccagccagatctcacagcttgagcagcagctgagcgccaaaaacagcacactcaaacaactggaagaaaaactcaaaggccaggctgactatgaagaggtgaagaaagagctgaacattctgaagtccatggagtttgcaccgtccgagggcgctgggacacaggatgcggccaagcccctggaggtgctgttgctggagaagaaccgctcgctgcagtccgagaacgccgcgctgcgcatctccaacagcgacctgagcgggtcagccaggaggaaagggaaagaccagcctgaaagtcggcgcccgggatctttgccggccccccctccttctcagttgccccgcaacccgggggagcaggcttccaatactaatggtacacaccagttctcaccagcggggttaagtcaagactttttcagctcatccctggcaagccccagcctacccctggcttctacaggaaaatttgcactaaactctcttctccagcggcagctaatgcagtccttctactccaaggctatgcaggaagccggaagcacaagcatgattttttcaacaggtccatacagcacaaactccatatcttcccaaagtccattacaacaaagcccagatgtcaatggcatggccccatcccccagccagtcagaaagtgctgggagcgtctccgagggcgaggagatggacactgcagaaatcgcccggcaggtcaaagagcagctgattaagcacaatatcggacaacgtattttcggacattatgtgttgggactgtctcaagggtccgtgagcgagattctggcccggcccaagccatggaataaactgactgttcgtggcaaggagccatttcacaagatgaaacagttcctctccgatgagcagaacatcctggccctccgtagcatccaaggcagacaaagaggtaacatcaccacccggatccgagcctcggagactggctctgatgaagccatcaagtccatcctagagcaagccaagagggagctccaagtgcagaaaactgcagagccggcccagccttcctccgcatccggcagcgggaactctgatgacgccatccgctccatcctgcagcaagcccgccgggagatggaggcccagcaggctgccctcgaccctgccttaaagcaggcaccactgtcccagagtgacatcaccatcctcacccccaagcttctgtccacctcgcccatgcccaccgtgtccagctacccacctctcgccatctccctgaagaagccctccgcagctcctgaggccggtgcctctgctctgccgaaccccccggccctcaaaaaggaggcccaggacgcccccgggctggacccccagggagcagccgattgtgcacaaggggtcctgagacaggtgaaaaatgaggtgggccgcagcggtgcctggaaggaccactggtggagcgcggtgcagccggagagaagaaatgccgcctcctccgaggaggccaaggccgaagaaacgggcggcgggaaagagaagggcagcggtggcagcggaggtggcagccagcctcgggccgagcgcagtcagctccagggaccctcgtcgtcagagtactggaaggagtggcccagcgctgagtccccatactcccagagctcagagctgagtctgaccggggccagccgcagcgagacaccacagaacagccccctgccatcctccccgatcgtgcccatgtccaagcccaccaagccctcggtccccccgctgacccccgagcagtacgaggtctacatgtaccaggaggtggacaccatcgagctcacccggcaggttaaggaaaagctggccaagaacggcatctgccagagaatcttcggggagaaggtgctgggcctgtcccagggcagcgtcagcgacatgctgtcccgaccgaagccatggagcaagctgacgcagaaaggccgagaacccttcatccggatgcagctctggctgaacggcgagctaggccagggtgttctacccgtccagggccagcagcaagggccagtcctccactccgtgacatcgctccaggacccgctgcagcagggctgtgtgagctcagaaagcactccaaagacctccgccagctgcagccctgcccctgagtccccgatgagttccagtgagtcggtgaagagcctgaccgagctggtccagcagccctgtccccccatcgaggcgagcaaggacagcaagccaccagagcccagtgacccgccagcatccgactcccagcccacaaccccgctgcctctctccggacactcggccctcagcatccaagaattagtagccatgtccccggagctggacacctacggcataaccaagcgggtgaaggaggtgctgacggacaacaacctcggccagcgcttatttggggagaccatcttagggctcacccaaggctctgtctctgacctccttgcccgccccaaaccctggcataagctcagtctgaaaggacgagagcccttcgtccggatgcagctgtggctgaacgaccccaacaatgtggagaagctgatggacatgaaacggatggagaagaaagcctacatgaagcggcggcacagctcagtcagtgacagccagccctgcgaaccgccctctgtcggcaccgagtacagccagggcgccagcccccagccccagcaccagctgaagaaaccccgggtggtgctggctccggaggagaaggaggcgctgaaacgagcgtatcagcaaaagccatacccgtcaccaaaaaccatcgaagacctcgccacccagctcaacctgaaaaccagcaccgtcatcaactggttccacaactacaggtctcggatccgcagagaactgttcattgaggaaattcaggccgggagtcagggccaggcgggcgccagcgactcaccctcggcccgcagcggccgggcggcgcccagctcggagggcgacagctgcgacggcgtggaggccactgagggcccaggcagcgccgacaccgaggagcccaagtctcagggagaggccgagcgggaggaggtgccgcggccggcggagcagacggagccgccgccctcggggaccccgggcccggacgacgcccgcgacgacgaccacgagggaggccccgtggaaggcccggggcccctgcccagccccgcctccgcgaccgccaccgccgcgcccgcggcccccgaggacgccgctacctcagccgccgccgcgccgggggagggccccgcggccccgagctccgcgccgccgcccagcaacagcagcagcagcagcgccccccgcaggcccagctcgctgcagagccttttcggcctccccgaggccgcgggcgcccgggactcgcgcgacaaccccctgcgcaagaagaaggccgcgaacttgaacagcatcatccaccgcctggagaaggccgccagccgggaggaacctatcgaatgggagttctga

SEQ ID NO: 289941 - DNA, 4350 bp, Artificial Sequence
  derived and/or modified sequence
atgttgtgcgtagccggagccaggttgaagagagaactcgatgccaccgcaacggtattggcgaaccggcaggatgaaagtgagcagtccagaaagcggcttatcgaacagagccgggagttcaagaagaacactccagaggatttgcgcaagcaggtagcgccgctgctgaagagtttccaaggagagattgatgcactgagtaaaagaagcaaggaagctgaagcagctttcttgaatgtctacaaaagattgattgacgtcccagatcccgtaccagctttggatctcggacagcaactccagctcaaagtgcagcgcctgcacgatattgaaacagagaaccagaaacttagggaaactctggaagaatacaacaaggaatttgctgaagtgaaaaatcaagaggttacgataaaagcacttaaagagaaaatccgagaatatgaacagacactgaagaaccaagccgaaaccatagctcttgagaaggaacagaagttacagaatgactttgcagaaaaggagagaaagctgcaggagacacagatgtccaccacctcaaagctggaggaagctgagcataaggttcagagcctacaaacagccctggaaaaaactcgaacagaattatttgacctgaaaaccaaatacgatgaagaaactactgcaaaggccgacgagattgaaatgatcatgacggaccttgaaagggcaaaccagagggcagaggtggctcagagagaggcggagaccttaagggaacagctctcatcggccaatcactccctccagctggcctcacagatccagaaggcaccagacgtggagcaggccatagaggtgctgacccgctccagcctagaagttgagttggccgccaaggagcgggagatcgcacagctggtggaggacgtgcagagactccaggccagcctcaccaagctgcgggagaattcggccagccagatctcacagcttgagcagcagctgagcgccaaaaacagcacactcaaacaactggaagaaaaactcaaaggccaggctgactatgaagaggtgaagaaagagctgaacattctgaagtccatggagtttgcaccgtccgagggcgctgggacacaggatgcggccaagcccctggaggtgctgttgctggagaagaaccgctcgctgcagtccgagaacgccgcgctgcgcatctccaacagcgacctgagcgggtcagccaggaggaaagggaaagaccagcctgaaagtcggcgcccgggatctttgccggccccccctccttctcagttgccccgcaacccgggggagcaggcttccaatactaatggtacacaccagttctcaccagcggggttaagtcaagactttttcagctcatccctggcaagccccagcctacccctggcttctacaggaaaatttgcactaaactctcttctccagcggcagctaatgcagtccttctactccaaggctatgcaggaagccggaagcacaagcatgattttttcaacaggtccatacagcacaaactccatatcttcccaaagtccattacaacaaagcccagatgtcaatggcatggccccatcccccagccagtcagaaagtgctgggagcgtctccgagggcgaggagatggacactgcagaaatcgcccggcaggtcaaagagcagctgattaagcacaatatcggacaacgtattttcggacattatgtgttgggactgtctcaagggtccgtgagcgagattctggcccggcccaagccatggaataaactgactgttcgtggcaaggagccatttcacaagatgaaacagttcctctccgatgagcagaacatcctggccctccgtagcatccaaggcagacaaagagcagagccggcccagccttcctccgcatccggcagcgggaactctgatgacgccatccgctccatcctgcagcaagcccgccgggagatggaggcccagcaggctgccctcgaccctgccttaaagcaggcaccactgtcccagagtgacatcaccatcctcacccccaagcttctgtccacctcgcccatgcccaccgtgtccagctacccacctctcgccatctccctgaagaagccctccgcagctcctgaggccggtgcctctgctctgccgaaccccccggccctcaaaaaggaggcccaggacgcccccgggctggacccccagggagcagccgattgtgcacaaggggtcctgagacaggtgaaaaatgaggtgggccgcagcggtgcctggaaggaccactggtggagcgcggtgcagccggagagaagaaatgccgcctcctccgaggaggccaaggccgaagaaacgggcggcgggaaagagaagggcagcggtggcagcggaggtggcagccagcctcgggccgagcgcagtcagctccagggaccctcgtcgtcagagtactggaaggagtggcccagcgctgagtccccatactcccagagctcagagctgagtctgaccggggccagccgcagcgagacaccacagaacagccccctgccatcctccccgatcgtgcccatgtccaagcccaccaagccctcggtccccccgctgacccccgagcagtacgaggtctacatgtaccaggaggtggacaccatcgagctcacccggcaggttaaggaaaagctggccaagaacggcatctgccagagaatcttcggggagaaggtgctgggcctgtcccagggcagcgtcagcgacatgctgtcccgaccgaagccatggagcaagctgacgcagaaaggccgagaacccttcatccggatgcagctctggctgaacggcgagctaggccagggtgttctacccgtccagggccagcagcaagggccagtcctccactccgtgacatcgctccaggacccgctgcagcagggctgtgtgagctcagaaagcactccaaagacctccgccagctgcagccctgcccctgagtccccgatgagttccagtgagtcggtgaagagcctgaccgagctggtccagcagccctgtccccccatcgaggcgagcaaggacagcaagccaccagagcccagtgacccgccagcatccgactcccagcccacaaccccgctgcctctctccggacactcggccctcagcatccaagaattagtagccatgtccccggagctggacacctacggcataaccaagcgggtgaaggaggtgctgacggacaacaacctcggccagcgcttatttggggagaccatcttagggctcacccaaggctctgtctctgacctccttgcccgccccaaaccctggcataagctcagtctgaaaggacgagagcccttcgtccggatgcagctgtggctgaacgaccccaacaatgtggagaagctgatggacatgaaacggatggagaagaaagcctacatgaagcggcggcacagctcagtcagtgacagccagccctgcgaaccgccctctgtcggcaccgagtacagccagggcgccagcccccagccccagcaccagctgaagaaaccccgggtggtgctggctccggaggagaaggaggcgctgaaacgagcgtatcagcaaaagccatacccgtcaccaaaaaccatcgaagacctcgccacccagctcaacctgaaaaccagcaccgtcatcaactggttccacaactacaggtctcggatccgcagagaactgttcattgaggaaattcaggccgggagtcagggccaggcgggcgccagcgactcaccctcggcccgcagcggccgggcggcgcccagctcggagggcgacagctgcgacggcgtggaggccactgagggcccaggcagcgccgacaccgaggagcccaagtctcagggagaggccgagcgggaggaggtgccgcggccggcggagcagacggagccgccgccctcggggaccccgggcccggacgacgcccgcgacgacgaccacgagggaggccccgtggaaggcccggggcccctgcccagccccgcctccgcgaccgccaccgccgcgcccgcggcccccgaggacgccgctacctcagccgccgccgcgccgggggagggccccgcggccccgagctccgcgccgccgcccagcaacagcagcagcagcagcgccccccgcaggcccagctcgctgcagagccttttcggcctccccgaggccgcgggcgcccgggactcgcgcgacaaccccctgcgcaagaagaaggccgcgaacttgaacagcatcatccaccgcctggagaaggccgccagccgggaggaacctatcgaatgggagttctga

SEQ ID NO: 289942 - DNA, 4452 bp, Artificial Sequence
  derived and/or modified sequence
atgctgtgcgtggccggcgccagactgaagagagagctggacgccaccgccaccgtgctggccaacagacaggacgagagcgagcagagcagaaagagactgatcgagcagagcagagagttcaagaagaacacccccgaggacctgagaaagcaggtggcccccctgctgaagagcttccagggcgagatcgacgccctgagcaagagaagcaaggaggccgaggccgccttcctgaacgtgtacaagagactgatcgacgtgcccgaccccgtgcccgccctggacctgggccagcagctgcagctgaaggtgcagagactgcacgacatcgagaccgagaaccagaagctgagagagaccctggaggagtacaacaaggagttcgccgaggtgaagaaccaggaggtgaccatcaaggccctgaaggagaagatcagagagtacgagcagaccctgaagaaccaggccgagaccatcgccctggagaaggagcagaagctgcagaacgacttcgccgagaaggagagaaagctgcaggagacccagatgagcaccaccagcaagctggaggaggccgagcacaaggtgcagagcctgcagaccgccctggagaagaccagaaccgagctgttcgacctgaagaccaagtacgacgaggagaccaccgccaaggccgacgagatcgagatgatcatgaccgacctggagagagccaaccagagagccgaggtggcccagagagaggccgagaccctgagagagcagctgagcagcgccaaccacagcctgcagctggccagccagatccagaaggcccccgacgtggagcaggccatcgaggtgctgaccagaagcagcctggaggtggagctggccgccaaggagagagagatcgcccagctggtggaggacgtgcagagactgcaggccagcctgaccaagctgagagagaacagcgccagccagatcagccagctggagcagcagctgagcgccaagaacagcaccctgaagcagctggaggagaagctgaagggccaggccgactacgaggaggtgaagaaggagctgaacatcctgaagagcatggagttcgcccccagcgagggcgccggcacccaggacgccgccaagcccctggaggtgctgctgctggagaagaacagaagcctgcagagcgagaacgccgccctgagaatcagcaacagcgacctgagcggcagcgccagaagaaagggcaaggaccagcccgagagcagaagacccggcagcctgcccgcccccccccccagccagctgcccagaaaccccggcgagcaggccagcaacaccaacggcacccaccagttcagccccgccggcctgagccaggacttcttcagcagcagcctggccagccccagcctgcccctggccagcaccggcaagttcgccctgaacagcctgctgcagagacagctgatgcagagcttctacagcaaggccatgcaggaggccggcagcaccagcatgatcttcagcaccggcccctacagcaccaacagcatcagcagccagagccccctgcagcagagccccgacgtgaacggcatggcccccagccccagccagagcgagagcgccggcagcgtgagcgagggcgaggagatggacaccgccgagatcgccagacaggtgaaggagcagctgatcaagcacaacatcggccagagaatcttcggccactacgtgctgggcctgagccagggcagcgtgagcgagatcctggccagacccaagccctggaacaagctgaccgtgagaggcaaggagcccttccacaagatgaagcagttcctgagcgacgagcagaacatcctggccctgagaagcatccagggcagacagagaggcaacatcaccaccagaatcagagccagcgagaccggcagcgacgaggccatcaagagcatcctggagcaggccaagagagagctgcaggtgcagaagaccgccgagcccgcccagcccagcagcgccagcggcagcggcaacagcgacgacgccatcagaagcatcctgcagcaggccagaagagagatggaggcccagcaggccgccctggaccccgccctgaagcaggcccccctgagccagagcgacatcaccatcctgacccccaagctgctgagcaccagccccatgcccaccgtgagcagctacccccccctggccatcagcctgaagaagcccagcgccgcccccgaggccggcgccagcgccctgcccaacccccccgccctgaagaaggaggcccaggacgcccccggcctggacccccagggcgccgccgactgcgcccagggcgtgctgagacaggtgaagaacgaggtgggcagaagcggcgcctggaaggaccactggtggagcgccgtgcagcccgagagaagaaacgccgccagcagcgaggaggccaaggccgaggagaccggcggcggcaaggagaagggcagcggcggcagcggcggcggcagccagcccagagccgagagaagccagctgcagggccccagcagcagcgagtactggaaggagtggcccagcgccgagagcccctacagccagagcagcgagctgagcctgaccggcgccagcagaagcgagaccccccagaacagccccctgcccagcagccccatcgtgcccatgagcaagcccaccaagcccagcgtgccccccctgacccccgagcagtacgaggtgtacatgtaccaggaggtggacaccatcgagctgaccagacaggtgaaggagaagctggccaagaacggcatctgccagagaatcttcggcgagaaggtgctgggcctgagccagggcagcgtgagcgacatgctgagcagacccaagccctggagcaagctgacccagaagggcagagagcccttcatcagaatgcagctgtggctgaacggcgagctgggccagggcgtgctgcccgtgcagggccagcagcagggccccgtgctgcacagcgtgaccagcctgcaggaccccctgcagcagggctgcgtgagcagcgagagcacccccaagaccagcgccagctgcagccccgcccccgagagccccatgagcagcagcgagagcgtgaagagcctgaccgagctggtgcagcagccctgcccccccatcgaggccagcaaggacagcaagccccccgagcccagcgacccccccgccagcgacagccagcccaccacccccctgcccctgagcggccacagcgccctgagcatccaggagctggtggccatgagccccgagctggacacctacggcatcaccaagagagtgaaggaggtgctgaccgacaacaacctgggccagagactgttcggcgagaccatcctgggcctgacccagggcagcgtgagcgacctgctggccagacccaagccctggcacaagctgagcctgaagggcagagagcccttcgtgagaatgcagctgtggctgaacgaccccaacaacgtggagaagctgatggacatgaagagaatggagaagaaggcctacatgaagagaagacacagcagcgtgagcgacagccagccctgcgagccccccagcgtgggcaccgagtacagccagggcgccagcccccagccccagcaccagctgaagaagcccagagtggtgctggcccccgaggagaaggaggccctgaagagagcctaccagcagaagccctaccccagccccaagaccatcgaggacctggccacccagctgaacctgaagaccagcaccgtgatcaactggttccacaactacagaagcagaatcagaagagagctgttcatcgaggagatccaggccggcagccagggccaggccggcgccagcgacagccccagcgccagaagcggcagagccgcccccagcagcgagggcgacagctgcgacggcgtggaggccaccgagggccccggcagcgccgacaccgaggagcccaagagccagggcgaggccgagagagaggaggtgcccagacccgccgagcagaccgagcccccccccagcggcacccccggccccgacgacgccagagacgacgaccacgagggcggccccgtggagggccccggccccctgcccagccccgccagcgccaccgccaccgccgcccccgccgcccccgaggacgccgccaccagcgccgccgccgcccccggcgagggccccgccgcccccagcagcgcccccccccccagcaacagcagcagcagcagcgcccccagaagacccagcagcctgcagagcctgttcggcctgcccgaggccgccggcgccagagacagcagagacaaccccctgagaaagaagaaggccgccaacctgaacagcatcatccacagactggagaaggccgccagcagagaggagcccatcgagtgggagttctag

SEQ ID NO: 289943 - DNA, 4350 bp, Artificial Sequence
  derived and/or modified sequence
atgctgtgcgtggccggcgccagactgaagagagagctggacgccaccgccaccgtgctggccaacagacaggacgagagcgagcagagcagaaagagactgatcgagcagagcagagagttcaagaagaacacccccgaggacctgagaaagcaggtggcccccctgctgaagagcttccagggcgagatcgacgccctgagcaagagaagcaaggaggccgaggccgccttcctgaacgtgtacaagagactgatcgacgtgcccgaccccgtgcccgccctggacctgggccagcagctgcagctgaaggtgcagagactgcacgacatcgagaccgagaaccagaagctgagagagaccctggaggagtacaacaaggagttcgccgaggtgaagaaccaggaggtgaccatcaaggccctgaaggagaagatcagagagtacgagcagaccctgaagaaccaggccgagaccatcgccctggagaaggagcagaagctgcagaacgacttcgccgagaaggagagaaagctgcaggagacccagatgagcaccaccagcaagctggaggaggccgagcacaaggtgcagagcctgcagaccgccctggagaagaccagaaccgagctgttcgacctgaagaccaagtacgacgaggagaccaccgccaaggccgacgagatcgagatgatcatgaccgacctggagagagccaaccagagagccgaggtggcccagagagaggccgagaccctgagagagcagctgagcagcgccaaccacagcctgcagctggccagccagatccagaaggcccccgacgtggagcaggccatcgaggtgctgaccagaagcagcctggaggtggagctggccgccaaggagagagagatcgcccagctggtggaggacgtgcagagactgcaggccagcctgaccaagctgagagagaacagcgccagccagatcagccagctggagcagcagctgagcgccaagaacagcaccctgaagcagctggaggagaagctgaagggccaggccgactacgaggaggtgaagaaggagctgaacatcctgaagagcatggagttcgcccccagcgagggcgccggcacccaggacgccgccaagcccctggaggtgctgctgctggagaagaacagaagcctgcagagcgagaacgccgccctgagaatcagcaacagcgacctgagcggcagcgccagaagaaagggcaaggaccagcccgagagcagaagacccggcagcctgcccgcccccccccccagccagctgcccagaaaccccggcgagcaggccagcaacaccaacggcacccaccagttcagccccgccggcctgagccaggacttcttcagcagcagcctggccagccccagcctgcccctggccagcaccggcaagttcgccctgaacagcctgctgcagagacagctgatgcagagcttctacagcaaggccatgcaggaggccggcagcaccagcatgatcttcagcaccggcccctacagcaccaacagcatcagcagccagagccccctgcagcagagccccgacgtgaacggcatggcccccagccccagccagagcgagagcgccggcagcgtgagcgagggcgaggagatggacaccgccgagatcgccagacaggtgaaggagcagctgatcaagcacaacatcggccagagaatcttcggccactacgtgctgggcctgagccagggcagcgtgagcgagatcctggccagacccaagccctggaacaagctgaccgtgagaggcaaggagcccttccacaagatgaagcagttcctgagcgacgagcagaacatcctggccctgagaagcatccagggcagacagagagccgagcccgcccagcccagcagcgccagcggcagcggcaacagcgacgacgccatcagaagcatcctgcagcaggccagaagagagatggaggcccagcaggccgccctggaccccgccctgaagcaggcccccctgagccagagcgacatcaccatcctgacccccaagctgctgagcaccagccccatgcccaccgtgagcagctacccccccctggccatcagcctgaagaagcccagcgccgcccccgaggccggcgccagcgccctgcccaacccccccgccctgaagaaggaggcccaggacgcccccggcctggacccccagggcgccgccgactgcgcccagggcgtgctgagacaggtgaagaacgaggtgggcagaagcggcgcctggaaggaccactggtggagcgccgtgcagcccgagagaagaaacgccgccagcagcgaggaggccaaggccgaggagaccggcggcggcaaggagaagggcagcggcggcagcggcggcggcagccagcccagagccgagagaagccagctgcagggccccagcagcagcgagtactggaaggagtggcccagcgccgagagcccctacagccagagcagcgagctgagcctgaccggcgccagcagaagcgagaccccccagaacagccccctgcccagcagccccatcgtgcccatgagcaagcccaccaagcccagcgtgccccccctgacccccgagcagtacgaggtgtacatgtaccaggaggtggacaccatcgagctgaccagacaggtgaaggagaagctggccaagaacggcatctgccagagaatcttcggcgagaaggtgctgggcctgagccagggcagcgtgagcgacatgctgagcagacccaagccctggagcaagctgacccagaagggcagagagcccttcatcagaatgcagctgtggctgaacggcgagctgggccagggcgtgctgcccgtgcagggccagcagcagggccccgtgctgcacagcgtgaccagcctgcaggaccccctgcagcagggctgcgtgagcagcgagagcacccccaagaccagcgccagctgcagccccgcccccgagagccccatgagcagcagcgagagcgtgaagagcctgaccgagctggtgcagcagccctgcccccccatcgaggccagcaaggacagcaagccccccgagcccagcgacccccccgccagcgacagccagcccaccacccccctgcccctgagcggccacagcgccctgagcatccaggagctggtggccatgagccccgagctggacacctacggcatcaccaagagagtgaaggaggtgctgaccgacaacaacctgggccagagactgttcggcgagaccatcctgggcctgacccagggcagcgtgagcgacctgctggccagacccaagccctggcacaagctgagcctgaagggcagagagcccttcgtgagaatgcagctgtggctgaacgaccccaacaacgtggagaagctgatggacatgaagagaatggagaagaaggcctacatgaagagaagacacagcagcgtgagcgacagccagccctgcgagccccccagcgtgggcaccgagtacagccagggcgccagcccccagccccagcaccagctgaagaagcccagagtggtgctggcccccgaggagaaggaggccctgaagagagcctaccagcagaagccctaccccagccccaagaccatcgaggacctggccacccagctgaacctgaagaccagcaccgtgatcaactggttccacaactacagaagcagaatcagaagagagctgttcatcgaggagatccaggccggcagccagggccaggccggcgccagcgacagccccagcgccagaagcggcagagccgcccccagcagcgagggcgacagctgcgacggcgtggaggccaccgagggccccggcagcgccgacaccgaggagcccaagagccagggcgaggccgagagagaggaggtgcccagacccgccgagcagaccgagcccccccccagcggcacccccggccccgacgacgccagagacgacgaccacgagggcggccccgtggagggccccggccccctgcccagccccgccagcgccaccgccaccgccgcccccgccgcccccgaggacgccgccaccagcgccgccgccgcccccggcgagggccccgccgcccccagcagcgcccccccccccagcaacagcagcagcagcagcgcccccagaagacccagcagcctgcagagcctgttcggcctgcccgaggccgccggcgccagagacagcagagacaaccccctgagaaagaagaaggccgccaacctgaacagcatcatccacagactggagaaggccgccagcagagaggagcccatcgagtgggagttctag

SEQ ID NO: 289944 - DNA, 4452 bp, Artificial Sequence
  derived and/or modified sequence
atgctttgcgtcgcgggggccaggttgaagcgcgagctggacgccaccgccacagtgctggcaaatcgccaggatgagagtgaacaatcccgaaaacggctcatagagcagagtcgggaattcaaaaaaaataccccagaggacctgcggaaacaagtagcaccactgctgaagtctttccagggggaaatcgacgccctgagcaagcgcagcaaggaggctgaagcagccttcctgaacgtctataaacggctgatcgacgtcccagacccggtgccggctcttgacctgggccagcagttgcagcttaaggtgcagaggctgcatgatatcgagacagagaaccaaaagttgcgagagactttagaggaatacaataaggagttcgccgaagtgaagaatcaggaggttacaataaaagccctaaaagaaaagatcagggagtatgaacagaccctcaagaatcaagccgaaactatcgcgctggaaaaagaacagaagctgcagaatgattttgcagagaaggagcgcaagcttcaggagacccagatgtccaccacctctaaactagaggaagccgagcataaggttcagtctcttcagaccgctctggagaagacccgaacggagctgttcgacctcaaaaccaaatatgacgaggaaactactgcgaaagcagacgaaatcgagatgataatgactgacctggaacgagcgaatcagcgcgctgaagtggcgcagcgcgaagctgaaacacttcgggaacagttgagcagtgccaatcattccctgcagcttgcctcccagattcagaaggcgccagacgtggagcaggcgatagaagtgctcactaggagctcactggaggttgaattagcagcgaaagaaagagaaattgctcaactcgtagaggacgttcagaggttacaggcctccctcacgaaattgcgggaaaacagcgcctcacagatctctcagctggagcagcagctctccgccaaaaattcaaccctcaaacagttggaggaaaaactgaaggggcaggctgactatgaggaggtgaagaaggagttgaatatcctgaagagtatggaattcgctccatcggagggagctggaactcaggatgccgcaaagcccctggaagtgcttcttctggagaaaaatagaagtctacaaagtgaaaatgccgcattgaggatatccaacagcgacttgagtggctccgctagaaggaaaggtaaggaccagccggaatccaggcgcccaggctccctcccagcccctccgcccagccaactgccaagaaatccaggcgagcaggcgtctaacaccaacggaacccaccagttttcacctgctggcttgagtcaagacttctttagttcatcgttggcctctccctcattgcctctggcctcaacgggcaagttcgcgcttaacagtctcctccaaaggcagctgatgcaatctttctatagtaaggctatgcaagaggccggaagcactagtatgatcttcagcacaggaccctattcaactaactctatcagtagtcagtcccccctgcagcaatctccagacgttaacggaatggccccgagcccaagtcagtcagaaagcgcaggctctgtttcggagggggaggaaatggacactgcggaaatcgcgaggcaggttaaagaacaattaatcaaacacaatattggacagaggatctttggccattatgttttgggcctgtctcagggctctgtgtctgagatcctcgctagacccaagccctggaacaaacttacagtgagagggaaggagccttttcataagatgaagcagttcctgagcgacgaacagaacatcttagctttaagaagtattcagggaaggcagagaggcaatattacaacaaggatccgagccagcgagacgggatctgatgaagccatcaaatccatccttgaacaggccaaacgggaacttcaggttcagaagactgctgaaccagcccaacctagctctgccagcggttccggcaattccgatgatgccatccggtccatactgcaacaagctagaagggagatggaggcccagcaagccgcactggaccctgctttaaaacaggcaccacttagtcagtctgacatcaccattctgacgcccaagctcctgtccacgagtcctatgcccactgtttcctcgtacccacccctcgcaatctctcttaagaagccaagtgccgccccggaagccggcgcctcagccctgcccaatcctccagctctcaaaaaggaagcacaagacgctcccggtctggatcctcagggcgccgccgattgtgcccagggcgtgctccgccaggtgaagaatgaagtgggtcgctccggggcatggaaagatcactggtggtctgcagtccaacctgagcggcggaacgccgcgtcttctgaggaggcaaaggccgaggagacgggtggcggtaaggaaaaaggatcaggaggcagcggaggcgggtcccagccccgggccgaacgcagtcagctacagggaccgtcctcaagcgaatactggaaagaatggccttctgccgagtccccttactctcagtccagcgagctgagtctgactggcgcttcaagatcggagactccccagaactcacctttacctagttccccaatcgtaccaatgagcaagcccaccaagcccagcgtccctcccctgacaccagagcagtatgaagtgtacatgtaccaggaggtcgacaccatagaactgacgcgccaagtgaaggagaagctggcaaaaaatgggatctgccagcgcatcttcggcgaaaaggtgctgggtctttcccagggcagtgtaagcgacatgctttctcggcctaagccctggtctaagctcactcagaaggggagagagcctttcattcgcatgcaactctggctgaatggtgagctgggccaaggggtcctgcccgttcaagggcaacaacagggacccgtgttgcatagtgtgactagtctccaagatcctctccagcagggttgcgtaagctccgagtcaacacccaaaacttcagccagttgctcccccgcccctgaatcccccatgtcatcctctgaaagcgtgaaatccctgacagagttagtgcagcagccttgtcctccaattgaagcgagcaaggacagcaagcctcccgaaccctcagacccacccgcctccgacagtcagcccaccacccctcttcccctgtccggccactctgccctcagtatccaggagttggtggcaatgtcacccgaactggatacttacggaataacgaagagagtgaaggaagttttgacagacaataatctagggcagcgcctttttggcgaaacgatcctgggcctgacccaaggcagcgtttctgatttgctcgcacgtccaaaaccgtggcataaactctctctgaaggggcgcgagccgttcgtcaggatgcagctatggcttaatgaccctaataatgtcgaaaagcttatggacatgaagcggatggagaagaaggcttatatgaagagacgacacagcagcgtatcagattcacagccatgtgagcctccaagcgtcgggacagagtactcccagggcgcctcacctcagcctcaacaccagcttaagaaacctagggttgttctggcaccagaggagaaggaggcgctgaaacgcgcttatcagcaaaagccatacccgtcaccaaagactatagaggatttggcaactcagctgaatctcaagacttccacagtgatcaattggttccataattaccggagcagaatccggagagagctgttcatagaagaaatacaggctggatctcaaggccaggccggcgcatcggattcaccaagcgcaagaagcgggcgggcagcaccatcctctgaaggtgatagctgtgacggcgtggaagctaccgaaggacccgggagtgccgacacagaggaacctaagagccagggtgaagcagagcgtgaagaagtgccaagacctgccgaacagacagagccccctccaagcgggactcctggcccggatgacgctagagatgacgatcacgaaggcggcccggtcgaaggtcccggcccgctgccctcccctgcctccgccaccgctaccgcagcccccgcggcccccgaagatgccgcaacttccgcggccgctgctccaggggaaggacctgcagctccctcatctgcacctcctccttctaatagtagctcgagtagcgccccgcgacgcccgagctcgttgcagagtctgttcggcttaccagaggcagcgggggctcgggattcacgagacaaccccttacgcaagaaaaaggcagcaaaccttaactcaattatccacagattggaaaaagccgcctcgagagaggaaccaatcgagtgggaattttag

SEQ ID NO: 289945 - DNA, 4350 bp, Artificial Sequence
  derived and/or modified sequence
atgctctgtgtagctggggccagattgaaaagagagctggacgctactgctaccgttctggctaacagacaggacgaatcagagcagtcacgaaaaaggctgatcgaacagtccagggaatttaagaagaatacacccgaggatctccgtaagcaggtggcacccctcttgaaaagttttcaaggggaaattgatgctctaagtaagagatcaaaagaagctgaggccgcatttttgaacgtctataagcgcctgatcgatgtccctgaccccgtgcctgcactggatcttgggcagcagctccagctaaaagtgcaacgcctgcatgacattgaaacagaaaatcagaagctgagggagaccctcgaggagtataacaaggaattcgcagaggtgaaaaaccaggaggtgaccatcaaagctttgaaggaaaagattagggagtatgaacagacactcaagaatcaagccgagaccattgccctggagaaggagcagaaactccaaaatgactttgcggaaaaagaaagaaaactgcaggaaacgcagatgtcgacgacgagcaagctagaagaggccgaacataaagtgcagtcacttcaaaccgcactggaaaaaacccgaactgagttattcgacttgaagaccaagtatgacgaagagactacagccaaagccgatgaaatcgagatgattatgaccgatctagaaagagccaatcaaagagccgaggtagcgcagcgcgaagccgaaacgttaagagagcagctgtcgtcagccaaccattcactgcagctggcttcccaaatacaaaaggcccccgacgtcgagcaggcaatagaggtgcttactaggtcttctttagaagtggaactggcagccaaggaacgtgagatcgcgcagttagtcgaagatgtgcagcgtctacaagccagtctgactaagctgagggaaaactcagctagtcagatctctcagctggaacagcaactgagcgcaaagaactcaaccttaaagcagctcgaggaaaaattgaaggggcaggcagattatgaagaagtgaagaaggagttgaatattctcaaatctatggaatttgcgccctccgaaggcgccggaacccaagacgctgcgaagcccttggaagtcctgctcttggagaaaaaccgctctctgcagagtgaaaacgcagccctccggatcagtaacagtgatctctccggcagtgcaaggagaaaggggaaggatcagccggaatctagaaggcctgggagcctgcctgctcctcccccaagtcaactgccccggaaccccggagaacaggcctcgaacacaaacggaacccatcagttttccccggccggactgtctcaggatttttttagctcttcacttgccagtccaagtctgcccttggcttcaactgggaagttcgctctgaattccttgttacagagacagcttatgcagtctttctacagtaaagccatgcaggaggccgggagtactagtatgatcttcagcacaggaccctactcgacaaacagcatctcctcacaaagccctttgcagcaaagtccagatgtcaacgggatggccccttcgcccagccagtcagaatcagccggtagcgtgtcagaaggcgaggagatggatactgcagagatcgcaagacaggtcaaggagcagctcataaagcacaacattggacaaagaatcttcggtcactacgtgctaggactgtctcaaggaagtgtgtctgagattctggcacgccccaagccttggaacaaactgactgtgagaggaaaagagcccttccataagatgaaacagtttctgtccgatgagcagaacattctcgcactgaggagcattcaaggacgccagagggctgaacctgcccagccgtctagtgcttccggatccggcaacagtgacgatgccattaggtccattttgcaacaggcaaggcgagaaatggaggcacagcaggccgcgctggaccccgcactgaagcaggctcccttgtctcagagtgatattactatcctcacccccaagctgctctccacctctcccatgcccactgtctccagttatccccccctagctatctctctcaagaagcccagcgccgcccctgaggctggggcgtcggccctgcctaacccaccggctttaaagaaggaggctcaggatgcaccgggcttggatccacagggcgccgctgattgcgcccagggggtacttcggcaggtgaaaaatgaggtggggaggtcaggagcttggaaagatcactggtggagtgcagtgcagcccgaacgcagaaatgcagcctcttcggaggaggccaaggctgaggaaacgggtggcgggaaggaaaagggtagcggaggctctggaggaggttcacagccaagggcagagaggagccagctacagggcccctctagctcggagtattggaaggaatggccctcagctgaaagcccatacagccaatcctctgaactgagtctgactggggcctcacggtccgagactcctcaaaatagtccacttccgagttcaccgatagtccccatgtccaaacctaccaagccaagtgtcccaccactgactcccgaacagtatgaggtgtatatgtaccaggaggtagacaccatcgagctcactagacaggttaaagaaaagctggcaaaaaatggcatttgtcagcgcatctttggagaaaaagtcctggggctgagtcagggttctgtttcagatatgctcagccgtccaaaaccatggagcaaactcactcaaaagggccgagaaccctttattagaatgcaactatggctcaacggtgaactgggacagggcgtgcttcctgtgcagggacaacagcaagggcccgtcctgcatagcgtaacctccctccaggaccccctgcagcaaggctgcgtgtcctctgaatcaacacccaagacatccgccagctgttcccccgcacccgagtctcctatgagttccagtgaatccgtgaaatctctcaccgagctggtgcaacagccctgtccacccatagaggctagcaaagactcaaaaccccctgaacctagcgatccacccgcaagcgattcccaacctacaactcccttgccattatccggccattctgccctgtcaattcaagaactggtcgccatgagccctgaactcgatacatacggaatcacaaagagagtgaaagaagtcttgaccgacaataacctggggcaaagactgttcggtgaaaccattctggggctcacccaaggcagtgtgagtgacctgttagcgcgacctaaaccctggcacaaactgagcttgaaagggagagagccttttgtccgcatgcaactgtggctgaatgatccaaacaatgttgagaagttgatggacatgaagcgcatggagaagaaggcctacatgaagagaagacactcatcggtgagtgatagccagccctgtgaacctcccagtgtcgggacagagtacagccagggtgcatctccacagccccagcaccaattaaaaaaacctcgggtggtgcttgctcccgaggaaaaggaggccttgaagagagcgtatcagcaaaaaccttaccccagccctaaaaccatcgaggacctggccacacaactgaacctcaaaacgtctaccgtcattaattggtttcacaactaccgcagtagaataagacgggaactttttatcgaggagatccaagcagggtcccaaggtcaagccggtgcttcagattctccgagcgccaggagcggacgcgccgctccatcatccgagggggattcatgcgacggagtggaggcaacagaaggcccaggcagtgcagacactgaggagccaaagagccaaggtgaagccgaacgagaagaagtgccacggcctgctgagcagacggagccaccccccagcgggacacccggcccagatgacgcaagggacgatgatcatgaaggagggcctgtcgaagggccaggaccactcccaagccccgcttcagcaacagcaactgccgctccagccgcacctgaagatgctgccactagtgctgcagcagctccgggcgaaggacctgccgcccccagttcagctccacctccctccaacagcagctcaagctccgcaccacgtcgcccatcctccctgcaatcccttttcggccttccagaggccgctggggcaagagattcccgggacaaccctctgcgcaagaagaaagctgcgaatcttaactctattatccatcggttggagaaagccgccagtcgcgaggagcccatcgagtgggagttctag

SEQ ID NO: 289946 - DNA, 4452 bp, Artificial Sequence
  derived and/or modified sequence
atgctgtgtgtggccggggcccggctgaagcgggagctggatgccacagccaccgtgctggccaaccggcaggatgaaagtgagcagagcaggaagaggctgattgagcagagccgggagttcaagaagaacaccccagaggacctgaggaagcaggtggcccccctgctgaagagcttccagggcgagattgatgccctgagcaagaggagcaaggaggccgaggccgccttcctgaatgtgtacaagaggctgattgatgtgcctgaccctgtgcctgccctggacctgggccagcagctgcagctgaaggtgcagaggctgcatgacattgaaacagagaaccagaagctgcgggagaccctggaggagtacaacaaggagtttgctgaggtgaagaaccaggaggtgaccatcaaggccctgaaggagaagatccgggagtatgagcagaccctgaagaaccaggccgagaccatcgccctggagaaggagcagaagctgcagaatgactttgctgagaaggagaggaagctgcaggagacccagatgagcaccaccagcaagctggaggaggccgagcacaaggtgcagagcctgcagacagccctggagaagaccaggacagagctgtttgacctgaagaccaagtatgatgaggagaccacagccaaggcagatgaaattgagatgatcatgacagacctggagcgggccaaccagagagctgaggtggcccagcgggaggccgagaccctgcgggagcagctgagcagcgccaaccacagcctgcagctggccagccagatccagaaggccccagatgtggagcaggccatcgaggtgctgaccaggagcagcctggaggtggagctggccgccaaggagcgggagatcgcccagctggtggaggatgtgcagaggctgcaggccagcctgaccaagctgcgggagaacagcgccagccagatcagccagctggagcagcagctgagcgccaagaacagcaccctgaagcagctggaggagaagctgaagggccaggccgactatgaggaggtgaagaaggagctgaacatcctgaagtccatggagtttgcccccagcgagggcgccggcacccaggatgctgccaagcccctggaggtgctgctgctggagaagaacagaagcctgcagagtgaaaatgctgccctgcgcatcagcaacagcgacctgagcggcagcgcccggaggaagggcaaggaccagcctgagagcagaagacctggcagcctgcctgcccccccacccagccagctgcccaggaaccctggagagcaggccagcaacaccaacggcacccaccagttctccccagctggcctgagccaggacttcttcagcagcagcctggccagccccagcctgcccctggccagcacaggcaagtttgccctgaacagcctgctgcagaggcagctgatgcagagcttctacagcaaggccatgcaggaggccggcagcacctccatgatcttcagcacaggcccctacagcaccaacagcatcagcagccagagccccctgcagcagagcccagatgtgaatggcatggcccccagccccagccagagcgagagcgctggctctgtgtctgagggggaggagatggacacagctgagatcgcccggcaggtgaaggagcagctgatcaagcacaacatcggccagaggatcttcggccactacgtgctgggcctgagccagggctctgtgtctgagatcctggcccggcccaagccctggaacaagctgactgtgcggggcaaggagcccttccacaagatgaagcagttcctgagtgatgagcagaacatcctggccctgcggagcatccagggccggcagaggggcaacatcaccacccgcatccgggccagcgagactggaagtgatgaggccatcaagagcatcctggagcaggccaagcgggagctgcaggtgcagaagacagctgagcccgcccagcccagcagcgccagcggcagcggcaacagtgatgatgccatccgcagcatcctgcagcaggcccggcgggagatggaggcccagcaggccgccctggaccctgccctgaagcaggcccccctgagccagagcgacatcaccatcctgacccccaagctgctgagcaccagccccatgcccaccgtgagcagctacccacccctggccatcagcctgaagaagcccagcgctgcccctgaggccggggccagcgccctgcccaaccccccagccctgaagaaggaggcccaggatgcccctggcctggacccccagggcgctgctgactgtgcccagggcgtgctgcggcaggtgaagaatgaggtgggccgcagcggggcctggaaggaccactggtggagcgctgtgcagcctgagaggagaaatgctgccagcagcgaggaggccaaggccgaggagaccggcggcggcaaggagaagggcagcggcggcagcggcggcggcagccagcccagggctgagaggagccagctgcagggccccagcagcagcgagtactggaaggagtggcccagcgctgagagcccctacagccagagcagcgagctgagcctgaccggggccagccgctctgagaccccccagaacagccccctgcccagcagccccatcgtgcccatgagcaagcccaccaagcccagcgtgccccccctgaccccagagcagtatgaggtgtacatgtaccaggaggtggacaccatcgagctgacccggcaggtgaaggagaagctggccaagaatggcatctgccagaggatctttggagagaaggtgctgggcctgagccagggctctgtgtctgacatgctgagccggcccaagccctggagcaagctgacccagaagggccgggagcccttcatccgcatgcagctgtggctgaatggagagctgggccagggcgtgctgcctgtgcagggccagcagcagggccctgtgctgcacagcgtgaccagcctgcaggaccccctgcagcagggctgtgtgtcctctgagagcacccccaagaccagcgccagctgcagccctgcccctgagagccccatgagcagcagcgagagcgtgaagagcctgacagagctggtgcagcagccctgcccccccatcgaggccagcaaggacagcaagcccccagagcccagcgaccccccagccagtgacagccagcccaccacccccctgcccctgagcggccacagcgccctgagcatccaggagctggtggccatgagccctgagctggacacctacggcatcaccaagagggtgaaggaggtgctgacagacaacaacctgggccagaggctgtttggagagaccatcctgggcctgacccagggctctgtgtctgacctgctggcccggcccaagccctggcacaagctgagcctgaagggccgggagccctttgtgaggatgcagctgtggctgaatgaccccaacaacgtggagaagctgatggacatgaagaggatggagaagaaggcctacatgaagaggaggcacagctctgtgtctgacagccagccctgtgagcccccatctgtgggcacagagtacagccagggcgccagcccccagccccagcaccagctgaagaagccccgggtggtgctggcccctgaggagaaggaggccctgaagagggcctaccagcagaagccctaccccagccccaagaccatcgaggacctggccacccagctgaacctgaagaccagcaccgtcatcaactggttccacaactaccgcagccgcatccggcgggagctgttcatcgaggagatccaggccggcagccagggccaggccggggccagtgacagccccagcgcccggagcggccgggccgcccccagcagcgagggggacagctgtgatggagtggaggccacagagggccctggcagcgctgacacagaggagcccaagagccagggcgaggccgagcgggaggaggtgcccaggcctgctgagcagacagagcccccacccagcggcaccccaggcccagatgatgccagagatgatgaccatgaaggaggccctgtggagggccctggccccctgcccagccctgccagcgccacagccacagctgccccagctgccccagaagatgctgccaccagcgctgctgctgcccctggagagggccctgctgcccccagcagcgcccccccacccagcaacagcagcagcagcagcgccccccggcggcccagcagcctgcagagcctgtttggcctgcctgaggccgccggggcccgggacagccgggacaaccccctgaggaagaagaaggccgccaacctgaacagcatcatccaccggctggagaaggccgccagccgggaggagcccatcgagtgggagttctag

SEQ ID NO: 289947 - DNA, 4350 bp, Artificial Sequence
  derived and/or modified sequence
atgctgtgtgtggccggggcccggctgaagcgggagctggatgccacagccaccgtgctggccaaccggcaggatgaaagtgagcagagcaggaagaggctgattgagcagagccgggagttcaagaagaacaccccagaggacctgaggaagcaggtggcccccctgctgaagagcttccagggcgagattgatgccctgagcaagaggagcaaggaggccgaggccgccttcctgaatgtgtacaagaggctgattgatgtgcctgaccctgtgcctgccctggacctgggccagcagctgcagctgaaggtgcagaggctgcatgacattgaaacagagaaccagaagctgcgggagaccctggaggagtacaacaaggagtttgctgaggtgaagaaccaggaggtgaccatcaaggccctgaaggagaagatccgggagtatgagcagaccctgaagaaccaggccgagaccatcgccctggagaaggagcagaagctgcagaatgactttgctgagaaggagaggaagctgcaggagacccagatgagcaccaccagcaagctggaggaggccgagcacaaggtgcagagcctgcagacagccctggagaagaccaggacagagctgtttgacctgaagaccaagtatgatgaggagaccacagccaaggcagatgaaattgagatgatcatgacagacctggagcgggccaaccagagagctgaggtggcccagcgggaggccgagaccctgcgggagcagctgagcagcgccaaccacagcctgcagctggccagccagatccagaaggccccagatgtggagcaggccatcgaggtgctgaccaggagcagcctggaggtggagctggccgccaaggagcgggagatcgcccagctggtggaggatgtgcagaggctgcaggccagcctgaccaagctgcgggagaacagcgccagccagatcagccagctggagcagcagctgagcgccaagaacagcaccctgaagcagctggaggagaagctgaagggccaggccgactatgaggaggtgaagaaggagctgaacatcctgaagtccatggagtttgcccccagcgagggcgccggcacccaggatgctgccaagcccctggaggtgctgctgctggagaagaacagaagcctgcagagtgaaaatgctgccctgcgcatcagcaacagcgacctgagcggcagcgcccggaggaagggcaaggaccagcctgagagcagaagacctggcagcctgcctgcccccccacccagccagctgcccaggaaccctggagagcaggccagcaacaccaacggcacccaccagttctccccagctggcctgagccaggacttcttcagcagcagcctggccagccccagcctgcccctggccagcacaggcaagtttgccctgaacagcctgctgcagaggcagctgatgcagagcttctacagcaaggccatgcaggaggccggcagcacctccatgatcttcagcacaggcccctacagcaccaacagcatcagcagccagagccccctgcagcagagcccagatgtgaatggcatggcccccagccccagccagagcgagagcgctggctctgtgtctgagggggaggagatggacacagctgagatcgcccggcaggtgaaggagcagctgatcaagcacaacatcggccagaggatcttcggccactacgtgctgggcctgagccagggctctgtgtctgagatcctggcccggcccaagccctggaacaagctgactgtgcggggcaaggagcccttccacaagatgaagcagttcctgagtgatgagcagaacatcctggccctgcggagcatccagggccggcagagagctgagcccgcccagcccagcagcgccagcggcagcggcaacagtgatgatgccatccgcagcatcctgcagcaggcccggcgggagatggaggcccagcaggccgccctggaccctgccctgaagcaggcccccctgagccagagcgacatcaccatcctgacccccaagctgctgagcaccagccccatgcccaccgtgagcagctacccacccctggccatcagcctgaagaagcccagcgctgcccctgaggccggggccagcgccctgcccaaccccccagccctgaagaaggaggcccaggatgcccctggcctggacccccagggcgctgctgactgtgcccagggcgtgctgcggcaggtgaagaatgaggtgggccgcagcggggcctggaaggaccactggtggagcgctgtgcagcctgagaggagaaatgctgccagcagcgaggaggccaaggccgaggagaccggcggcggcaaggagaagggcagcggcggcagcggcggcggcagccagcccagggctgagaggagccagctgcagggccccagcagcagcgagtactggaaggagtggcccagcgctgagagcccctacagccagagcagcgagctgagcctgaccggggccagccgctctgagaccccccagaacagccccctgcccagcagccccatcgtgcccatgagcaagcccaccaagcccagcgtgccccccctgaccccagagcagtatgaggtgtacatgtaccaggaggtggacaccatcgagctgacccggcaggtgaaggagaagctggccaagaatggcatctgccagaggatctttggagagaaggtgctgggcctgagccagggctctgtgtctgacatgctgagccggcccaagccctggagcaagctgacccagaagggccgggagcccttcatccgcatgcagctgtggctgaatggagagctgggccagggcgtgctgcctgtgcagggccagcagcagggccctgtgctgcacagcgtgaccagcctgcaggaccccctgcagcagggctgtgtgtcctctgagagcacccccaagaccagcgccagctgcagccctgcccctgagagccccatgagcagcagcgagagcgtgaagagcctgacagagctggtgcagcagccctgcccccccatcgaggccagcaaggacagcaagcccccagagcccagcgaccccccagccagtgacagccagcccaccacccccctgcccctgagcggccacagcgccctgagcatccaggagctggtggccatgagccctgagctggacacctacggcatcaccaagagggtgaaggaggtgctgacagacaacaacctgggccagaggctgtttggagagaccatcctgggcctgacccagggctctgtgtctgacctgctggcccggcccaagccctggcacaagctgagcctgaagggccgggagccctttgtgaggatgcagctgtggctgaatgaccccaacaacgtggagaagctgatggacatgaagaggatggagaagaaggcctacatgaagaggaggcacagctctgtgtctgacagccagccctgtgagcccccatctgtgggcacagagtacagccagggcgccagcccccagccccagcaccagctgaagaagccccgggtggtgctggcccctgaggagaaggaggccctgaagagggcctaccagcagaagccctaccccagccccaagaccatcgaggacctggccacccagctgaacctgaagaccagcaccgtcatcaactggttccacaactaccgcagccgcatccggcgggagctgttcatcgaggagatccaggccggcagccagggccaggccggggccagtgacagccccagcgcccggagcggccgggccgcccccagcagcgagggggacagctgtgatggagtggaggccacagagggccctggcagcgctgacacagaggagcccaagagccagggcgaggccgagcgggaggaggtgcccaggcctgctgagcagacagagcccccacccagcggcaccccaggcccagatgatgccagagatgatgaccatgaaggaggccctgtggagggccctggccccctgcccagccctgccagcgccacagccacagctgccccagctgccccagaagatgctgccaccagcgctgctgctgcccctggagagggccctgctgcccccagcagcgcccccccacccagcaacagcagcagcagcagcgccccccggcggcccagcagcctgcagagcctgtttggcctgcctgaggccgccggggcccgggacagccgggacaaccccctgaggaagaagaaggccgccaacctgaacagcatcatccaccggctggagaaggccgccagccgggaggagcccatcgagtgggagttctag

SEQ ID NO: 289948 - DNA, 4452 bp, Artificial Sequence
  derived and/or modified sequence
atgctgtgcgtggccggcgcccggctgaagcgggagctggacgccaccgcaactgtcctcgctaatcggcaggatgagtccgagcagtcgcgaaaacgcctgatcgaacagagccgggagtttaaaaaaaacaccccagaggacctacgtaaacaggtagctccattgcttaagtcattccaaggagaaatcgacgctttaagtaagcgatctaaagaagccgaagcagcattcttgaatgtgtacaaacggctgattgatgttccagatccggtgcctgccctggacctgggacagcagctgcagttaaaggtgcagaggctgcacgatatagaaacagagaatcagaaattacgagagactctggaggaatataacaaggaatttgcagaggtgaagaaccaggaggtgaccattaaggctcttaaggagaagatccgtgagtacgagcagaccctaaagaaccaagccgagacgatagcactagagaaagagcagaaacttcagaacgatttcgcggagaaggaacgcaaactccaggaaacccaaatgagtaccacgtctaagctggaagaggctgaacacaaggttcagagcctacagaccgccctagagaaaactcgcacagaattgtttgacctgaagactaagtacgacgaggagaccaccgcaaaggcagacgagatagagatgatcatgaccgatctggagcgtgccaaccagagagctgaagtagcacagagagaggcagagaccttgcgagagcaactgtccagcgccaatcacagtctgcagctggctagtcagattcaaaaagcacccgatgtcgagcaagccatcgaggttcttacgcgatcttcgttggaagtggagctggcagctaaggagagagaaatagcccaactagtggaagacgtgcagaggctgcaggccagcctcacgaaactaagagagaattccgcgtctcagatctcacagttggaacagcaattgtcagctaagaacagcactttgaaacagctcgaggagaaactgaaaggccaagccgattatgaggaggtgaagaaagagctgaacatattgaaatctatggagttcgccccttccgaaggggcagggacccaagacgcagctaagccgctcgaggtcctgctcctcgaaaagaaccggagcctccagagcgaaaatgcagcccttaggatcagcaacagcgacctgtccggatcggcccggcggaaggggaaggaccagccggaatctcgacgcccaggcagcctgcctgccccccccccatcccagctccccaggaatcctggcgaacaggcgtcaaacactaacgggacccatcagttttctcctgccgggctgtcccaggacttcttctcttcctccctggccagccccagcctccccctagccagcacgggaaaattcgctctgaactccttgctgcaaaggcagctaatgcagagtttctacagcaaagcaatgcaggaagctggttccacctcgatgatcttcagtaccggcccttatagcaccaactctataagtagccagagccctttgcagcagtcgcccgacgtgaatggcatggctccatcgccatcccagtcagaatctgcaggatctgtgagcgagggggaggagatggatacagcggagattgccaggcaggtcaaggagcagctgataaaacataatatagggcagcggatatttggccactacgtgctggggctgtctcaggggagtgtgagcgagatactggcccgccccaagccctggaataaactgaccgtacggggcaaggaaccattccacaaaatgaaacagttcctgtccgacgagcagaacatcctggcgctgcggagtatacaaggcagacagcggggcaacatcaccactcgcatccgggcctcagagacaggctctgatgaggctatcaaatccatactggagcaggcaaaacgtgaattgcaggtccaaaagacggccgagcctgctcaaccaagctcagcgtccgggtcaggcaattccgatgacgccatccgaagcatcctgcagcaggcaaggcgagagatggaagctcagcaagcggctcttgacccagctctaaaacaggctcctctctcacagtctgatatcaccatccttacccccaagcttctgagcacgagtccaatgccaactgtctcatcatatccccccctggcaatctctctgaaaaagccatctgccgccccagaagccggagcatccgctctgccaaatccaccggccctgaaaaaggaggctcaagatgcaccaggactggatccacaaggagcggccgattgtgctcaaggcgtgcttagacaggtgaaaaatgaggtcggccggtccggcgcctggaaagatcactggtggtccgctgtccagcccgagcgaaggaacgctgctagctccgaagaggcaaaggccgaggagaccggaggtggaaaggagaaagggagcgggggttcaggcggcgggagtcagcctcgcgctgaacggtcacagctacaggggccaagtagctctgagtactggaaggagtggcctagcgcggagagcccctattcccagtcatccgagctgagcctgacgggcgcgtcgcgctctgaaacaccacagaactctccgcttccttcaagcccaatcgtcccaatgtcaaaaccgaccaaaccatccgttccccctctgacacccgagcagtacgaagtgtacatgtaccaagaggtggacactattgaactcacaagacaggttaaagagaagctcgctaaaaacggcatctgtcagcgtatctttggcgagaaggtcctgggtctcagccagggctcggtctccgacatgctctccagacccaaaccatggtcaaagcttacgcagaagggaagagaaccattcatcaggatgcaactgtggctgaacggggaactaggccagggcgtgctgccagtgcaggggcagcagcaggggcctgtactgcactcggtcacttcacttcaggaccctctgcagcaaggctgtgtatcctctgagagcacacccaaaacatccgccagttgctccccagcccctgagagtcccatgtcctcctctgagtcagttaagtctctgacagaattggtgcagcagccttgtccccccattgaggccagcaaggattctaagccgccggaaccaagcgaccccccggctagtgatagtcagccaacaactccccttccactgagcgggcatagtgccctctcaatccaggagctggtggccatgagcccagagcttgatacttacggaattaccaaacgagttaaggaagttcttaccgacaataacctgggtcaaaggctgtttggcgagactatcctgggcttgacccagggttccgtgtcagatttattggcccgccccaagccttggcataagttatcgctgaagggcagggagccctttgtgcgcatgcaactgtggctgaacgatcctaacaatgtcgagaagctaatggatatgaaaaggatggagaaaaaagcctatatgaaaagaagacactctagtgtctctgatagccaaccttgcgagccaccctcggtgggcactgagtacagccaaggggcgagcccacagcctcagcatcagctgaagaagcccagagtcgtgttggcacccgaggagaaagaagccctgaagcgggcctaccaacaaaagccctacccatccccgaaaaccatcgaagacctggcaactcagttgaatttaaagaccagtactgtcatcaactggttccacaactacagaagtcgtatacggcgggagctgttcatagaggaaatccaggcagggagtcagggccaggccggcgcctctgactctccaagtgccagaagcggaagagctgccccttcatcggaaggcgactcttgtgacggcgtcgaagctactgaagggcccggttccgcagacactgaggagccaaagtcccagggagaagctgagagggaagaggttcccagacctgcagaacagacagagcctcccccctctgggactcctggaccagacgacgcgagagacgacgaccacgaaggcggacccgtagaggggccgggacctctgccctctcctgcttctgccacggccaccgctgccccagccgccccagaggatgccgccacatcggctgccgcagcacccggggagggacccgctgccccctcttccgctccacctccctctaatagcagcagcagcagcgcccctagacgcccatctagtttacagagcttattcggtctgccagaggccgccggagcccgggactcaagggacaacccattaagaaagaagaaagccgctaacctgaacagtatcatccaccggcttgagaaagcagcatcacgcgaggagcccattgagtgggagttctag

SEQ ID NO: 289949 - DNA, 4350 bp, Artificial Sequence
  derived and/or modified sequence
atgctgtgcgtggccggcgcccggctgaagcgggagctggacgccacagctactgtgctagcgaaccgccaggacgaaagtgagcagtctcgaaagagacttatcgagcagagcagagaattcaaaaaaaatacacctgaagaccttcgcaaacaggtggcccctctcctcaagagtttccagggtgaaatagatgccttaagtaagcgatcaaaggaagccgaagcagccttcctgaatgtgtacaagcggctcatcgacgttcccgatccagtacccgcccttgaccttggccaacaactccaattgaaagttcagcggctgcatgatatcgagaccgagaatcagaagctcagagagactcttgaggaatataataaggagtttgcagaagtaaaaaaccaggaggtgactatcaaagctctgaaggagaagatccgtgagtacgaacaaactctcaagaatcaggccgagacgatcgccttggagaaagagcaaaagctccaaaacgactttgccgagaaggaaaggaagttacaggagacccaaatgtcgacaactagtaagctggaggaggctgagcataaagtacagtccctgcaaaccgccctggaaaagacccggaccgagttatttgacctgaagactaaatacgacgaagaaacaacagcaaaggctgacgagatcgaaatgattatgaccgatcttgaaagagccaatcagcgcgcagaagtggcccaacgggaggccgaaacccttcgtgagcagctgagtagcgccaatcatagtttgcagttggcgagccaaattcagaaagctccggacgtcgagcaggccatcgaggtcctcactcgtagctccttagaggtagagctcgccgccaaggagcgtgagattgcccagctcgtggaggacgtccagaggttgcaggcttccctgaccaaactgcgcgaaaattcagccagtcaaatctctcagttggagcagcagttgtctgctaaaaactctacgctcaaacagctcgaagaaaagttgaagggtcaggctgattatgaggaggttaagaaggagctaaacatcttgaaaagcatggaattcgctccttcagaaggggccggtacacaggatgccgctaagcccctagaggtcctcctgctggagaaaaatcggtcactccagagcgaaaacgcggccctccgtatctctaatagcgatctgtcggggagcgcccgtcggaagggcaaggatcagcctgaaagtagacgcccgggcagcctgccggccccacctccgagccagctgccacggaaccccggtgaacaggcgtccaatacaaatgggacgcatcaattctcacccgcaggtttaagtcaagacttcttttcttcatccttggcctcccctagtttaccactggctagcacaggaaaatttgcactgaactcgcttttgcagagacagttgatgcagtccttttacagtaaggctatgcaggaggcaggaagcacgtctatgattttctctactggcccatattcaaccaactcaataagcagtcagtcccccctgcagcagtctccggacgtcaatgggatggcaccctccccgagccagtctgaatcagcgggctcggtaagcgaaggagaggagatggacacagccgaaatcgcgaggcaggtgaaagaacagttaatcaagcacaacattgggcagcgaatctttggacactacgtcctgggactgtcccagggatccgtgagtgaaattctggccagacctaaaccctggaacaagctgacagtacgtggcaaggaacctttccataaaatgaaacagtttctgtccgatgagcagaatatacttgctctgagatctatccaagggagacagcgcgctgagcctgcccagccttctagtgcatctggctcaggtaactcagacgacgcgatcaggtccatccttcagcaggcacgtcgggaaatggaagcacaacaagctgcactggaccccgctctgaaacaagctccactgagtcagtccgacatcaccattctcacccccaagcttctttcaactagccccatgcctacggtatcgagctaccctccattggctatcagcctgaaaaagccctctgccgcaccggaggccggggccagcgcactacccaacccccctgccctcaaaaaggaggcccaggatgctccagggttagacccgcaaggggcagccgactgtgcacaaggtgtactccggcaggtaaaaaatgaagtgggccgctcaggtgcctggaaagaccactggtggtccgctgtgcagccggaaaggcgaaatgccgcttctagtgaagaggcaaaagcggaggaaaccgggggcggcaaagagaagggaagcgggggatccggcggaggatcccagccccgggccgagagaagccagctgcaaggccccagtagctccgagtattggaaggagtggcccagcgctgagtcaccctatagccagagcagcgagttgagtttaactggtgcgtcgcgcagtgagaccccacagaatagtcccctccctagtagcccgattgttccaatgagcaaacctaccaaaccaagcgtgccccctctgacccctgagcagtatgaggtgtacatgtatcaggaggtggacactattgagttgacaagacaggtgaaagagaaactggctaagaacggtatttgccaacgcatctttggagaaaaagtgcttggtttatcccagggatcagtgtcagacatgctctcgagacctaaaccttggagtaaattaacacagaaggggcgcgagccctttatcaggatgcaactgtggctaaacggagaactgggacagggagttctgccggtgcagggacagcaacaaggccctgtactgcactcagtcaccagcttacaggatcccctccaacagggttgcgtgagttctgagagtactccgaagacaagtgcaagttgtagcccggcccctgaaagtccaatgtcctcaagtgagtctgtgaaatctctgacggagctggtgcagcaaccctgtccacctatcgaggccagtaaggattcaaaacctcctgagccttctgaccctcccgcctctgatagtcagcccaccactcctctgccactctcagggcacagtgccctgtccatccaagaactggtggcaatgtcacctgagctggatacatacggtattactaagcgagtaaaagaagttctgacagataacaatctgggtcagaggctgttcggtgagacaatactgggcctaacacagggcagcgttagtgacctgctggcaagaccaaaaccatggcacaaactcagtctcaagggcagagaaccttttgttagaatgcagctatggctgaacgatccaaataatgtggagaagcttatggatatgaaaaggatggaaaaaaaggcctatatgaaacgcaggcactccagcgtctccgacagccaaccttgcgagccaccatccgtcgggacggaatatagccagggggcatccccacagcctcagcaccaactcaaaaagcctcgggtggttctcgcccccgaggaaaaggaagccctaaaaagggcttaccagcagaaaccctacccttcccccaagaccattgaagatctggccacgcaacttaatctaaaaactagtaccgtgatcaactggtttcacaattacaggtcaaggatccgacgtgagctgttcattgaggagatacaggcaggatctcaggggcaagcgggcgcatcagattctccatcagcccgctctggtcgggcggctccctccagtgagggggatagctgcgatggtgtggaagccacagagggacccggatcagccgacaccgaggaacctaaatcacagggggaggccgaacgtgaagaggttccacgtccagctgagcagactgagcctcccccctctggaacaccggggcccgatgacgctagggatgacgaccacgaaggcgggcccgttgaaggtccaggccctttgccctctcccgcaagcgctactgcaacggctgccccagccgctccagaagatgccgctacttcagcagctgccgccccaggggaaggcccagccgccccgtcttctgcccctcccccttctaactcttcctccagttccgcacctagacgacccagctcacttcagagcttgttcggactgcctgaggccgccggggcccgggactcacgcgacaacccactgaggaagaaaaaagctgcaaacctgaattcgatcatacacagactggagaaggccgccagccgcgaagagcccatcgagtgggaattctag

SEQ ID NO: 289950 - DNA, 4452 bp, Artificial Sequence
  derived and/or modified sequence
atgctttgcgtggccggtgcccgtctgaagagagagctggacgccaccgccaccgtgttagccaatagacaagacgagtctgaacagagtagaaagaggctcatagaacagtccagggaattcaaaaaaaatactcccgaagatctgaggaagcaggtagcgccactgctgaagtctttccagggggaaattgatgccttgagcaagcgatctaaagaggctgaggccgcattcttgaatgtgtataaaaggcttatcgacgtgcccgatcccgtgcctgcattggatctcggacagcagctgcagcttaaggtgcagaggctccatgacatcgagacagagaatcagaagctacgggaaaccctggaggaatacaacaaagagtttgccgaggtgaagaatcaagaagtgaccattaaggcactgaaggagaaaatccgagaatacgagcagaccttaaaaaatcaggcagaaacaatagctctggaaaaggaacaaaaattgcagaatgactttgccgaaaaggaacgcaaacttcaagagacccagatgtccactacctcaaaactcgaagaagccgagcacaaggtgcagtctctacagaccgctctggaaaagacgcgcaccgaactctttgacttgaaaacaaaatatgacgaagagaccaccgccaaagccgacgagatcgagatgattatgaccgacctggagcgggctaatcagcgagcagaggtggcgcagcgagaagccgagacattgcgtgaacagctctcaagtgccaaccattcactccagctggcctctcagatccagaaggctcccgatgtggaacaggcaatcgaggtgctgacgcgatcctcactggaggtggaattagcagccaaggaacgagagatcgcacaacttgtggaggacgtgcagcggctgcaagcctcgctaaccaagttacgcgagaattccgcatcacagatcagccagctggagcagcagctgtctgcgaaaaactctacactcaagcagctggaggagaagctgaaaggacaggccgactatgaagaggtgaaaaaagagctgaacattttaaagtcaatggagttcgctcccagtgagggagctgggacccaggacgctgcaaaaccccttgaagtgctactgctggaaaagaatcggagcctgcagtccgagaatgctgctctccgtattagcaattccgatctgtccggaagtgcccgaaggaaaggaaaagatcaacccgagtcgcggaggccagggagcttaccagcccctccgcctagtcagctgccaagaaatcccggagagcaggcctcaaacacaaacggtacgcaccagttctcccctgctgggctgagccaggactttttctcttctagtttggcgagcccttcgctccctctggcctcaaccggcaagtttgcactgaattccctgctgcagaggcagctgatgcagtcattctacagtaaagccatgcaggaagctggctccacttccatgatcttttcaactggcccatattcaaccaattctataagttcccagtcccccctgcagcagtcacccgatgtcaatgggatggctccctcaccaagccaaagcgagtctgctggcagcgtgtctgagggcgaggagatggacacggcagaaattgcgaggcaggtaaaggaacagctaattaagcacaacattggccagcgcatctttggtcattatgtcctgggcctcagtcaggggagcgtcagcgagatactggcaagacctaaaccctggaataaactcaccgtgaggggcaaggagcctttccacaagatgaagcagtttctgagcgacgagcagaacatccttgccctgagatctatacaaggcagacagcgtggcaatattacaactcggattcgtgcttccgagaccggttctgatgaggccataaagagtattctggaacaagcgaagagggaactgcaggtgcagaagactgcagaaccagcccagccgagcagtgctagtggcagcggaaacagtgatgatgccatcaggagcatcttgcagcaggccagacgggagatggaggcccagcaagccgctctggacccagccctgaaacaggccccactgtctcagagcgacatcacaatactgacacctaaactgctgtctaccagccccatgcccactgtgagctcttatcccccactggccatctccctcaagaaaccttccgccgctccggaggcaggcgctagtgctctgccgaatcccccagcactgaaaaaagaggcacaagacgctcctggtcttgacccacaaggggcagcagactgtgcacagggtgtgctgaggcaagtgaagaacgaggtgggacgttctggggcatggaaggatcactggtggtctgccgtccagcctgagagacgcaacgcagccagttcagaggaagctaaagccgaagagactggcggaggaaaggaaaagggatccggtggttctggagggggatcccagccaagagcagaaaggtcccagctgcaagggcctagttcttctgagtattggaaggagtggccctcagccgagagtccttatagtcagagttctgaactgtccctgacaggcgcaagcagatctgagacaccccagaattcccccttgccatcatctccaatagtacccatgtcaaagcccacaaagccatccgtgccacctctgacccccgagcagtatgaggtgtatatgtaccaagaggtcgacacgattgaactcacccggcaggttaaggagaagttagccaaaaatgggatctgtcagcgtatcttcggcgagaaagtcctcgggttgtcgcaggggtctgtgtccgatatgcttagcaggcctaaaccttggtcgaagctgactcagaaggggcgtgaaccattcatcaggatgcagctgtggctgaacggagagttgggccaaggcgttctgccagtccagggacaacagcagggtccagtactgcactccgtgaccagcctccaagacccgctgcagcagggttgcgtttccagtgagagcactccaaagacctcagcctcctgctctcccgcacctgaaagcccaatgtcttccagcgagagtgtcaaaagcctgactgagctggttcagcagccttgtccaccaattgaggcctccaaggattctaagccccctgagccatctgatccaccggcaagcgattcccagccaacgaccccactgcctctgtcagggcactcggccctctcaatccaggaactggtagccatgtcgccggagttggatacgtatggaatcaccaaaagggtcaaggaggtcctgaccgacaacaacttggggcagcgtctgttcggtgagacaatcctgggcctgactcagggctccgtttccgacctgttagctcgacctaagccttggcacaaactgtctctcaagggaagggagccatttgtgagaatgcaactgtggcttaacgatcctaacaatgtggaaaagcttatggacatgaaaagaatggaaaagaaggcctatatgaaacgcaggcacagctcggtgtcagactctcaaccatgtgaaccaccatccgtggggaccgaatactcacagggcgcatccccccagccacaacatcaactgaagaagcctcgagttgtgttggcacccgaagaaaaagaagccctgaagcgcgcttaccagcagaagccttatccatctccaaagacaatcgaggatctggccacacaattgaacttgaaaacaagcactgtgatcaactggttccacaattacagatcaagaatcagacgggagctgttcatagaggaaattcaggccggttcccagggtcaagccggtgcctccgactcgcctagtgctcgctccggtagagccgctccttcaagtgaaggggatagttgcgacggagttgaggcaacagagggccctggcagcgccgatacagaggagcctaagagccagggagaagcagaaagagaggaggtacctaggccagccgagcagacagaacccccacctagtgggactcctggcccagacgatgccagggacgacgatcacgaaggaggtcccgtggagggccctgggcctctgccgtcacccgctagcgcaaccgccacagccgcacccgcagctccagaggacgctgcaacctccgccgcagccgctcccggtgagggcccagccgcaccctctagtgcacctccaccatccaatagctcgtctagttctgctcctcgtcgacctagctctctacagagtctttttggacttccagaggccgctggagcacgggactctagggataaccccctgagaaagaagaaggccgctaacctcaactccataattcatagactcgaaaaggccgcatcaagagaagagcctattgaatgggaattctag

SEQ ID NO: 289951 - DNA, 4350 bp, Artificial Sequence
  derived and/or modified sequence
atgctttgtgtggccggtgccagactgaagagagagctcgatgccacagcaactgtactggcaaatcgccaggacgagtccgagcagtccaggaagcgactgatcgagcagagcagggaattcaaaaagaacactcccgaagatctgcgcaaacaggtagccccattgctgaaatctttccaaggagaaatagatgcattatcgaaacgctcaaaggaagcagaagcagcattccttaacgtgtacaagcgcctcatcgatgtacctgacccagtcccagcccttgacttaggccagcagctccagctcaaggtgcagcggctacacgacattgaaaccgaaaaccaaaaactgcgcgagacgctcgaagaatataacaaggagttcgccgaagttaaaaatcaggaggtaaccatcaaggctctaaaagagaagatacgcgagtacgagcagacacttaagaatcaggccgagactatagccctagaaaaagaacagaagctgcagaatgactttgccgagaaagagcgaaagctccaggaaactcagatgtctacgacgtctaagttagaggaagctgaacataaagttcaaagtctgcagaccgcgctggaaaagaccaggacagagctctttgatttaaagaccaagtacgatgaagaaaccacggccaaggctgacgaaattgaaatgatcatgacagatttagaacgagccaatcaacgtgctgaggtggcccaaagagaggcagaaactctccgcgaacagctgagcagcgcgaatcacagtcttcaactcgccagtcagattcagaaggcccctgacgtggagcaagccattgaagttctaacaaggagttcactcgaggtagagttagcagcgaaagaacgagagatcgcgcagctcgtggaggacgtccagagactgcaggcctcgttgaccaaactcagagaaaattccgcatctcagattagtcagttggaacagcagcttagtgcaaagaactccactctgaaacagctggaggaaaaattgaaaggtcaggccgactatgaagaggtcaaaaaggaactgaacatcctcaagtcaatggagtttgccccatctgagggagccggaactcaagacgcagctaagcccctggaggtgctcctgttagaaaaaaacaggagccttcagagtgagaacgcagctctccgtatttctaatagcgatctgtccggatcagcccgtcggaaaggaaaagatcagccagagagccggaggcccggatcgctacccgcaccacctccctcacagttaccacggaacccaggagaacaggccagcaacacaaatggtacccatcaatttagccccgctggcctgagccaggatttttttagtagttcgttggcatcccccagtctgccgcttgcctctaccgggaagttcgctctgaattctctgctccagcggcagctgatgcaaagcttttattccaaggctatgcaggaggcagggtctacttccatgatattttccactggcccttattctaccaatagcatttcatcccagtccccattacagcaatctcctgacgtgaatggaatggccccatcaccatcccagtccgagtcagccggttcggtttctgaaggcgaggaaatggacacggcagaaatcgcgaggcaggtaaaggagcagctgattaagcataatattggccagcgtatcttcggacattacgtgctcggcctgagtcaggggtctgtatccgagatcctagctcgaccaaagccatggaacaagctgacagtacggggaaaggagccattccataagatgaaacagttccttagtgatgagcagaacattctcgctctaagaagcattcagggcaggcaacgggctgaacctgcacaaccctcctctgcatcaggaagtggcaattctgatgatgccattcggtctatcctgcagcaagccaggcgggagatggaagctcaacaggcagcactcgatcccgcactgaaacaggcgcctctttcccagtcagacattactatcctgacccccaagttactctccaccagcccaatgcccaccgtcagctcttaccccccacttgccattagtctgaagaaaccgagcgcggcacctgaggcaggcgcatccgctctacctaatcctccggcattgaaaaaggaggcacaggatgcaccgggactcgacccccagggcgctgccgattgcgcacagggggtgcttcgccaggtgaaaaatgaggttggacgatccggtgcctggaaggaccactggtggtcagctgtacaacctgagagaaggaatgcagcttcttctgaagaggccaaggctgaagaaacaggcggaggtaaggagaagggatctggcggttcagggggtgggagtcagcccagggcagaaaggagccagctgcaagggccttcctcttccgagtactggaaagaatggccgagcgccgagagcccttattctcaaagctcagagcttagcttgaccggcgcttctagatctgaaacaccccaaaacagcccacttccctcctctccgatcgtgccgatgagcaaacctacgaagccatcagttcctcccttgaccccagagcagtatgaagtttacatgtaccaagaggtggataccatcgaactcacgcggcaggttaaagagaaactggccaaaaacggtatctgccagcgcatctttggagagaaggtgctggggctctcacagggtagtgtatccgacatgctgtcccgacccaagccctggagcaagctgacccagaaaggcagagaaccttttatccgcatgcagttgtggctgaacggcgaactaggccagggggtcttacccgtgcagggccagcaacaggggcctgttctgcattctgtgactagcttgcaagacccactgcagcagggctgtgtctctagcgagagcacccccaaaacctcagccagttgcagcccagcacctgagtccccaatgtctagtagtgaatcggttaaaagcttgaccgagctcgttcagcagccttgtccaccaattgaagccagtaaagactcaaaacctcctgaaccatctgatcctcctgcttccgatagtcagcctaccactccccttccactatctggacactccgcactgtccattcaggagctggtcgctatgtcaccagagttggatacctacggaattacaaagagagtcaaggaagtgttgaccgacaataacttggggcagcgcctctttggtgagaccatactgggcttaacgcaggggagtgtctcagacctgctagccaggcctaagccatggcacaaactgagcttgaagggccgagagccttttgtaagaatgcagttgtggctgaacgatccaaacaacgtggagaaactgatggatatgaaacgcatggaaaaaaaggcatatatgaagagaagacattcatcagtgtcagattctcagccgtgcgagcctccttcggtcggcaccgaatactctcagggtgctagcccacagccccaacatcagctgaagaagccacgggtggtcctggccccagaggaaaaggaagcgttgaagagagcttatcagcagaaaccttaccccagtccgaagacaattgaagatcttgcaacccagctgaaccttaaaactagcacagtgattaattggttccacaattaccgttcgaggataaggagggagcttttcattgaagaaatccaggccggatctcagggccaggccggtgcctctgattcccctagtgctcgctcaggcagagctgctccctcaagcgagggcgactcctgcgatggagtggaggcgaccgaaggcccaggatccgccgataccgaggagcctaaatcacagggggaagctgaaagggaagaggtgccacgcccagcagagcagaccgaacctccccctagcggaaccccagggccagacgacgcgagggacgacgaccacgagggaggacccgtcgagggtccaggacctttgccctcacctgccagcgccaccgctaccgcggcacccgctgcccctgaggacgcggctacttctgccgctgccgcacccggtgaggggcctgcggcaccttcaagtgctccgccaccaagtaatagtagctcttcctcggctcccaggcggccttcaagtctgcaatcactttttgggctgccagaggccgctggtgccagagattctcgcgataacccgctccgaaaaaagaaggcagcaaacttgaattcgattatccatcgtttggaaaaggcagcttcgcgtgaggaaccaattgaatgggagttttag

SEQ ID NO: 289952 - protein, 112 aa, Artificial Sequence
  derived and/or modified sequence
MKNQVCSKCGEGTYSLGSGIKFDEWDELPAGFSNIATFMDTVVGPSDSRPDGCNNSSWIPRGNYIESNRDDCTVSLIYAVHLKKSGYVFFEYQYVDNNIFFEFFIQNDQCQE

SEQ ID NO: 289953 - DNA, 339 bp, Artificial Sequence
  derived and/or modified sequence
atgaaaaaccaggtttgcagcaagtgcggggaggggacatacagcctaggcagcggcatcaaattcgacgagtgggatgaactccccgccggattttccaacattgcaacttttatggacacggtggtgggcccatctgattctagacccgatggatgtaacaattctagttggatacctcggggcaactacatcgagtcaaaccgggatgattgtaccgttagccttatctacgcagtccatctgaaaaaatctgggtatgtgtttttcgaatatcagtatgtggataataacatcttcttcgagttttttatccagaacgatcaatgccaggagtag

SEQ ID NO: 289954 - DNA, 339 bp, Artificial Sequence
  derived and/or modified sequence
atgaagaaccaggtgtgcagcaaatgtggggagggcacctacagcctgggcagcggcatcaagtttgatgagtgggatgagctgcctgctggcttcagcaacatcgccaccttcatggacacagtggtgggccccagcgacagcaggccagatggctgcaacaacagctcctggatcccccggggcaactacatcgagagcaacagagatgactgcaccgtgtccctcatctatgctgtgcacctgaagaagagcggctacgtgttctttgagtaccagtatgtggacaacaacatcttctttgagttcttcatccagaatgaccagtgccaggagtag

SEQ ID NO: 289955 - DNA, 339 bp, Artificial Sequence
  derived and/or modified sequence
atgaagaaccaggtgtgcagcaagtgcggcgagggcacctacagcctcgggtcgggtatcaagttcgatgagtgggatgaactgccagcaggtttttcaaacattgcaacattcatggatactgtggtgggtccttcggactcaaggccagacgggtgcaataactcatcatggatccccagaggtaactacattgaatccaatagagacgactgcaccgtgagtctgatttacgcagtgcatctgaagaaatctggatacgttttttttgagtaccagtatgtggacaataacattttcttcgaattcttcatccagaatgatcagtgccaggaatag

SEQ ID NO: 289956 - DNA, 339 bp, Artificial Sequence
  derived and/or modified sequence
atgaagaatcaagtctgcagtaagtgtggggaaggtacatactcattgggatccggaataaagttcgatgagtgggacgaactcccagcaggattttccaatattgccacattcatggatactgtggtcggcccatctgactctcgaccagacgggtgtaataactccagctggatcccgagaggaaattacatcgaatctaatcgtgacgattgtacggtgtcactgatatatgctgtgcatctgaagaaatctggttatgttttttttgaataccagtacgtagataataacatatttttcgaatttttcattcagaacgaccagtgccaggagtag

SEQ ID NO: 289957 - DNA, 339 bp, Artificial Sequence
  derived and/or modified sequence
atgaagaaccaggtgtgcagcaagtgcggcgagggcacctacagcctgggcagcggcatcaagttcgacgagtgggacgagctgcccgccggcttcagcaacatcgccaccttcatggacaccgtggtgggccccagcgacagcagacccgacggctgcaacaacagcagctggatccccagaggcaactacatcgagagcaacagagacgactgcaccgtgagcctgatctacgccgtgcacctgaagaagagcggctacgtgttcttcgagtaccagtacgtggacaacaacatcttcttcgagttcttcatccagaacgaccagtgccaggagtag

SEQ ID NO: 289958 - protein, 537 aa, Artificial Sequence
  derived and/or modified sequence
SLVPATNYIYTPLNQLKGGTIVNVYGVVKFFKPPYLSKGTDYCSVVTIVDQTNVKLTCLLFSGNYEALPIIYKNGDIVRFHRLKIQVYKKETQGITSSGFASLTFEGTLGAPIIPRTSSKYFNFTTEDHKMVEALRVWASTHMSPSWTLLKLCDVQPMQYFDLTCQLLGKAEVDGASFLLKVWDGTRTPFPSWRVLIQDLVLEGDLSHIHRLQNLTIDILVYDNHVHVARSLKVGSFLRIYSLHTKLQSMNSENQTMLSLEFHLHGGTSYGRGIRVLPESNSDVDQLKKDLESANLTANQHSDVICQSEPDDSFPSSGSVSLYEVERCQQLSATILTDHQYLERTPLCAILKQKAPQQYRIRAKLRSYKPRRLFQSVKLHCPKCHLLQEVPHEGDLDIIFQDGATKTPDVKLQNTSLYDSKIWTTKNQKGRKVAVHFVKNNGILPLSNECLLLIEGGTLSEICKLSNKFNSVIPVRSGHEDLELLDLSAPFLIQGTIHHYGCKQCSSLRSIQNLNSLVDKTSWIPSSVAEELDIVLQ

SEQ ID NO: 289959 - protein, 634 aa, Artificial Sequence
  derived and/or modified sequence
MSLVPATNYIYTPLNQLKGGTIVNVYGVVKFFKPPYLSKGTDYCSVVTIVDQTNVKLTCLLFSGNYEALPIIYKNGDIVRFHRLKIQVYKKETQGITSSGFASLTFEGTLGAPIIPRTSSKYFNFTTEDHKMVEALRVWASTHMSPSWTLLKLCDVQPMQYFDLTCQLLGKAEVDGASFLLKVWDGTRTPFPSWRVLIQDLVLEGDLSHIHRLQNLTIDILVYDNHVHVARSLKVGSFLRIYSLHTKLQSMNSENQTMLSLEFHLHGGTSYGRGIRVLPESNSDVDQLKKDLESANLTANQHSDVICQSEPDDSFPSSGSVSLYEVERCQQLSATILTDHQYLERTPLCAILKQKAPQQYRIRAKLRSYKPRRLFQSVKLHCPKCHLLQEVPHEGDLDIIFQDGATKTPDVKLQNTSLYDSKIWTTKNQKGRKVAVHFVKNNGILPLSNECLLLIEGGTLSEICKLSNKFNSVIPVRSGHEDLELLDLSAPFLIQGTIHHYGCKQCSSLRSIQNLNSLVDKTSWIPSSVAEALGIVPLQYVFVMTFTLDDGTGVLEAYLMDSDKFFQIPASEVLMDDDLQKSVDMIMDMFCPPGIKIDAYPWLECFIKSYNVTNGTDNQICYQIFDTTVAEDVI

SEQ ID NO: 289960 - protein, 340 aa, Artificial Sequence
  derived and/or modified sequence
LSLVPATNYIYTPLNQLKGGTIVNVYGVVKFFKPPYLSKGTDYCSVVTIVDQTNVKLTCLLFSGNYEALPIIYKNGDIVRFHRLKIQVYKKETQGITSSGFASLTFEGTLGAPIIPRTSSKYFNFTTEDHKMVEALRVWASTHMSPSWTLLKLCDVQPMQYFDLTCQLLGKAEVDGASFLLKVWDGTRTPFPSWRVLIQDLVLEGDLSHIHRLQNLTIDILVYDNHVHVARSLKVGSFLRIYSLHTKLQSMNSENQTMLSLEFHLHGGTSYGRGIRVLPESNSDVDQLKKDLESANLTANQHSDVICQSEPDDSFPNGVSLRPPGWSSVARSRLIAASTS

SEQ ID NO: 289961 - protein, 503 aa, Artificial Sequence
  derived and/or modified sequence
MVEALRVWASTHMSPSWTLLKLCDVQPMQYFDLTCQLLGKAEVDGASFLLKVWDGTRTPFPSWRVLIQDLVLEGDLSHIHRLQNLTIDILVYDNHVHVARSLKVGSFLRIYSLHTKLQSMNSENQTMLSLEFHLHGGTSYGRGIRVLPESNSDVDQLKKDLESANLTANQHSDVICQSEPDDSFPSSGSVSLYEVERCQQLSATILTDHQYLERTPLCAILKQKAPQQYRIRAKLRSYKPRRLFQSVKLHCPKCHLLQEVPHEGDLDIIFQDGATKTPDVKLQNTSLYDSKIWTTKNQKGRKVAVHFVKNNGILPLSNECLLLIEGGTLSEICKLSNKFNSVIPVRSGHEDLELLDLSAPFLIQGTIHHYGCKQCSSLRSIQNLNSLVDKTSWIPSSVAEALGIVPLQYVFVMTFTLDDGTGVLEAYLMDSDKFFQIPASEVLMDDDLQKSVDMIMDMFCPPGIKIDAYPWLECFIKSYNVTNGTDNQICYQIFDTTVAEDVI

SEQ ID NO: 289962 - protein, 459 aa, Artificial Sequence
  derived and/or modified sequence
LSLVPATNYIYTPLNQLKGGTIVNVYGVVKFFKPPYLSKGTDYCSVVTIVDQTNVKLTCLLFSGNYEALPIIYKNGDIVRFHRLKIQVYKKETQGITSSGFASLTFEGTLGAPIIPRTSSKYFNFTTEDHKMVEALRVWASTHMSPSWTLLKLCDVQPMQYFDLTCQLLGKAEVDGASFLLKVWDGTRTPFPSWRVLIQDLVLEGDLSHIHRLQNLTIDILVYDNHVHVARSLKVGSFLRIYSLHTKLQSMNSENQTMLSLEFHLHGGTSYGRGIRVLPESNSDVDQLKKDLESANLTANQHSDVICQSEPDDSFPSSGSVSLYEVERCQQLSATILTDHQYLERTPLCAILKQKAPQQYRIRAKLRSYKPRRLFQSVKLHCPKCHLLQEVPHEGDLDIIFQDGATKTPDVKLQNTSLYDSKIWTTKNQKGRKVAVHFVKNNGILPLSNECLLLIEVLL

SEQ ID NO: 289963 - protein, 82 aa, Artificial Sequence
  derived and/or modified sequence
MSLVPATNYIYTPLNQLKGGTIVNVYGVVKFFKPPYLSKGTDYCSVVTIVDQTNVKLTCLLFSGNYEALPIIYKNGDIVRFH

SEQ ID NO: 289964 - protein, 518 aa, Artificial Sequence
  derived and/or modified sequence
LSLVPATNYIYTPLNQLKGGTIVNVYGVVKFFKPPYLSKGTDYCSVVTIVDQTNVKLTCLLFSGNYEALPIIYKNGDIVRFHRLKIQVYKKETQGITSSGFASLTFEGTLGAPIIPRTSSKYFNFTTEDHKMVEALRVWASTHMSPSWTLLKLCDVQPMQYFDLTCQLLGKAEVDGASFLLKVWDGTRTPFPSWRVLIQDLVLEGDLSHIHRLQNLTIDILVYDNHVHVARSLKVGSFLRIYSLHTKLQSMNSENQTMLSLEFHLHGGTSYGRGIRVLPESNSDVDQLKKDLESANLTANQHSDVICQSEPDDSFPSSGSVSLYEVERCQQLSATILTDHQYLERTPLCAILKQKAPQQYRIRAKLRSYKPRRLFQSVKLHCPKCHLLQEVPHEGDLDIIFQDGATKTPDVKLQNTSLYDSKIWTTKNQKGRKVAVHFVKNNGILPLSNECLLLIEGGTLSEICKLSNKFNSVIPVRSGHEDLELLDLSAPFLIQGTIHHYGTGYCTPPICVCYDLYT

SEQ ID NO: 289965 - DNA, 1614 bp, Artificial Sequence
  derived and/or modified sequence
agcctggtgcccgccaccaactacatctacacccccctgaaccagctgaagggcggcaccatcgtgaacgtgtacggcgtggtgaagttcttcaagcccccctacctgagcaagggcaccgactactgcagcgtggtgaccatcgtggaccagaccaacgtgaagctgacctgcctgctgttcagcggcaactacgaggccctgcccatcatctacaagaacggcgacatcgtgagattccacagactgaagatccaggtgtacaagaaggagacccagggcatcaccagcagcggcttcgccagcctgaccttcgagggcaccctgggcgcccccatcatccccagaaccagcagcaagtacttcaacttcaccaccgaggaccacaagatggtggaggccctgagagtgtgggccagcacccacatgagccccagctggaccctgctgaagctgtgcgacgtgcagcccatgcagtacttcgacctgacctgccagctgctgggcaaggccgaggtggacggcgccagcttcctgctgaaggtgtgggacggcaccagaacccccttccccagctggagagtgctgatccaggacctggtgctggagggcgacctgagccacatccacagactgcagaacctgaccatcgacatcctggtgtacgacaaccacgtgcacgtggccagaagcctgaaggtgggcagcttcctgagaatctacagcctgcacaccaagctgcagagcatgaacagcgagaaccagaccatgctgagcctggagttccacctgcacggcggcaccagctacggcagaggcatcagagtgctgcccgagagcaacagcgacgtggaccagctgaagaaggacctggagagcgccaacctgaccgccaaccagcacagcgacgtgatctgccagagcgagcccgacgacagcttccccagcagcggcagcgtgagcctgtacgaggtggagagatgccagcagctgagcgccaccatcctgaccgaccaccagtacctggagagaacccccctgtgcgccatcctgaagcagaaggccccccagcagtacagaatcagagccaagctgagaagctacaagcccagaagactgttccagagcgtgaagctgcactgccccaagtgccacctgctgcaggaggtgccccacgagggcgacctggacatcatcttccaggacggcgccaccaagacccccgacgtgaagctgcagaacaccagcctgtacgacagcaagatctggaccaccaagaaccagaagggcagaaaggtggccgtgcacttcgtgaagaacaacggcatcctgcccctgagcaacgagtgcctgctgctgatcgagggcggcaccctgagcgagatctgcaagctgagcaacaagttcaacagcgtgatccccgtgagaagcggccacgaggacctggagctgctggacctgagcgcccccttcctgatccagggcaccatccaccactacggctgcaagcagtgcagcagcctgagaagcatccagaacctgaacagcctggtggacaagaccagctggatccccagcagcgtggccgaggagctggacatcgtgctgcagtag

SEQ ID NO: 289966 - DNA, 1905 bp, Artificial Sequence
  derived and/or modified sequence
atgagcctggtgcccgccaccaactacatctacacccccctgaaccagctgaagggcggcaccatcgtgaacgtgtacggcgtggtgaagttcttcaagcccccctacctgagcaagggcaccgactactgcagcgtggtgaccatcgtggaccagaccaacgtgaagctgacctgcctgctgttcagcggcaactacgaggccctgcccatcatctacaagaacggcgacatcgtgagattccacagactgaagatccaggtgtacaagaaggagacccagggcatcaccagcagcggcttcgccagcctgaccttcgagggcaccctgggcgcccccatcatccccagaaccagcagcaagtacttcaacttcaccaccgaggaccacaagatggtggaggccctgagagtgtgggccagcacccacatgagccccagctggaccctgctgaagctgtgcgacgtgcagcccatgcagtacttcgacctgacctgccagctgctgggcaaggccgaggtggacggcgccagcttcctgctgaaggtgtgggacggcaccagaacccccttccccagctggagagtgctgatccaggacctggtgctggagggcgacctgagccacatccacagactgcagaacctgaccatcgacatcctggtgtacgacaaccacgtgcacgtggccagaagcctgaaggtgggcagcttcctgagaatctacagcctgcacaccaagctgcagagcatgaacagcgagaaccagaccatgctgagcctggagttccacctgcacggcggcaccagctacggcagaggcatcagagtgctgcccgagagcaacagcgacgtggaccagctgaagaaggacctggagagcgccaacctgaccgccaaccagcacagcgacgtgatctgccagagcgagcccgacgacagcttccccagcagcggcagcgtgagcctgtacgaggtggagagatgccagcagctgagcgccaccatcctgaccgaccaccagtacctggagagaacccccctgtgcgccatcctgaagcagaaggccccccagcagtacagaatcagagccaagctgagaagctacaagcccagaagactgttccagagcgtgaagctgcactgccccaagtgccacctgctgcaggaggtgccccacgagggcgacctggacatcatcttccaggacggcgccaccaagacccccgacgtgaagctgcagaacaccagcctgtacgacagcaagatctggaccaccaagaaccagaagggcagaaaggtggccgtgcacttcgtgaagaacaacggcatcctgcccctgagcaacgagtgcctgctgctgatcgagggcggcaccctgagcgagatctgcaagctgagcaacaagttcaacagcgtgatccccgtgagaagcggccacgaggacctggagctgctggacctgagcgcccccttcctgatccagggcaccatccaccactacggctgcaagcagtgcagcagcctgagaagcatccagaacctgaacagcctggtggacaagaccagctggatccccagcagcgtggccgaggccctgggcatcgtgcccctgcagtacgtgttcgtgatgaccttcaccctggacgacggcaccggcgtgctggaggcctacctgatggacagcgacaagttcttccagatccccgccagcgaggtgctgatggacgacgacctgcagaagagcgtggacatgatcatggacatgttctgcccccccggcatcaagatcgacgcctacccctggctggagtgcttcatcaagagctacaacgtgaccaacggcaccgacaaccagatctgctaccagatcttcgacaccaccgtggccgaggacgtgatctag

SEQ ID NO: 289967 - DNA, 1023 bp, Artificial Sequence
  derived and/or modified sequence
ctgagcctggtgcccgccaccaactacatctacacccccctgaaccagctgaagggcggcaccatcgtgaacgtgtacggcgtggtgaagttcttcaagcccccctacctgagcaagggcaccgactactgcagcgtggtgaccatcgtggaccagaccaacgtgaagctgacctgcctgctgttcagcggcaactacgaggccctgcccatcatctacaagaacggcgacatcgtgagattccacagactgaagatccaggtgtacaagaaggagacccagggcatcaccagcagcggcttcgccagcctgaccttcgagggcaccctgggcgcccccatcatccccagaaccagcagcaagtacttcaacttcaccaccgaggaccacaagatggtggaggccctgagagtgtgggccagcacccacatgagccccagctggaccctgctgaagctgtgcgacgtgcagcccatgcagtacttcgacctgacctgccagctgctgggcaaggccgaggtggacggcgccagcttcctgctgaaggtgtgggacggcaccagaacccccttccccagctggagagtgctgatccaggacctggtgctggagggcgacctgagccacatccacagactgcagaacctgaccatcgacatcctggtgtacgacaaccacgtgcacgtggccagaagcctgaaggtgggcagcttcctgagaatctacagcctgcacaccaagctgcagagcatgaacagcgagaaccagaccatgctgagcctggagttccacctgcacggcggcaccagctacggcagaggcatcagagtgctgcccgagagcaacagcgacgtggaccagctgaagaaggacctggagagcgccaacctgaccgccaaccagcacagcgacgtgatctgccagagcgagcccgacgacagcttccccaacggcgtgagcctgagaccccccggctggagcagcgtggccagaagcagactgatcgccgccagcaccagctag

SEQ ID NO: 289968 - DNA, 1380 bp, Artificial Sequence
  derived and/or modified sequence
ctgagcctggtgcccgccaccaactacatctacacccccctgaaccagctgaagggcggcaccatcgtgaacgtgtacggcgtggtgaagttcttcaagcccccctacctgagcaagggcaccgactactgcagcgtggtgaccatcgtggaccagaccaacgtgaagctgacctgcctgctgttcagcggcaactacgaggccctgcccatcatctacaagaacggcgacatcgtgagattccacagactgaagatccaggtgtacaagaaggagacccagggcatcaccagcagcggcttcgccagcctgaccttcgagggcaccctgggcgcccccatcatccccagaaccagcagcaagtacttcaacttcaccaccgaggaccacaagatggtggaggccctgagagtgtgggccagcacccacatgagccccagctggaccctgctgaagctgtgcgacgtgcagcccatgcagtacttcgacctgacctgccagctgctgggcaaggccgaggtggacggcgccagcttcctgctgaaggtgtgggacggcaccagaacccccttccccagctggagagtgctgatccaggacctggtgctggagggcgacctgagccacatccacagactgcagaacctgaccatcgacatcctggtgtacgacaaccacgtgcacgtggccagaagcctgaaggtgggcagcttcctgagaatctacagcctgcacaccaagctgcagagcatgaacagcgagaaccagaccatgctgagcctggagttccacctgcacggcggcaccagctacggcagaggcatcagagtgctgcccgagagcaacagcgacgtggaccagctgaagaaggacctggagagcgccaacctgaccgccaaccagcacagcgacgtgatctgccagagcgagcccgacgacagcttccccagcagcggcagcgtgagcctgtacgaggtggagagatgccagcagctgagcgccaccatcctgaccgaccaccagtacctggagagaacccccctgtgcgccatcctgaagcagaaggccccccagcagtacagaatcagagccaagctgagaagctacaagcccagaagactgttccagagcgtgaagctgcactgccccaagtgccacctgctgcaggaggtgccccacgagggcgacctggacatcatcttccaggacggcgccaccaagacccccgacgtgaagctgcagaacaccagcctgtacgacagcaagatctggaccaccaagaaccagaagggcagaaaggtggccgtgcacttcgtgaagaacaacggcatcctgcccctgagcaacgagtgcctgctgctgatcgaggtgctgctgtag

SEQ ID NO: 289969 - DNA, 249 bp, Artificial Sequence
  derived and/or modified sequence
atgagcctggtgcccgccaccaactacatctacacccccctgaaccagctgaagggcggcaccatcgtgaacgtgtacggcgtggtgaagttcttcaagcccccctacctgagcaagggcaccgactactgcagcgtggtgaccatcgtggaccagaccaacgtgaagctgacctgcctgctgttcagcggcaactacgaggccctgcccatcatctacaagaacggcgacatcgtgagattccactag

SEQ ID NO: 289970 - DNA, 1557 bp, Artificial Sequence
  derived and/or modified sequence
ctgagcctggtgcccgccaccaactacatctacacccccctgaaccagctgaagggcggcaccatcgtgaacgtgtacggcgtggtgaagttcttcaagcccccctacctgagcaagggcaccgactactgcagcgtggtgaccatcgtggaccagaccaacgtgaagctgacctgcctgctgttcagcggcaactacgaggccctgcccatcatctacaagaacggcgacatcgtgagattccacagactgaagatccaggtgtacaagaaggagacccagggcatcaccagcagcggcttcgccagcctgaccttcgagggcaccctgggcgcccccatcatccccagaaccagcagcaagtacttcaacttcaccaccgaggaccacaagatggtggaggccctgagagtgtgggccagcacccacatgagccccagctggaccctgctgaagctgtgcgacgtgcagcccatgcagtacttcgacctgacctgccagctgctgggcaaggccgaggtggacggcgccagcttcctgctgaaggtgtgggacggcaccagaacccccttccccagctggagagtgctgatccaggacctggtgctggagggcgacctgagccacatccacagactgcagaacctgaccatcgacatcctggtgtacgacaaccacgtgcacgtggccagaagcctgaaggtgggcagcttcctgagaatctacagcctgcacaccaagctgcagagcatgaacagcgagaaccagaccatgctgagcctggagttccacctgcacggcggcaccagctacggcagaggcatcagagtgctgcccgagagcaacagcgacgtggaccagctgaagaaggacctggagagcgccaacctgaccgccaaccagcacagcgacgtgatctgccagagcgagcccgacgacagcttccccagcagcggcagcgtgagcctgtacgaggtggagagatgccagcagctgagcgccaccatcctgaccgaccaccagtacctggagagaacccccctgtgcgccatcctgaagcagaaggccccccagcagtacagaatcagagccaagctgagaagctacaagcccagaagactgttccagagcgtgaagctgcactgccccaagtgccacctgctgcaggaggtgccccacgagggcgacctggacatcatcttccaggacggcgccaccaagacccccgacgtgaagctgcagaacaccagcctgtacgacagcaagatctggaccaccaagaaccagaagggcagaaaggtggccgtgcacttcgtgaagaacaacggcatcctgcccctgagcaacgagtgcctgctgctgatcgagggcggcaccctgagcgagatctgcaagctgagcaacaagttcaacagcgtgatccccgtgagaagcggccacgaggacctggagctgctggacctgagcgcccccttcctgatccagggcaccatccaccactacggcaccggctactgcaccccccccatctgcgtgtgctacgacctgtacacctag

SEQ ID NO: 289971 - DNA, 1614 bp, Artificial Sequence
  derived and/or modified sequence
agtctggtgcccgctacaaactatatctacacacccctgaatcagttgaagggcgggacaattgtcaacgtctatggagttgtgaaattcttcaagccaccctatctttcaaaagggaccgactactgctctgtggttaccatcgtggaccagactaacgtgaagttaacttgcctgctgttttcaggcaattatgaagcgttaccaatcatctacaaaaatggagatatcgtccgcttccacaggcttaagatccaggtgtataagaaggaaacacagggcattacctcgtctgggttcgccagcttaacctttgaaggaacactgggagctcccataataccccggactagtagtaagtattttaatttcaccacagaggatcacaaaatggttgaggcccttcgcgtttgggcgtccacacatatgtctcctagctggacactgttaaaattgtgcgacgtacagccaatgcagtatttcgaccttacctgtcagttgctggggaaagccgaggttgacggtgcctcgttcctcttgaaggtgtgggacggcacgcgcacgccctttccatcttggcgtgttttaattcaggaccttgtcctcgagggagacctgagtcacattcataggctccaaaatctgaccatcgatattctcgtctacgacaaccatgtgcacgtcgcgcggtctttgaaggttgggtcctttctccgaatctactcccttcacaccaaattgcagtccatgaattctgaaaaccaaacaatgctgagcctggagttccatttgcatgggggcactagctacggtcggggcattagggtcctgccggagtctaattccgacgtcgatcaactgaaaaaggacttggagtccgcaaatttaacagccaaccagcactccgacgttatttgccagtccgaaccagatgacagtttcccttcatccgggtccgtgagtttgtacgaggtcgaacgatgccagcagttatctgctactattttgacggaccatcagtatctcgaacgcacacccctttgcgcaattctgaaacagaaagccccccagcagtaccgcatacgagccaagctccgctcttataagcctaggcgcctgtttcagtccgttaagttgcactgcccaaaatgccatctcctgcaggaggtccctcacgagggggaccttgatattatttttcaagatggcgctacaaaaacccccgacgtcaaactgcaaaacacctcactgtatgattcaaaaatttggaccacaaaaaaccaaaaaggcagaaaggtcgccgtgcactttgtgaagaataatggcattctccccctgtccaatgaatgtcttctcctgattgagggtggcacattgtccgagatctgcaaactctcaaataagttcaactccgtaattccagttcggtcgggacatgaggaccttgagctcctggacctctccgcaccctttctcattcaggggaccatccaccactacgggtgtaagcagtgctcttcccttagaagcattcagaacctgaattccttggtggacaagacaagttggataccctcatccgtggccgaggaactggacatcgtgttgcaatag

SEQ ID NO: 289972 - DNA, 1905 bp, Artificial Sequence
  derived and/or modified sequence
atgagcctcgttccagcaaccaactatatatacaccccactgaaccaacttaagggaggaaccattgtcaacgtgtacggggttgtgaaatttttcaagcccccctacttgagtaaggggaccgactattgttctgttgtcaccatcgtagatcagactaacgtcaaactcacttgtctgctgtttagcgggaattacgaggcactccccatcatttataaaaacggcgatattgttcggtttcatcgtctcaaaattcaggtgtacaaaaaagagacccagggaattacaagctcaggttttgcatctctgacgtttgagggcacactcggggcccctattatcccacgtacatcaagtaagtactttaactttactacagaagaccacaagatggtggaagctctcagagtctgggcatctactcacatgagtccttcttggactcttctgaagttatgcgacgttcagcccatgcagtactttgacctcacctgccagctgctgggcaaagctgaggtggatggagctagctttctgctgaaagtgtgggacggtaccaggaccccctttccaagctggagggtgcttatccaggatctggtgttggaaggagatttaagccacatccaccgcctgcagaacctcaccatcgatatccttgtttacgacaaccacgttcatgtcgcgcggagcttgaaggtcggaagttttctgcggatctactcgctgcacactaagttgcaatccatgaacagcgaaaaccagacaatgctgtccctcgaattccatctacatggaggcacctcttacggacgcgggatccgggtgttaccggagtcgaacagcgacgtggatcaactaaagaaggaccttgagtccgcgaatctgactgcgaatcaacattccgatgttatctgtcagtcagagcccgatgatagtttcccttcctctggtagcgtctccctctacgaggttgagcgctgtcaacagctgagcgccaccattcttactgaccaccaatatctggaacgcactcctctgtgcgccatcctaaaacagaaagcgccacagcagtacagaattagggccaagctcaggagttataaaccacgaaggctctttcagtccgtgaaattgcattgccccaagtgtcatctgcttcaggaggtacctcacgagggtgatctggacattatttttcaggacggcgcaacgaaaacacctgacgtcaagctgcaaaatacctccctctacgatagtaaaatctggaccactaagaaccagaagggacggaaggtggcagttcactttgtgaaaaacaatggcatcctgcccctgtctaatgagtgcctgctgctgatcgaaggcggaacactttccgagatctgcaagctgtccaacaagtttaactccgtcatccctgtcaggtcaggtcacgaggatctggaactacttgatctctctgctccatttctgatacaggggacgatccatcactatggatgcaaacaatgctcctcactgcgatcaattcagaatctgaactccctggtggataagacttcctggatacctagtagcgtggctgaggcacttggcatcgtgcctctgcagtatgtgttcgttatgacattcacactggacgatggaaccggtgtcttagaagcatatctcatggatagcgacaaattttttcagattcccgcctcggaggtgctcatggatgacgacctgcagaaatcagtggacatgatcatggacatgttctgcccaccgggaattaaaatagatgcttacccttggcttgagtgcttcatcaagagttataacgttacgaacggtaccgacaaccagatatgttatcagatctttgacacaacagtagctgaggacgttatttag

SEQ ID NO: 289973 - DNA, 1023 bp, Artificial Sequence
  derived and/or modified sequence
ctgagcttggtgcctgccacaaactacatttatacgcccctgaaccagctgaagggcggtactatcgtgaacgtgtatggcgtagtgaagttttttaaacccccttatctgtctaagggaactgattactgctccgttgtaactattgtagaccagaccaatgtgaagctgacctgtctgcttttctctggaaattacgaggccctacccattatatataagaacggcgacattgtgcgctttcacaggttaaagatacaggtctacaagaaggagacccagggaattaccagctcggggttcgcaagtttgacatttgagggcaccctgggcgccccgattatccctaggacttcctccaagtacttcaacttcaccactgaggatcacaagatggttgaagccctgcgtgtgtgggcttctacccatatgagcccaagctggacactgctgaaactttgcgatgtacaaccaatgcagtattttgatctcacctgccagctcctgggaaaggccgaggtcgacggcgcatcttttctgctgaaggtctgggacggtactagaactccctttcctagctggagagtcctgatacaggatcttgtgctcgagggcgacctgagccatattcataggctgcaaaacctgactatcgacatcttagtttatgataaccatgtacacgtcgcccgatcactgaaggttggatcattcctcaggatatattctttgcataccaaactccaaagcatgaatagtgagaaccagaccatgctgagcctggagttccatctgcatggcggcacttcctatgggagaggcataagggttcttccagagtccaacagtgatgtagaccagttgaagaaggacctcgagtccgccaacttaaccgcgaatcaacatagcgacgtgatctgccagtccgaaccagacgactcctttccaaatggcgtatcgctgcgtcctcctggctggtcctccgtggcccgctcccggttgattgccgcctccacatcctag

SEQ ID NO: 289974 - DNA, 1380 bp, Artificial Sequence
  derived and/or modified sequence
ttgtctttagtgccggcaaccaattacatctatacgccactaaatcagctcaagggtggcactattgtgaatgtctatggagttgtgaagtttttcaagccaccctatctaagtaagggcaccgactactgctcagttgtcaccatcgtggaccagacgaacgtaaagctgacctgcctattgttcagcggaaattatgaggcgctccctatcatttataagaatggggatatcgtccgtttccatagattgaagatccaggtgtacaagaaggaaactcagggtatcacatcttccggattcgcaagcctgactttcgaaggcacgctgggcgccccaattatcccaaggaccagctctaagtatttcaacttcactacagaggaccataaaatggtggaagccttgcgggtgtgggccagcacccacatgtccccttcctggaccttgctgaagttatgcgacgtgcagcctatgcagtattttgatctgacctgtcagcttttaggcaaggccgaggtcgatggcgcgagcttcttgctgaaggtgtgggacgggactagaacaccatttccctcctggcgggtgctcatccaggacctggtccttgagggagacctgtcgcacattcaccgcttgcagaacctaaccatcgacattttggtgtatgataaccacgtgcatgtggcgcgttccctgaaggttggttcttttttgcgcatttattctctgcataccaaattacagagtatgaacagtgagaatcagacgatgctttctttagagttccatttgcatgggggcacaagttacggcaggggcatcagagtacttccggagagcaattccgacgtggatcagctgaagaaagacctcgagtcagctaaccttacagctaaccaacacagcgacgttatctgtcaatcggaacccgacgactcgttcccatccagcggcagtgtcagcttatacgaagtggagcgatgtcagcagctctccgcgaccattctaacagatcaccaatacttggaacgtacacctctgtgcgctatcctcaaacagaaggctcctcaacagtatcggattcgcgctaagttaagaagttacaaacctagacgcctgttccaatctgttaagctgcattgtcctaagtgccatctgctccaggaagtcccacacgagggcgatctggatatcatcttccaagacggggcgactaagacccccgatgtcaagctgcagaatacaagcctgtatgattccaaaatttggaccacgaaaaaccagaaaggccgaaaagtggccgtacactttgtgaaaaacaatggcattttacccctgtctaatgagtgcctcctcctgattgaagtcctactgtag

SEQ ID NO: 289975 - DNA, 249 bp, Artificial Sequence
  derived and/or modified sequence
atgtccctagtgccagctactaattatatctacacccccttaaaccaacttaagggtggaactatagtgaatgtttacggagtcgtgaaattcttcaagccaccatatttgagcaagggaaccgattactgtagcgtcgtgacgatcgtagatcaaacaaacgtgaagctgacatgcctgttgttcagcggtaattacgaggcactccccatcatctacaagaacggcgacatagttcggttccactag

SEQ ID NO: 289976 - DNA, 1557 bp, Artificial Sequence
  derived and/or modified sequence
ctgtctctcgttcccgctaccaactacatctacactccactgaaccagctgaagggaggtaccatcgtcaacgtctatggagtggtaaaattcttcaaaccaccttatctcagcaaaggcaccgactattgttctgtcgtaacaattgtagaccagaccaacgttaaactcacatgtctgctgtttagcggaaattacgaggcactgcctattatctataagaatggcgacattgtgcggtttcaccggcttaagatccaggtctacaagaaggagacacaaggcatcactagcagcggcttcgcttctctgaccttcgagggcacccttggggccccaataattccgagaacctcatctaagtactttaacttcacaactgaggaccataaaatggtagaagccctacgcgtttgggcttctacccacatgagtcccagctggactctgctgaagctttgcgatgtgcagcccatgcagtacttcgatctgacatgccaactgctgggtaaggcggaagtcgacggtgcaagtttcctcctcaaggtgtgggatggcacccgcaccccattcccctcgtggcgagtacttatccaggatcttgttctggaaggcgacctcagtcatatccaccggctacagaatttgaccatcgacatactggtgtacgacaaccacgtgcatgtggctcgctctttgaaggtaggttcatttctgcgcatctattccttacataccaaactgcaaagtatgaattccgagaaccagaccatgctgagtctggagttccaccttcacgggggcacgagctatggccgaggcatccgtgtgctgccggagagtaactccgacgttgatcagctgaaaaaagacctggagagcgctaatctaacagccaatcaacatagcgatgtgatttgccaaagcgaaccagacgactcattcccgtctagcggatctgtctctctatatgaagtggaacggtgccagcagttgtctgccactattctaactgaccaccagtacctagagcgaactccgctctgtgccatactgaaacagaaggcaccccagcaataccgaatcagggctaaactgcggtcttataaacccaggcgcctcttccagagcgtgaaactccactgcccgaaatgtcatttattacaggaagtcccacacgagggtgacttggatattatcttccaggacggcgctaccaaaacccctgacgtcaaactgcaaaatacgtcactgtacgatagtaaaatatggacaacgaagaaccagaaaggccgaaaggtagcagtgcacttcgtgaaaaacaacggtatactcccactgagcaatgagtgcctactcctcatagagggcgggacccttagtgaaatttgtaaacttagtaataagttcaattccgtaataccagtcaggtccgggcatgaggacctcgagctcttggaccttagcgcgcccttccttatccaaggcaccattcaccactatggcacaggctactgcacacctcctatctgcgtctgttatgatctctatacttag

SEQ ID NO: 289977 - DNA, 1614 bp, Artificial Sequence
  derived and/or modified sequence
agcctggtgcctgccaccaactacatctacacccccctgaaccagctgaagggcggcaccatcgtgaatgtgtatggagtggtgaagttcttcaagccaccctacctgagcaagggcacagactactgcagcgtggtgaccatcgtggaccagaccaacgtgaagctgacctgcctgctcttcagcggcaactatgaggccctgcccatcatctacaagaatggagacatcgtgcgcttccaccggctgaagatccaggtgtacaagaaggagacccagggcatcaccagcagcggctttgccagcctgacctttgagggcaccctgggcgcccccatcatccccaggaccagcagcaagtacttcaacttcaccacagaggaccacaagatggtggaggccctgcgggtgtgggccagcacccacatgagccccagctggaccctgctgaagctgtgtgatgtgcagcccatgcagtactttgacctgacctgccagctgctgggcaaggccgaggtggatggagccagcttcctgctgaaggtgtgggatggcaccaggacccccttccccagctggagggtgctgatccaggacctggtgctggagggggacctgagccacatccaccggctgcagaacctgaccatcgacatcctggtgtatgacaaccacgtgcacgtggcccggagcctgaaggtgggcagcttcctgcgcatctacagcctgcacaccaagctgcagagcatgaacagcgagaaccagaccatgctgagcctggagttccacctgcatggaggcaccagctatggccggggcatccgggtgctgcctgagagcaacagtgatgtggaccagctgaagaaggacctggagagcgccaacctgacagccaaccagcacagtgatgtgatctgccagagcgagccagatgacagcttccccagcagcggctctgtgtccctgtatgaggtggagcgctgccagcagctgagcgccaccatcctgacagaccaccagtacctggagaggacccccctgtgtgccatcctgaagcagaaggccccccagcagtaccgcatccgggccaagctgcggagctacaagcccaggaggctcttccagagcgtgaagctgcactgccccaagtgccacctgctgcaggaggtgccccatgaaggagacctggacatcatcttccaggatggagccaccaagaccccagatgtgaagctgcagaacaccagcctgtatgacagcaagatctggaccaccaagaaccagaagggcaggaaggtggccgtgcactttgtgaagaacaacggcatcctgcccctgagcaatgaatgtctgctgctgattgagggcggcaccctgtctgagatctgcaagctgagcaacaagttcaacagcgtcatccctgtgcgcagcggccacgaggacctggagctgctggacctgagcgcccccttcctgatccagggcaccatccaccactacggctgcaagcagtgcagcagcctgcggagcatccagaacctgaacagcctggtggacaagacctcctggatccccagctctgtggccgaggagctggacatcgtgctgcagtag

SEQ ID NO: 289978 - DNA, 1905 bp, Artificial Sequence
  derived and/or modified sequence
atgagcctggtgcctgccaccaactacatctacacccccctgaaccagctgaagggcggcaccatcgtgaatgtgtatggagtggtgaagttcttcaagccaccctacctgagcaaaggaacagactactgcagcgtggtgaccatcgtggaccagaccaacgtgaagctgacctgcctgctcttcagcggcaactatgaggccctgcccatcatctacaagaatggagacatcgtgcgcttccaccggctgaagatccaggtgtacaagaaggagacccagggcatcaccagcagcggctttgccagcctgacctttgagggcaccctgggcgcccccatcatccccaggaccagcagcaagtacttcaacttcaccacagaggaccacaagatggtggaggccctgcgggtgtgggccagcacccacatgagccccagctggaccctgctgaagctgtgtgatgtgcagcccatgcagtactttgacctgacctgccagctgctgggcaaggccgaggtggatggagccagcttcctgctgaaggtgtgggatggcaccaggacccccttccccagctggagggtgctgatccaggacctggtgctggagggggacctgagccacatccaccggctgcagaacctgaccatcgacatcctggtgtatgacaaccacgtgcacgtggcccggagcctgaaggtgggcagcttcctgcgcatctacagcctgcacaccaagctgcagagcatgaacagcgagaaccagaccatgctgagcctggagttccacctgcacggcggcaccagctatggccggggcatccgggtgctgcctgagagcaacagtgatgtggaccagctgaagaaggacctggagagcgccaacctgacagccaaccagcacagtgatgtgatctgccagagcgagccagatgacagcttccccagcagcggctctgtgtccctgtatgaggtggagcgctgccagcagctgagcgccaccatcctgacagaccaccagtacctggagaggacccccctgtgtgccatcctgaagcagaaggccccccagcagtaccgcatccgggccaagctgcggagctacaagccccggcggctcttccagagcgtgaagctgcactgccccaagtgccacctgctgcaggaggtgccccatgaaggagacctggacatcatcttccaggatggagccaccaagaccccagatgtgaagctgcagaacaccagcctgtatgacagcaagatctggaccaccaagaaccagaagggcaggaaggtggccgtgcactttgtgaagaacaacggcatcctgcccctgagcaatgaatgtctgctgctgattgaaggaggcaccctgtctgagatctgcaagctgagcaacaagttcaacagcgtcatccctgtgcgcagcggccacgaggacctggagctgctggacctgagcgcccccttcctgatccagggcaccatccaccactacggctgcaagcagtgcagcagcctgcggagcatccagaacctgaacagcctggtggacaagacctcctggatccccagctctgtggccgaggccctgggcatcgtgcccctgcagtatgtgtttgtgatgaccttcaccctggatgatggcaccggggtgctggaggcctacctgatggacagcgacaagttcttccagatcccagccagcgaggtgctgatggatgatgacctgcagaagtctgtggacatgatcatggacatgttctgccccccaggcatcaagattgatgcctacccctggctggagtgcttcatcaagagctacaacgtgaccaacggcacagacaaccagatctgctaccagatctttgacaccaccgtggctgaagatgtgatctag

SEQ ID NO: 289979 - DNA, 1023 bp, Artificial Sequence
  derived and/or modified sequence
ctgagcctggtgcctgccaccaactacatctacacccccctgaaccagctgaagggcggcaccatcgtgaatgtgtatggagtggtgaagttcttcaagccaccctacctgagcaaaggaacagactactgcagcgtggtgaccatcgtggaccagaccaacgtgaagctgacctgcctgctcttcagcggcaactatgaggccctgcccatcatctacaagaatggagacatcgtgcgcttccaccggctgaagatccaggtgtacaagaaggagacccagggcatcaccagcagcggctttgccagcctgacctttgagggcaccctgggcgcccccatcatccccaggaccagcagcaagtacttcaacttcaccacagaggaccacaagatggtggaggccctgcgggtgtgggccagcacccacatgagccccagctggaccctgctgaagctgtgtgatgtgcagcccatgcagtactttgacctgacctgccagctgctgggcaaggccgaggtggatggagccagcttcctgctgaaggtgtgggatggcaccaggacccccttccccagctggagggtgctgatccaggacctggtgctggagggggacctgagccacatccaccggctgcagaacctgaccatcgacatcctggtgtatgacaaccacgtgcacgtggcccggagcctgaaggtgggcagcttcctgcgcatctacagcctgcacaccaagctgcagagcatgaacagcgagaaccagaccatgctgagcctggagttccacctgcacggcggcaccagctatggccggggcatccgggtgctgcctgagagcaacagtgatgtggaccagctgaagaaggacctggagagcgccaacctgacagccaaccagcacagtgatgtgatctgccagagcgagccagatgacagcttccccaatggagtgtccctgcggcccccaggctggagctctgtggcccggagccggctgattgctgccagcaccagctag

SEQ ID NO: 289980 - DNA, 1380 bp, Artificial Sequence
  derived and/or modified sequence
ctgagcctggtgcctgccaccaactacatctacacccccctgaaccagctgaagggcggcaccatcgtgaatgtgtatggagtggtgaagttcttcaagccaccctacctgagcaaaggaacagactactgcagcgtggtgaccatcgtggaccagaccaacgtgaagctgacctgcctgctcttcagcggcaactatgaggccctgcccatcatctacaagaatggagacatcgtgcgcttccaccggctgaagatccaggtgtacaagaaggagacccagggcatcaccagcagcggctttgccagcctgacctttgagggcaccctgggcgcccccatcatccccaggaccagcagcaagtacttcaacttcaccacagaggaccacaagatggtggaggccctgcgggtgtgggccagcacccacatgagccccagctggaccctgctgaagctgtgtgatgtgcagcccatgcagtactttgacctgacctgccagctgctgggcaaggccgaggtggatggagccagcttcctgctgaaggtgtgggatggcaccaggacccccttccccagctggagggtgctgatccaggacctggtgctggagggggacctgagccacatccaccggctgcagaacctgaccatcgacatcctggtgtatgacaaccacgtgcacgtggcccggagcctgaaggtgggcagcttcctgcgcatctacagcctgcacaccaagctgcagagcatgaacagcgagaaccagaccatgctgagcctggagttccacctgcacggcggcaccagctatggccggggcatccgggtgctgcctgagagcaacagtgatgtggaccagctgaagaaggacctggagagcgccaacctgacagccaaccagcacagtgatgtgatctgccagagcgagccagatgacagcttccccagcagcggctctgtgtccctgtatgaggtggagcgctgccagcagctgagcgccaccatcctgacagaccaccagtacctggagaggacccccctgtgtgccatcctgaagcagaaggccccccagcagtaccgcatccgggccaagctgcggagctacaagccccggcggctcttccagagcgtgaagctgcactgccccaagtgccacctgctgcaggaggtgccccatgaaggagacctggacatcatcttccaggatggagccaccaagaccccagatgtgaagctgcagaacaccagcctgtatgacagcaagatctggaccaccaagaaccagaagggcaggaaggtggccgtgcactttgtgaagaacaacggcatcctgcccctgagcaatgaatgtctgctgctgattgaggtgctgctgtag

SEQ ID NO: 289981 - DNA, 249 bp, Artificial Sequence
  derived and/or modified sequence
atgagcctggtgcctgccaccaactacatctacacccccctgaaccagctgaagggcggcaccatcgtgaatgtgtatggagtggtgaagttcttcaagccaccctacctgagcaaaggaacagactactgcagcgtggtgaccatcgtggaccagaccaacgtgaagctgacctgcctgctcttcagcggcaactatgaggccctgcccatcatctacaagaatggagacatcgtgcgcttccactag

SEQ ID NO: 289982 - DNA, 1557 bp, Artificial Sequence
  derived and/or modified sequence
ctgagcctggtgcctgccaccaactacatctacacccccctgaaccagctgaagggcggcaccatcgtgaatgtgtatggagtggtgaagttcttcaagccaccctacctgagcaaaggaacagactactgcagcgtggtgaccatcgtggaccagaccaacgtgaagctgacctgcctgctcttcagcggcaactatgaggccctgcccatcatctacaagaatggagacatcgtgcgcttccaccggctgaagatccaggtgtacaagaaggagacccagggcatcaccagcagcggctttgccagcctgacctttgagggcaccctgggcgcccccatcatccccaggaccagcagcaagtacttcaacttcaccacagaggaccacaagatggtggaggccctgcgggtgtgggccagcacccacatgagccccagctggaccctgctgaagctgtgtgatgtgcagcccatgcagtactttgacctgacctgccagctgctgggcaaggccgaggtggatggagccagcttcctgctgaaggtgtgggatggcaccaggacccccttccccagctggagggtgctgatccaggacctggtgctggagggggacctgagccacatccaccggctgcagaacctgaccatcgacatcctggtgtatgacaaccacgtgcacgtggcccggagcctgaaggtgggcagcttcctgcgcatctacagcctgcacaccaagctgcagagcatgaacagcgagaaccagaccatgctgagcctggagttccacctgcacggcggcaccagctatggccggggcatccgggtgctgcctgagagcaacagtgatgtggaccagctgaagaaggacctggagagcgccaacctgacagccaaccagcacagtgatgtgatctgccagagcgagccagatgacagcttccccagcagcggctctgtgtccctgtatgaggtggagcgctgccagcagctgagcgccaccatcctgacagaccaccagtacctggagaggacccccctgtgtgccatcctgaagcagaaggccccccagcagtaccgcatccgggccaagctgcggagctacaagccccggcggctcttccagagcgtgaagctgcactgccccaagtgccacctgctgcaggaggtgccccatgaaggagacctggacatcatcttccaggatggagccaccaagaccccagatgtgaagctgcagaacaccagcctgtatgacagcaagatctggaccaccaagaaccagaagggcaggaaggtggccgtgcactttgtgaagaacaacggcatcctgcccctgagcaatgaatgtctgctgctgattgaaggaggcaccctgtctgagatctgcaagctgagcaacaagttcaacagcgtcatccctgtgcgcagcggccacgaggacctggagctgctggacctgagcgcccccttcctgatccagggcaccatccaccactatggaacaggctactgcaccccacccatctgtgtgtgctatgacctgtacacctag

SEQ ID NO: 289983 - DNA, 1614 bp, Artificial Sequence
  derived and/or modified sequence
agcctggtgcccgccaccaactacatctacacccccctgaaccagttaaagggaggtaccattgtcaacgtttatggtgtcgtgaagtttttcaagccaccctacttgagcaaaggaacggactactgcagtgtggtcaccatcgtggatcagaccaacgtgaaattgacttgcctcttgttctcaggcaactatgaagccctccccataatctacaagaatggggatattgtacggttccaccggttgaagatacaagtctacaaaaaggaaacccaggggatcacaagctccggattcgcttctctgaccttcgagggaaccttaggtgcacccatcatacctcggacctctagcaaatactttaatttcaccacagaggatcacaagatggttgaggctttgcgcgtgtgggcttccacacacatgagcccctcttggaccctgctgaaactatgtgacgtacagccaatgcagtactttgacctgacttgtcaactgctgggcaaagcagaggtggatggtgcaagttttctgttaaaagtatgggatggcacccgaacccccttcccatcctggagggtcttgatccaggacttagtgcttgaaggagatttatctcatatccaccggctgcagaacctaactattgatattctggtgtatgacaatcacgtccacgtggctagatcactcaaggtgggctcatttcttaggatctattctctgcacaccaagttgcaatcgatgaacagtgaaaaccagacaatgctgagcctggagttccacctccacgggggcacaagttatgggaggggtataagggttctacccgaaagtaattctgatgtagaccagctgaaaaaggatttggagtccgcaaacctaaccgctaatcaacatagcgacgtgatctgtcagagcgaaccagatgacagttttccttcctcggggtctgtgagtctgtacgaggtcgaacgatgccagcagttgagcgcaaccatcctcaccgaccatcagtatctcgagagaacgccactgtgtgctatactgaagcaaaaggctccacagcagtacagaattcgtgcaaaactacgcagctacaaaccccggcggctctttcagagtgttaagctgcactgtcctaagtgccacctcttacaggaagtgccccatgagggggatctagacatcatcttccaagatggcgccactaaaacgcccgatgtgaagcttcagaacaccagtctgtacgattcaaagatctggaccactaagaaccagaaaggtcgaaaggtagccgtacactttgtaaagaacaacgggatccttcccctttccaatgagtgtctcctcttgatcgaaggcgggactctgagcgagatctgtaagctgagtaacaaattcaattccgtgattcccgtgagaagtgggcacgaggacttggagctcctggatctctctgcgccttttctaatacaaggaacaatccaccactatgggtgtaaacagtgctcctctttgcgcagcatacagaatctcaatagcttggtggacaagacttcctggatcccatcatcagtggccgaggagctggacatcgtactgcagtag

SEQ ID NO: 289984 - DNA, 1905 bp, Artificial Sequence
  derived and/or modified sequence
atgagcctggtgcccgccaccaactacatctacacccccctgaaccagttgaagggtggcacaatcgtgaacgtctatggggtggtcaagttttttaagcccccctacctatctaagggcactgactactgctctgttgtgaccattgtggaccaaacgaacgtaaaattgacttgcctgctgttcagtggcaattatgaagccttgcctataatttataaaaatggagacatcgtgaggttccacagactcaagattcaagtgtacaagaaggagacccagggcatcaccagctcgggatttgctagcctgaccttcgagggtactctgggtgctccaatcatacccagaacctcttccaaatactttaatttcaccactgaggatcacaaaatggtggaggcattacgtgtctgggcgtctacccatatgagccctagttggactctgctaaagttgtgcgatgttcagcctatgcaatacttcgatctcacatgtcagctcctgggtaaggccgaggtcgacggcgcatccttcctccttaaggtctgggatggcacacgcaccccattcccaagctggcgagttcttattcaagacctagtcctggagggggatctttcacacatccaccggcttcaaaatctgacaatagacatacttgtatatgacaatcacgtgcatgtagctaggagccttaaagttggatcgttcctccgcatttattctctccataccaagttgcagtcaatgaactcggagaatcagaccatgctatccctggagtttcacctgcatgggggaacaagttatggacgtggcatccgcgtgctccccgaatcaaacagtgatgttgaccagctgaagaaggatttagagagcgccaatttgacagcgaatcaacattctgacgtgatatgtcagtccgaaccagatgacagcttcccatcatctgggtccgtaagtctgtacgaagttgaaagatgtcagcagctcagcgcaactatactaaccgaccaccagtacttagaacgaactcctctctgtgccattttgaaacagaaagccccccagcagtatagaatcagagctaaactcagatcctacaaacctcggagactgttccagtcagtcaaactgcattgccccaagtgtcacctgctgcaggaggttccccacgaaggagatttggatatcatttttcaggacggggcaactaagacacctgacgttaagttgcagaatacttctctttatgactccaagatctggacaactaagaaccagaaaggtaggaaagtggccgtacacttcgtgaaaaataacggtatcctgccattgagtaacgagtgtctgttacttatcgaaggcggcactttatcagaaatctgtaagctcagtaataagttcaatagcgtgatccccgtgcgatcagggcatgaagacttagaactgttagacctgagtgctccgttcctgatacaggggacaattcatcactatggttgtaagcagtgcagtagtttaagaagcatacagaacttgaacagtctcgttgacaaaacgagctggatccccagttcagttgccgaggcccttgggattgtgccgctgcagtatgtgttcgtcatgacattcacactggacgatggaacgggcgtgctcgaagcatatcttatggacagcgataagttttttcagattcccgctagcgaggtgttaatggacgatgacttgcaaaaatccgtggacatgatcatggatatgttttgccccccaggaattaaaattgatgcatatccctggctggagtgttttattaagtcctataacgtgactaatggtactgacaaccagatatgttatcagattttcgatacgacagttgccgaagacgtcatttag

SEQ ID NO: 289985 - DNA, 1023 bp, Artificial Sequence
  derived and/or modified sequence
ctgagcctggtgcccgccaccaactacatctacacccccctgaaccagctgaaaggaggcactatcgtgaacgtgtatggtgtggtgaagttttttaaacctccttacctctcgaaagggactgactactgctctgtggtgacaatcgtggatcaaactaacgtcaaactaacctgtctgttgttttctggcaattacgaggcactgccgattatctataaaaatggcgatatcgtaaggttccatcgattgaagatacaagtttataagaaggaaactcaggggataacttcgtctggtttcgctagcctcaccttcgagggtacactgggagcacccattatccctcggacttcatctaagtactttaacttcaccacagaagaccacaaaatggtggaggccctcagggtctgggccagcacgcacatgtcaccaagttggaccctcctgaagctttgcgacgtccaacctatgcagtatttcgaccttacgtgccagttactgggcaaggccgaggtggacggggctagcttcctcctcaaggtttgggatggcactcgtaccccattcccttcttggagagtcctaattcaggacctcgtgctggaaggggatctgagccacatccatcgcctgcagaatctcacgatagacatccttgtttacgacaaccacgtgcacgtcgctcggagcctaaaggtaggatcctttctaaggatctattccctgcacaccaaactgcagtcaatgaacagcgagaaccaaactatgctgagcctcgagttccacctgcatggtgggaccagttatggcagaggcattagagtcctaccagaatccaacagcgacgtcgaccaattgaaaaaggatctggaatcggccaatctcacagccaaccagcactctgatgtgatctgtcagagcgagccagacgactccttcccaaacggagtgtccctccgcccgcccggatggtcctccgtggcaagaagtcggctcatcgctgcctctacttcctag

SEQ ID NO: 289986 - DNA, 1380 bp, Artificial Sequence
  derived and/or modified sequence
ctgagcctggtgcccgccaccaactacatctacacccccctgaaccagctgaaagggggtacgatcgttaatgtttacggtgttgtcaagttcttcaagcccccttatctgtctaaggggacagattactgctccgtggttaccatcgtggatcagacgaacgttaagcttacttgcttactgttcagcgggaactacgaggccttgcctattatctacaagaacggcgatatcgtccggttccaccgcctgaaaatccaagtctataagaaagagactcagggtattaccagttccggcttcgcctctctgacattcgagggcaccctgggcgctccaatcatccctcgaacttcaagcaaatactttaactttacaacagaggatcataagatggtggaggccctgcgagtgtgggcctccacgcatatgtctccctcatggacactacttaaactgtgtgatgtgcaacctatgcagtactttgacttaacctgccagctgttgggaaaggctgaagtggatggcgcgtcattcctgctgaaagtgtgggatggaactaggacccccttcccaagctggcgggtgctcatacaggatctggtgctggagggtgatctttctcacattcaccgcttgcagaaccttaccattgacattctagtgtacgacaatcacgtgcacgtggcgagaagtctgaaggtcggaagctttcttaggatttacagtctgcacacaaagctgcagtccatgaattctgaaaaccagacaatgctgagtttagaattccacctgcacggaggcacatcctatggccgcggcattcgggtcctgcctgaaagcaactctgacgtggatcagctaaagaaagacctagaaagcgcaaacctaacggcgaatcaacattctgacgtgatctgccaaagtgagcctgacgacagcttcccttcatccggcagtgttagtctgtacgaggtggagcgttgtcagcagctgtccgcgactatcttgacagatcaccagtatctagaacgtactcctctctgcgccatattaaagcagaaagctcctcagcagtaccgaattagggcgaagctgcggagctataagcctagaaggttgttccagagcgtgaagcttcactgccccaaatgtcacctattacaagaagtgccgcatgagggagacctggatatcatctttcaagacggcgccacgaagacccccgacgtaaagctgcagaacacttctctctacgactccaagatttggaccactaagaaccaaaaggggcggaaggtagccgtacacttcgttaagaacaatgggatactcccattaagcaatgagtgtctactgctcatcgaagtgttgctatag

SEQ ID NO: 289987 - DNA, 249 bp, Artificial Sequence
  derived and/or modified sequence
atgagcctggtgcccgccaccaactacatctacacccccctgaaccagctgaaggggggcactatcgtgaacgtctacggcgtagtcaagttttttaaacctccttatctgagtaaaggcacggattactgctcagtagtgaccatagtggaccagactaatgtcaaactcacgtgcttgctgtttagtggcaactacgaggccttgcccatcatttataagaatggagacatcgtgaggttccactag

SEQ ID NO: 289988 - DNA, 1557 bp, Artificial Sequence
  derived and/or modified sequence
ctgagcctggtgcccgccaccaactacatctacacccccctgaaccagctgaaaggaggaacgatcgtcaacgtttacggagtggtcaaattcttcaagcctccgtacctgtctaaaggcaccgactactgctccgtggtgaccatcgtcgatcagacaaatgtcaaacttacctgtctcttattttccggtaactacgaggcgctgcccatcatctataagaacggtgacattgtcagatttcataggctcaagatccaggtgtacaagaaggagacacaaggaataacgagctccggattcgctagcctcaccttcgaaggcaccttgggagcacccatcatcccccggaccagcagtaaatacttcaatttcaccacggaagatcacaaaatggtcgaggctctaagagtttgggctagtactcacatgtctccatcctggactcttctgaagctctgtgacgttcaacctatgcagtacttcgacctgacctgccagctcctgggcaaagccgaggtagacggggcttcctttctcctgaaagtgtgggacggcacccggactccttttccatcttggagggtgctgatccaggatctcgtgctcgagggtgacttgagccatatccacaggctgcaaaacctgacgattgacatcctcgtgtacgataatcatgttcatgtggcccgaagccttaaagtcggcagtttccttcggatttactcccttcacacgaagctccagtcaatgaatagcgaaaaccagaccatgctctcactagaatttcacttacatggtggtacttcctacgggagggggatccgagtattacccgagagtaatagtgacgtcgatcagctgaagaaagacctcgaaagcgccaacctcacagcgaaccaacattccgacgtgatttgtcagtccgagccagatgatagcttcccatccagcgggagtgtcagtctgtacgaggtagaacggtgtcagcagttatccgcaaccattttaaccgaccatcaatatctcgaaaggacccccctgtgcgcgatcctgaagcagaaagccccccagcagtatcgcattagagccaaactgagaagctacaagccacgaagactcttccaatcggtgaaactgcattgccccaaatgtcacctgctgcaagaggtcccgcatgaaggagatctcgacattatctttcaggacggtgccacgaagaccccagacgtgaaactccaaaatacatccctgtacgacagcaaaatttggaccacaaagaaccaaaaggggcgaaaagtcgcggtccatttcgtaaaaaacaacggcatccttccactgagcaacgagtgcttactgctgatcgaggggggtaccctctccgagatatgtaagctctccaacaagttcaattctgtgatccctgtgcgctcaggccacgaagatctggagctgctggatttatctgcacccttcctcattcaggggacaattcaccactatgggacgggctactgtaccccaccaatctgtgtgtgttatgacctgtatacctag

SEQ ID NO: 289989 - DNA, 1614 bp, Artificial Sequence
  derived and/or modified sequence
agtttagtccctgctaccaactacatctataccccactgaaccagctgaaagggggaacaattgtcaacgtgtatggcgtggtgaagtttttcaagcccccttatttgtcgaagggcacagactactgtagcgttgtcactatcgttgatcaaactaacgtcaagcttacctgtctgttgtttagcggaaattacgaggcactgcccataatttataagaatggcgatatagtgcgttttcaccggttgaagatccaggtctacaagaaggaaacccagggaattacgagctctggctttgcttcactgaccttcgagggaaccctcggggctcccattatccctcgaacgtcctctaaatacttcaacttcactaccgaggaccacaaaatggtggaggctcttcgggtgtgggcctccacccacatgagcccatcgtggacactcctgaagctttgtgacgtccagcctatgcagtatttcgaccttacttgtcagctgcttggaaaggcagaggttgacggcgcttcctttttgctcaaggtatgggacggaaccagaacacctttccctagttggagagttctgatacaggatctagtccttgagggagacctgtcccacattcaccggctacagaaccttactattgatatcttggtttatgacaaccatgtgcacgtggcccgatctttaaaggtcggatcttttctccgcatctactctcttcacacaaaattgcagtcgatgaactccgagaaccagaccatgctgagtcttgaatttcatctacacggcggaacaagctatggacgtggcattagagtgctcccagagagcaactctgatgtggatcagttaaagaaagatctcgagtccgccaatcttaccgccaaccagcattccgacgtgatttgtcagtcggaacctgacgactcatttcccagttccggcagtgtctccctatatgaagtcgagcgctgtcagcaattgtcggccactatcttgaccgaccaccaatacctcgaaagaacacccttatgcgctattctgaagcagaaggctcctcagcagtacaggatccgcgcaaagttgcggagttataagcctaggagactgtttcagagcgtgaagttgcattgtccgaagtgtcatctgttgcaggaagtgcctcatgagggcgacctggacataatttttcaggacggcgctacaaagacaccggatgtcaagctgcagaatacatccctgtacgactcaaaaatttggaccacaaagaatcaaaaaggccgtaaagtggctgtgcatttcgttaaaaataatggaatactacccctgtccaacgagtgtttgctgcttatcgaaggaggtactttgagcgaaatctgtaaactatccaacaagttcaattcggtcatccctgtgaggagcggtcacgaggacctcgagcttctggatctgagtgcaccttttctcatccagggtaccatacaccactatggctgcaagcaatgttcaagtctgcgatcaatacagaatcttaatagcttggttgacaaaacatcctggattccctctagcgtggccgaggaactggatatcgtgctccagtag

SEQ ID NO: 289990 - DNA, 1905 bp, Artificial Sequence
  derived and/or modified sequence
atgtcactggttcctgctacaaactacatctacactcctctgaaccagctcaagggcggtacaatcgtgaacgtctatggggttgtaaaattcttcaaacccccatacttgagcaaaggcaccgattactgttctgtcgtgaccatagtcgatcaaaccaatgtgaaacttacatgcctcctgttctccggaaattacgaagcattgcctatcatatataagaacggggatatcgtgcgtttccacaggctgaagattcaagtttacaagaaagagactcaaggtatcacgagcagtgggttcgcatctttaacttttgagggcacactgggggctcctatcatcccccgtacctctagcaagtacttcaactttaccaccgaggaccacaagatggttgaagcccttagggtctgggcctccacccatatgtccccttcctggacactcctaaagctttgtgatgtgcaacctatgcagtattttgacctcacctgccaactgctcggcaaggcagaggtagatggcgcaagcttcctgctcaaggtgtgggatgggacccggactcctttcccttcatggcgcgtgctcatccaagacttggtcctagagggcgacctgtctcacatacaccgactacaaaacctgacaatagatattctcgtgtacgataatcatgtgcacgttgcgaggtcgctgaaagtcggctcattcttacgtatatatagccttcacaccaagctgcagagtatgaattccgagaaccagaccatgttgtcactggagttccacctgcatggcggtacgagctacggcagaggcattcgcgtgttgcccgagtcaaattctgatgtggatcagctgaagaaagacctggagtcggcaaatctcacagctaatcagcattctgatgtcatatgccagagcgagcccgacgactcatttcctagctctggttccgtttccttatatgaggtcgagcggtgtcagcagctttccgctaccatcttgactgaccatcagtatctggaaaggactcctctgtgcgctatcctaaagcagaaggccccacagcagtaccggatcagagcgaaactgcgttcttacaaaccaaggaggctgtttcagtccgtgaaactacactgtccgaaatgtcatttgctgcaggaggtcccccacgagggagatctcgatattatcttccaagatggggcaaccaagacaccagatgtcaaactgcagaatacgtcgctgtacgactccaaaatatggactaccaaaaatcagaaaggcaggaaggtagctgtccacttcgttaagaataacgggattcttcctctgtctaacgagtgtctcttactcatagagggcggtactttgagtgagatttgcaaactgtcgaataaatttaatagcgtcatacccgtccggtcggggcatgaggacctggaattgctggatctatctgccccatttctcattcaggggactatccaccactacggttgtaagcagtgttcatctctcagaagcattcagaacctgaacagtcttgtggataagacatcctggattccctccagcgttgccgaagctctgggtatagttcccctccagtacgtattcgtaatgacctttactctggacgatggcacaggcgtgcttgaagcctacctgatggatagcgacaaattcttccagatccccgcatcggaagtccttatggatgacgacctgcagaagtcagtggatatgatcatggacatgttttgcccccctggcatcaagatcgacgcctacccatggctggaatgcttcatcaaaagttacaacgtgaccaacgggacagacaaccagatttgttatcagatcttcgatacaacagtggccgaggacgtgatctag

SEQ ID NO: 289991 - DNA, 1023 bp, Artificial Sequence
  derived and/or modified sequence
ctgagtctcgtccctgccacaaactacatttacaccccattaaatcagctgaaaggtggaaccatagttaacgtgtacggggtggttaaattcttcaaaccgccatatctatccaaaggtacagactattgtagtgtcgtgacaatcgtagaccagacaaacgtcaaattgacttgtttactattttccggcaactatgaggcactaccaattatttacaagaacggagatatcgttcgtttccacagactgaagattcaggtatataagaaggagactcaaggcatcacgtctagtggcttcgccagcctgaccttcgaagggacacttggcgctccaattattccaaggaccagctctaaatattttaatttcactacagaggatcacaaaatggtagaagcactcagagtatgggcttcgacgcatatgtctccatcctggacactcttgaaactatgtgatgtccagccgatgcagtacttcgaccttacatgtcagctactgggcaaagctgaagtggacggagcctccttcctcttgaaagtctgggacgggacccgtacccccttccctagctggcgcgtcctgatacaggacctggttctggaaggcgacctgtctcacattcaccgcctacagaatctgaccatcgatatcctggtttatgacaatcatgttcacgtggcacggagcttgaaggtcggttctttccttcgtatctacagcttgcatactaaacttcaaagtatgaactccgaaaatcagactatgctgtcacttgagttccacctgcacgggggaacctcttatggaagaggcattcgtgtcctgccagagagtaatagcgacgttgatcagctaaagaaggacctagaatcagctaaccttacagccaatcaacattcggacgtcatctgccaaagcgagccagacgattcattccccaatggcgtttcgctgaggcccccaggttggtccagcgtcgccaggagccggctgattgctgcatctacttcttag

SEQ ID NO: 289992 - DNA, 1380 bp, Artificial Sequence
  derived and/or modified sequence
ctgtccctggtgccggctacgaactacatatatacccctctgaatcagctcaaaggcggaaccattgtgaatgtttatggagtggttaaatttttcaagccaccatacctctctaaaggaaccgactattgtagcgtcgtgactatagttgatcaaaccaatgtgaagcttacttgtctgctctttagcggcaactatgaggcacttccaattatttacaaaaatggggatatcgttcgcttccacaggctcaagattcaggtatacaagaaagagactcagggaataaccagctccggcttcgcaagcctgacttttgagggcaccttaggtgcacctatcataccgagaactagctctaaatattttaacttcactacagaggatcataaaatggtggaggccttgcgcgtgtgggcatccacccacatgagcccttcttggaccttgctgaaattatgcgacgtgcagcctatgcaatatttcgacttaacctgccagctgctgggaaaggccgaagttgatggcgctagctttctcctcaaggtttgggatggaaccagaactccctttccttcatggagagtgctgattcaagacttggtgctggagggtgacctgtctcacattcatcggttgcaaaatttaactatcgacattttggtgtatgataaccacgttcatgttgccagatcgttaaaagtggggagttttctcaggatatattcactgcacacgaagttgcagagcatgaattccgaaaaccagaccatgctgtctctagaattccacctgcacggcggtactagctatgggagaggaattcgagtactccctgaaagtaattcagacgtggaccagttaaagaaggatctggaaagcgccaatttgaccgccaaccaacattccgatgtcatctgccagtccgagccagatgactccttcccgagctccggtagtgtgagcctgtacgaggtagagcgctgccagcaactgtccgctaccatcttgaccgatcaccaatatctggagagaacaccattatgtgctatacttaaacagaaggctccccagcagtacagaattcgggcaaagctgcggagctacaagccgcgacggctgtttcagtctgtaaaattgcactgccctaagtgtcacctgctgcaggaggtgccacacgaaggcgacctcgatatcattttccaggatggcgcaactaagactcctgatgtaaagctgcagaacacgtctctgtacgactccaaaatctggaccacaaaaaatcagaaaggacgcaaggtggccgttcattttgttaaaaacaatggcattctacccctgtccaacgaatgcttactgcttatcgaagtgttactttag

SEQ ID NO: 289993 - DNA, 249 bp, Artificial Sequence
  derived and/or modified sequence
atgtcactcgtgcccgctacgaattacatctatactcccctcaatcaactgaagggcggtacgatcgttaatgtgtacggagtcgtaaaattcttcaaacccccttatctgtccaaggggacagactactgttccgttgtgacaatagtggatcagaccaatgtgaaactgacatgccttttgttttctggaaactatgaagcactcccgattatatataagaacggcgacatcgtccgcttccattag

SEQ ID NO: 289994 - DNA, 1557 bp, Artificial Sequence
  derived and/or modified sequence
ctctccttggttccagcaactaactacatatacacacccctgaaccagttgaagggcggaactatcgtgaacgtgtacggcgttgttaagttcttcaaacctccttatcttagcaaggggacagattattgcagcgttgttactatagtggatcagactaatgtgaagctgacgtgcttactatttagcggtaattacgaggcactgcctattatttacaaaaacggcgacatagtgcgttttcaccgtctgaaaatacaggtgtataagaaggagacacaaggcattacaagtagcggcttcgcctccctgacatttgagggcactctgggtgcgcctatcatccctcgtacttctagcaagtacttcaacttcactacagaggatcacaaaatggtagaagccctccgtgtgtgggcctcaacgcatatgagcccatcgtggacactattgaaactgtgtgacgtacaaccgatgcagtattttgacttgacatgtcagctgctgggtaaagcggaggtggacggggcaagtttcctcttgaaggtgtgggacgggacccggaccccatttccctcatggagggtgctgatccaggatctggtgctcgaaggcgatttgtcgcacattcataggttacaaaacctgacgatagacatcctggtatatgataaccacgtgcatgtggcaaggtctttgaaagtgggctccttccttagaatatatagcctgcacactaagctacagtcgatgaactctgagaaccagacaatgctctctctggaatttcatttgcacggtggaacaagctacgggagaggcatcagggtccttcctgagtcgaacagcgacgtggatcagctgaagaaggatctggagtcagccaacctgaccgccaatcagcatagtgacgtcatttgtcagagcgagcctgacgactcattcccctcgtcagggtccgtatccctgtatgaagtggaacggtgccagcagctgagtgccaccattcttacagatcatcagtatctggagcgcacccctttgtgcgccatattgaaacaaaaagccccacagcagtaccggatcagggctaagctcaggtcctacaaaccccgacgcctgtttcaatctgtcaagctacactgtcccaagtgccacctcctgcaggaagtgcctcacgaaggcgatctagacattatttttcaagacggggctacgaaaactccagacgtgaagctccagaatacctctctgtatgattctaaaatttggaccaccaaaaatcaaaagggtcgaaaagtcgctgtacacttcgtgaaaaataacggcattttgccactgtctaatgagtgtctgctgctgatagaaggtggcacattaagcgagatctgcaagctatcaaataagtttaactcagtgataccagtgaggagtggccatgaggacctggaactcctggacctcagtgctccctttctgatccagggaactatccaccactacggcactggatactgtaccccaccaatctgcgtttgctacgatctctacacctag

SEQ ID NO: 289995 - DNA, 1611 bp, Artificial Sequence
  derived and/or modified sequence
agtttggttccagcaacaaattatatatatacacccctgaatcaacttaagggtggtacaattgtcaatgtctatggtgttgtgaagttctttaagcccccatatctaagcaaaggaactgattattgctcagttgtaactattgtggaccagacaaatgtaaaactaacttgcctgctctttagtggaaactatgaagcccttccaataatttataaaaatggagatattgttcgctttcacaggctgaagattcaagtatataaaaaggagactcagggtatcaccagctctggctttgcatctttgacgtttgagggaactttgggagcccctatcatacctcgcacttcaagcaagtattttaacttcactactgaggaccacaaaatggtagaagccttacgtgtttgggcatctactcatatgtcaccgtcttggacattactaaaattgtgtgatgttcagccaatgcagtattttgacctgacttgtcagctcttgggcaaagcagaagtggacggagcatcatttcttctaaaggtatgggatggcaccaggacaccatttccatcttggagagtcttaatacaagaccttgttcttgaaggtgatttaagtcacatccatcggctacaaaatctgacaatagacattttagtctacgataaccatgttcatgtggcaagatctctgaaggttggaagctttcttagaatctatagccttcataccaaacttcaatcaatgaattcagagaatcagacaatgttaagtttagagtttcatcttcatggaggtaccagttacggtcggggaatcagggtcttgccagaaagtaactctgatgtggatcaactgaaaaaggatttagaatctgcaaatttgacagccaatcagcattcagatgttatctgtcaatcagaacctgacgacagctttccaagctctggatcagtatcattatacgaggtagaaagatgtcaacagctatctgctacaatacttacagatcatcagtatttggagaggacaccactatgtgccattttgaaacaaaaagctcctcaacaataccgcatccgagcaaaattgaggtcatataagcccagaagactatttcagtctgttaaacttcattgccctaaatgtcatttgctgcaagaagttccacatgagggcgatttggatataatttttcaggatggtgcaactaaaaccccagatgtcaagctacaaaatacatcattatatgattcaaaaatctggaccactaaaaatcaaaaaggacgaaaagtagcagttcattttgtgaaaaataatggtattctcccgctttcaaatgaatgtctacttttgatagaaggaggtacactcagtgaaatttgcaaactctcgaacaagtttaatagtgtaattcctgtgagatctggccacgaagacctggaacttttggacctttcagcaccatttcttatacaaggaacaatacatcactatggatgtaaacagtgttctagtttgagatccatacaaaatctaaattccctggttgataaaacatcgtggattccttcttctgtggcagaagagctggacattgtgctgcag

SEQ ID NO: 289996 - DNA, 4080 bp, Artificial Sequence
  derived and/or modified sequence
cagtatttcgccaaacctccaggcgccatcagtgtgtgaaccgttacgcagctggtccaccgcgggcggagaacaagcgactatgcccagggatcctgcacgcatgcgtggagctgaaccgtcagcgtgcgtgtgacgtcacctgcgcgcccgcctaaactcttcctagggttctttctagagtacggcagcaagttgtcagattccctagttgaatttgctttggacatcagtgtgaagcagaactgatatgccacttgaattaataaaggaagtcaatggggtgcctgaagttcagccgctgagtaaattacataaagtagatttcggatccctacagccaggttacaattatagcaagaaatatattcagggaaaactttcacttatctcttctttaacttatcgtggaaataaaacagctgttttgcagattggactacaaggacaccattgcagtggctagatttattgtttttttagcttcttcatctacaagcagagatggtaaaccttgcatatttttgaaagcatttgaagacctcaaatcaactgtttatgtttatgtcaaatctttaagagatttttctacagaatcaatgtctttggttccagcaacaaattatatatatacacccctgaatcaacttaagggtggtacaattgtcaatgtctatggtgttgtgaagttctttaagcccccatatctaagcaaaggaactgattattgctcagttgtaactattgtggaccagacaaatgtaaaactaacttgcctgctctttagtggaaactatgaagcccttccaataatttataaaaatggagatattgttcgctttcacaggctgaagattcaagtatataaaaaggagactcagggtatcaccagctctggctttgcatctttgacgtttgagggaactttgggagcccctatcatacctcgcacttcaagcaagtattttaacttcactactgaggaccacaaaatggtagaagccttacgtgtttgggcatctactcatatgtcaccgtcttggacattactaaaattgtgtgatgttcagccaatgcagtattttgacctgacttgtcagctcttgggcaaagcagaagtggacggagcatcatttcttctaaaggtatgggatggcaccaggacaccatttccatcttggagagtcttaatacaagaccttgttcttgaaggtgatttaagtcacatccatcggctacaaaatctgacaatagacattttagtctacgataaccatgttcatgtggcaagatctctgaaggttggaagctttcttagaatctatagccttcataccaaacttcaatcaatgaattcagagaatcagacaatgttaagtttagagtttcatcttcatggaggtaccagttacggtcggggaatcagggtcttgccagaaagtaactctgatgtggatcaactgaaaaaggatttagaatctgcaaatttgacagccaatcagcattcagatgttatctgtcaatcagaacctgacgacagctttccaagctctggatcagtatcattatacgaggtagaaagatgtcaacagctatctgctacaatacttacagatcatcagtatttggagaggacaccactatgtgccattttgaaacaaaaagctcctcaacaataccgcatccgagcaaaattgaggtcatataagcccagaagactatttcagtctgttaaacttcattgccctaaatgtcatttgctgcaagaagttccacatgagggcgatttggatataatttttcaggatggtgcaactaaaaccccagatgtcaagctacaaaatacatcattatatgattcaaaaatctggaccactaaaaatcaaaaaggacgaaaagtagcagttcattttgtgaaaaataatggtattctcccgctttcaaatgaatgtctacttttgatagaaggaggtacactcagtgaaatttgcaaactctcgaacaagtttaatagtgtaattcctgtgagatctggccacgaagacctggaacttttggacctttcagcaccatttcttatacaaggaacaatacatcactatggatgtaaacagtgttctagtttgagatccatacaaaatctaaattccctggttgataaaacatcgtggattccttcttctgtggcagaagcactgggtattgtacccctccaatatgtgtttgttatgacctttacacttgatgatggaacaggagtactagaagcctatctcatggattctgacaaattcttccagattccagcatcagaagttctgatggatgatgaccttcagaaaagtgtggatatgatcatggatatgttttgtcctccaggaataaaaattgatgcatatccgtggttggaatgcttcatcaagtcatacaatgtcacaaatggaacagataatcaaatttgctatcagatttttgacaccacagttgcagaagatgtaatctaatattgccatccaatttagcatacataaaatgttgccactcaccttccctgtttgagcttcttttcctgacctgagttttgtatcagcaatgttgatgatgttagcatgggtatgggattagaaaatgtccttaccttaaatctcttggcttttactgggtgcaaggtaaataatggctatggattttgttttgctttctgttttgcttttgtacaaagagacctgcttaaacaagtactgctgagataagtgtctgatcaagctacagtgtactttaagtagaaatggcaaagttgctttgttggggtgctgatactgatgattttaggataaattcatttctttaaacttgtaatacatggttttattgcttgtttctctccaggatagtagagatttctctatttcacctcaacctaataaaagtggtcagatttataatgttaatgacttaatattatccttttctaatagtctcatgtaaaatatgccgctattacaacttacaactaattgaatgagatgttaacttagtaaaatagtttgatttttacctgacagtgtttgtcaaatttaaaatcatgaatattcaattttatacaaacatttatatatatatatatagatttgtgtatgttatttgccaaagacagatataaattacctggtttaatattagtgaagaataaataagtgcacacatttcaactgtttcatttatttgccctaagttgagctgaaaaatgatatgaggcaaagaatcgaaataggtgtggcaatgcagcagatgtttagggctgtctacatcccaggtactgtgctaagcactaaacatgtatttgatcctcacagcaacctatttttccgataagaaatctgaggcttgattgataagctgacttgactaagttcacacagtttgtaaaagctagagtctgtgccttaattcacataatctctattcagagcctgtactgttaaccactcaaggattctggaacagaagctaacagttttctgcaacgagtctttgacttaaacatctgaaataacattggaaatagattataagaggagtcagtgtgtttttctatagtttcaaaatacttttaacatcttattgtcaaaaagattggataactgactttctttgctcataataactctaaattctagttcctgagtacattaacacatcttctttacctaactaccaatgtcccccatcatcgacttatcagcttgtttgagacaatgagaaagactgattttattttcaagaatatagactcttggttcaaaacattttcaggaaaaatattttaaaaccctacagttgaacaggtgtgtttccgtgttgatgatgtgctcaggatacaaaggtgaaataaacattttttctgccttcaggaagccctcaatctagaagagtagaggtccaaaggtgccatatgttcacactgtgagcctgcaagatctccacgttaacaaaggaaaactcttcctatgaatcttcatgatgataggccatgtctcttcttatttttgttttaaataaacatccaccttatcatga

SEQ ID NO: 289997 - DNA, 2028 bp, Artificial Sequence
  derived and/or modified sequence
tctctttctttagttccagcaacaaattatatatatacacccctgaatcaacttaagggtggtacaattgtcaatgtctatggtgttgtgaagttctttaagcccccatatctaagcaaaggaactgattattgctcagttgtaactattgtggaccagacaaatgtaaaactaacttgcctgctctttagtggaaactatgaagcccttccaataatttataaaaatggagatattgttcgctttcacaggctgaagattcaagtatataaaaaggagactcagggtatcaccagctctggctttgcatctttgacgtttgagggaactttgggagcccctatcatacctcgcacttcaagcaagtattttaacttcactactgaggaccacaaaatggtagaagccttacgtgtttgggcatctactcatatgtcaccgtcttggacattactaaaattgtgtgatgttcagccaatgcagtattttgacctgacttgtcagctcttgggcaaagcagaagtggacggagcatcatttcttctaaaggtatgggatggcaccaggacaccatttccatcttggagagtcttaatacaagaccttgttcttgaaggtgatttaagtcacatccatcggctacaaaatctgacaatagacattttagtctacgataaccatgttcatgtggcaagatctctgaaggttggaagctttcttagaatctatagccttcataccaaacttcaatcaatgaattcagagaatcagacaatgttaagtttagagtttcatcttcatggaggtaccagttacggtcggggaatcagggtcttgccagaaagtaactctgatgtggatcaactgaaaaaggatttagaatctgcaaatttgacagccaatcagcattcagatgttatctgtcaatcagaacctgacgacagctttccaaatggagtctcgcttcgtcctccaggctggagttcagtggcacggtctcggctcattgcagcctccacctcctgagttcaagcttctcctgcctcagcctcccaagtagctgggattacaggctctggatcagtatcattatacgaggtagaaagatgtcaacagctatctgctacaatacttacagatcatcagtatttggagaggacaccactatgtgccattttgaaacaaaaagctcctcaacaataccgcatccgagcaaaattgaggtcatataagcccagaagactatttcagtctgttaaacttcattgccctaaatgtcatttgctgcaagaagttccacatgagggcgatttggatataatttttcaggatggtgcaactaaaaccccagatgtcaagctacaaaatacatcattatatgattcaaaaatctggaccactaaaaatcaaaaaggacgaaaagtagcagttcattttgtgaaaaataatggtattctcccgctttcaaatgaatgtctacttttgatagaaggaggtacactcagtgaaatttgcaaactctcgaacaagtttaatagtgtaattcctgtgagatctggccacgaagacctggaacttttggacctttcagcaccatttcttatacaaggaacaatacatcactatggatgtaaacagtgttctagtttgagatccatacaaaatctaaattccctggttgataaaacatcgtggattccttcttctgtggcagaagcactgggtattgtacccctccaatatgtgtttgttatgacctttacacttgatgatggaacaggagtactagaagcctatctcatggattctgacaaattcttccagattccagcatcagaagttctgatggatgatgaccttcagaaaagtgtggatatgatcatggatatgttttgtcctccaggaataaaaattgatgcatatccgtggttggaatgcttcatcaagtcatacaatgtcacaaatggaacagataatcaaatttgctatcagatttttgacaccacagttgcagaagatgtaatctaa

SEQ ID NO: 289998 - DNA, 3950 bp, Artificial Sequence
  derived and/or modified sequence
gtcagtatttcgccaaacctccaggcgccatcagtgtgtgaaccgttacgcagctggtccaccgcgggcggagaacaagcgactatgcccagggatcctgcacgcatgcgtggagctgaaccgtcagcgtgcgtgtgacgtcacctgcgcgcccgcctaaactcttcctagggttctttctagagtacggcagcaagttgtcagattccctagttgaatttgctttggacatcagtgtgaagcagaactgatatgccacttgaattaataaaggaagtcaatggggtgcctgaagttcagccgctgagtaaattacataaagtagatttcggatccctacagccaggttacaattatagcaagaaatatattcagggaaaactttcacttatctcttctttaacttatcgtggaaataaaacagctgttttgcagattggactacaaggacaccattgcagtggctagatttattgtttttttagcttcttcatctacaagcagagatggtaaaccttgcatatttttgaaagcatttgaagacctcaaatcaactgtttatgtttatgtcaaatctttaagagatttttctacagaatcaatgtctttggttccagcaacaaattatatatatacacccctgaatcaacttaagggtggtacaattgtcaatgtctatggtgttgtgaagttctttaagcccccatatctaagcaaaggaactgattcaagtatataaaaaggagactcagggtatcaccagctctggctttgcatctttgacgtttgagggaactttgggagcccctatcatacctcgcacttcaagcaagtattttaacttcactactgaggaccacaaaatggtagaagccttacgtgtttgggcatctactcatatgtcaccgtcttggacattactaaaattgtgtgatgttcagccaatgcagtattttgacctgacttgtcagctcttgggcaaagcagaagtggacggagcatcatttcttctaaaggtatgggatggcaccaggacaccatttccatcttggagagtcttaatacaagaccttgttcttgaaggtgatttaagtcacatccatcggctacaaaatctgacaatagacattttagtctacgataaccatgttcatgtggcaagatctctgaaggttggaagctttcttagaatctatagccttcataccaaacttcaatcaatgaattcagagaatcagacaatgttaagtttagagtttcatcttcatggaggtaccagttacggtcggggaatcagggtcttgccagaaagtaactctgatgtggatcaactgaaaaaggatttagaatctgcaaatttgacagccaatcagcattcagatgttatctgtcaatcagaacctgacgacagctttccaagctctggatcagtatcattatacgaggtagaaagatgtcaacagctatctgctacaatacttacagatcatcagtatttggagaggacaccactatgtgccattttgaaacaaaaagctcctcaacaataccgcatccgagcaaaattgaggtcatataagcccagaagactatttcagtctgttaaacttcattgccctaaatgtcatttgctgcaagaagttccacatgagggcgatttggatataatttttcaggatggtgcaactaaaaccccagatgtcaagctacaaaatacatcattatatgattcaaaaatctggaccactaaaaatcaaaaaggacgaaaagtagcagttcattttgtgaaaaataatggtattctcccgctttcaaatgaatgtctacttttgatagaaggaggtacactcagtgaaatttgcaaactctcgaacaagtttaatagtgtaattcctgtgagatctggccacgaagacctggaacttttggacctttcagcaccatttcttatacaaggaacaatacatcactatggatgtaaacagtgttctagtttgagatccatacaaaatctaaattccctggttgataaaacatcgtggattccttcttctgtggcagaagcactgggtattgtacccctccaatatgtgtttgttatgacctttacacttgatgatggaacaggagtactagaagcctatctcatggattctgacaaattcttccagattccagcatcagaagttctgatggatgatgaccttcagaaaagtgtggatatgatcatggatatgttttgtcctccaggaataaaaattgatgcatatccgtggttggaatgcttcatcaagtcatacaatgtcacaaatggaacagataatcaaatttgctatcagatttttgacaccacagttgcagaagatgtaatctaatattgccatccaatttagcatacataaaatgttgccactcaccttccctgtttgagcttcttttcctgacctgagttttgtatcagcaatgttgatgatgttagcatgggtatgggattagaaaatgtccttaccttaaatctcttggcttttactgggtgcaaggtaaataatggctatggattttgttttgctttctgttttgcttttgtacaaagagacctgcttaaacaagtactgctgagataagtgtctgatcaagctacagtgtactttaagtagaaatggcaaagttgctttgttggggtgctgatactgatgattttaggataaattcatttctttaaacttgtaatacatggttttattgcttgtttctctccaggatagtagagatttctctatttcacctcaacctaataaaagtggtcagatttataatgttaatgacttaatattatccttttctaatagtctcatgtaaaatatgccgctattacaacttacaactaattgaatgagatgttaacttagtaaaatagtttgatttttacctgacagtgtttgtcaaatttaaaatcatgaatattcaattttatacaaacatttatatatatatatatagatttgtgtatgttatttgccaaagacagatataaattacctggtttaatattagtgaagaataaataagtgcacacatttcaactgtttcatttatttgccctaagttgagctgaaaaatgatatgaggcaaagaatcgaaataggtgtggcaatgcagcagatgtttagggctgtctacatcccaggtactgtgctaagcactaaacatgtatttgatcctcacagcaacctatttttccgataagaaatctgaggcttgattgataagctgacttgactaagttcacacagtttgtaaaagctagagtctgtgccttaattcacataatctctattcagagcctgtactgttaaccactcaaggattctggaacagaagctaacagttttctgcaacgagtctttgacttaaacatctgaaataacattggaaatagattataagaggagtcagtgtgtttttctatagtttcaaaatacttttaacatcttattgtcaaaaagattggataactgactttctttgctcataataactctaaattctagttcctgagtacattaacacatcttctttacctaactaccaatgtcccccatcatcgacttatcagcttgtttgagacaatgagaaagactgattttattttcaagaatatagactcttggttcaaaacattttcaggaaaaatattttaaaaccctacagttgaacaggtgtgtttccgtgttgatgatgtgctcaggatacaaaggtgaaataaacattttttctgccttcaggaagccctcaatctagaagagtagaggtccaaaggtgccatatgttcacactgtgagcctgcaagatctccacgttaacaaaggaaaactcttcctatgaatcttcatgatgataggccatgtctcttcttatttttgttttaaataaacatccaccttatcatg

SEQ ID NO: 289999 - DNA, 2006 bp, Artificial Sequence
  derived and/or modified sequence
tctctttctttagttccagcaacaaattatatatatacacccctgaatcaacttaagggtggtacaattgtcaatgtctatggtgttgtgaagttctttaagcccccatatctaagcaaaggaactgattattgctcagttgtaactattgtggaccagacaaatgtaaaactaacttgcctgctctttagtggaaactatgaagcccttccaataatttataaaaatggagatattgttcgctttcacaggctgaagattcaagtatataaaaaggagactcagggtatcaccagctctggctttgcatctttgacgtttgagggaactttgggagcccctatcatacctcgcacttcaagcaagtattttaacttcactactgaggaccacaaaatggtagaagccttacgtgtttgggcatctactcatatgtcaccgtcttggacattactaaaattgtgtgatgttcagccaatgcagtattttgacctgacttgtcagctcttgggcaaagcagaagtggacggagcatcatttcttctaaaggtatgggatggcaccaggacaccatttccatcttggagagtcttaatacaagaccttgttcttgaaggtgatttaagtcacatccatcggctacaaaatctgacaatagacattttagtctacgataaccatgttcatgtggcaagatctctgaaggttggaagctttcttagaatctatagccttcataccaaacttcaatcaatgaattcagagaatcagacaatgttaagtttagagtttcatcttcatggaggtaccagttacggtcggggaatcagggtcttgccagaaagtaactctgatgtggatcaactgaaaaaggatttagaatctgcaaatttgacagccaatcagcattcagatgttatctgtcaatcagaacctgacgacagctttccaagctctggatcagtatcattatacgaggtagaaagatgtcaacagctatctgctacaatacttacagatcatcagtatttggagaggacaccactatgtgccattttgaaacaaaaagctcctcaacaataccgcatccgagcaaaattgaggtcatataagcccagaagactatttcagtctgttaaacttcattgccctaaatgtcatttgctgcaagaagttccacatgagggcgatttggatataatttttcaggatggtgcaactaaaaccccagatgtcaagctacaaaatacatcattatatgattcaaaaatctggaccactaaaaatcaaaaaggacgaaaagtagcagttcattttgtgaaaaataatggtattctcccgctttcaaatgaatgtctacttttgatagaagttcttctgtaagctggatatatcccctttgtaaacagaagaggaaactgagaccaagagaaaatggtgaagtactcaaggttaaagacttaataaatggaggtacactcagtgaaatttgcaaactctcgaacaagtttaatagtgtaattcctgtgagatctggccacgaagacctggaacttttggacctttcagcaccatttcttatacaaggaacaatacatcactatggatgtaaacagtgttctagtttgagatccatacaaaatctaaattccctggttgataaaacatcgtggattccttcttctgtggcagaagcactgggtattgtacccctccaatatgtgtttgttatgacctttacacttgatgatggaacaggagtactagaagcctatctcatggattctgacaaattcttccagattccagcatcagaagttctgatggatgatgaccttcagaaaagtgtggatatgatcatggatatgttttgtcctccaggaataaaaattgatgcatatccgtggttggaatgcttcatcaagtcatacaatgtcacaaatggaacagataatcaaatttgctatcagatttttgacaccacagttgcagaagatgtaatctaa

SEQ ID NO: 290000 - DNA, 806 bp, Artificial Sequence
  derived and/or modified sequence
gaaccgttacgcagctggtccaccgcgggcggagaacaagcgactatgcccagggatcctgcacgcatgcgtggagctgaaccgtcagcgtgcgtgtgacgtcacctgcgcgcccgcctaaactcttcctagggttctttctagagtacggcaagttgtcagattccctagttgaatttgctttggacatcagtgtgaagcagaactgatatgccacttgaattaataaaggaagtcaatggggtgcctgaagttcagccgctgagtaaattacataaagtagatttcggatccctacagccaggttacaattatagcaagaaatatattcagggaaaactttcacttatctcttctttaacttatcgtggaaataaaacagctgttttgcagattggactacaaggacaccattgcagtggctagatttattgtttttttagcttcttcatctacaagcagagatggtaaaccttgcatatttttgaaagcatttgaagacctcaaatcaactgtttatgtttatgtcaaatctttaagagatttttctacagaatcaatgtctttggttccagcaacaaattatatatatacacccctgaatcaacttaagggtggtacaattgtcaatgtctatggtgttgtgaagttctttaagcccccatatctaagcaaaggaactgattattgctcagttgtaactattgtggaccagacaaatgtaaaactaacttgcctgctctttagtggaaactatgaagcccttccaataatttataaaaatggagatattgttcgctttcaca

SEQ ID NO: 290001 - DNA, 1819 bp, Artificial Sequence
  derived and/or modified sequence
tctctttctttagttccagcaacaaattatatatatacacccctgaatcaacttaagggtggtacaattgtcaatgtctatggtgttgtgaagttctttaagcccccatatctaagcaaaggaactgattattgctcagttgtaactattgtggaccagacaaatgtaaaactaacttgcctgctctttagtggaaactatgaagcccttccaataatttataaaaatggagatattgttcgctttcacaggctgaagattcaagtatataaaaaggagactcagggtatcaccagctctggctttgcatctttgacgtttgagggaactttgggagcccctatcatacctcgcacttcaagcaagtattttaacttcactactgaggaccacaaaatggtagaagccttacgtgtttgggcatctactcatatgtcaccgtcttggacattactaaaattgtgtgatgttcagccaatgcagtattttgacctgacttgtcagctcttgggcaaagcagaagtggacggagcatcatttcttctaaaggtatgggatggcaccaggacaccatttccatcttggagagtcttaatacaagaccttgttcttgaaggtgatttaagtcacatccatcggctacaaaatctgacaatagacattttagtctacgataaccatgttcatgtggcaagatctctgaaggttggaagctttcttagaatctatagccttcataccaaacttcaatcaatgaattcagagaatcagacaatgttaagtttagagtttcatcttcatggaggtaccagttacggtcggggaatcagggtcttgccagaaagtaactctgatgtggatcaactgaaaaaggatttagaatctgcaaatttgacagccaatcagcattcagatgttatctgtcaatcagaacctgacgacagctttccaagctctggatcagtatcattatacgaggtagaaagatgtcaacagctatctgctacaatacttacagatcatcagtatttggagaggacaccactatgtgccattttgaaacaaaaagctcctcaacaataccgcatccgagcaaaattgaggtcatataagcccagaagactatttcagtctgttaaacttcattgccctaaatgtcatttgctgcaagaagttccacatgagggcgatttggatataatttttcaggatggtgcaactaaaaccccagatgtcaagctacaaaatacatcattatatgattcaaaaatctggaccactaaaaatcaaaaaggacgaaaagtagcagttcattttgtgaaaaataatggtattctcccgctttcaaatgaatgtctacttttgatagaaggaggtacactcagtgaaatttgcaaactctcgaacaagtttaatagtgtaattcctgtgagatctggccacgaagacctggaacttttggacctttcagcaccatttcttatacaaggaacaatacatcactatggcactgggtattgtacccctccaatatgtgtttgttatgacctttacacttgatgatggaacaggagtactagaagcctatctcatggattctgacaaattcttccagattccagcatcagaagttctgatggatgatgaccttcagaaaagtgtggatatgatcatggatatgttttgtcctccaggaataaaaattgatgcatatccgtggttggaatgcttcatcaagtcatacaatgtcacaaatggaacagataatcaaatttgctatcagatttttgacaccacagttgcagaagatgtaatctaa

SEQ ID NO: 290002 - DNA, 1173 bp, Artificial Sequence
  derived and/or modified sequence
atgaacggggtcaccctggaccttgaggagcgagcgaaggtaacaagcgggtttatatccggttgtagtggccattgcacttcttatggcactaattgcgaaaatggcgggaagtgcctcgaacggtaccacggttattcctgtgactgctcaaatactgcgtacgatggaaccttctgcaacaaagatgtcggagcattcttcgaagagggaatgtggctgcggtacaattttcaggcccctgccactaacgcgagggatagtagttcaagggtcgataacgcccccgatcagcagaactctcaccccgatctggcacaagaagaaatccgttttagcttctccacgactaaagccccctgtatcctgctgtatatctccagctttaccacggacttcctcgcggtgttagtgaaacctaccggaagtctgcagattcgttacaaccttggggggactcgcgagccctacaatattgacgtggaccacagaaatatggctaatgggcagcctcatagcgtaaatatcactagacacgaaaagaccatttttctgaaattggaccactacccgagcgtctcttaccacctgccgtctagttctgacacactctttaactcacccaaatccctgttcttggggaaagtcatcgaaacagggaaaattgaccaagagatacataaatacaacacaccagggtttaccggatgcctttctcgcgtacaattcaatcaaattgccccgctgaaagccgccctcagacaaactaatgccagtgcacatgttcacattcagggagagctggtggagagtaactgtggggcatcaccactgacattaagtcccatgagctcagcaaccgacccatggcacttggaccacctggacagtgctagcgcagatttcccatacaaccccggtcaggggcaggctatccggaatggcgtgaatcggaatagtgccatcattggaggggttattgctgtagtcatctttacaatcttatgtacacttgtcttcttaatccgttacatgttccggcataagggaacataccacacaaatgaagccaaaggcgcagagtccgcagaaagcgccgacgcggccattatgaacaatgatccaaactttactgagactatcgacgagagcaaaaaggaatggctaatttag

SEQ ID NO: 290003 - DNA, 1173 bp, Artificial Sequence
  derived and/or modified sequence
atgaatggagtgaccctggacctggaggagcgggccaaggtgaccagcggcttcatcagcggctgcagcggccactgcaccagctatggcaccaactgtgaaaatggaggcaagtgcctggagcgctaccacggctacagctgtgactgcagcaacacagcctatgatggcaccttctgcaacaaggatgtgggcgccttctttgaggagggcatgtggctgcgctacaacttccaggccccagccaccaatgcccgggacagcagcagccgggtggacaatgccccagaccagcagaacagccacccagacctggcccaggaggagatccgcttctccttcagcaccaccaaggccccctgcatcctgctgtacatcagcagcttcaccacagacttcctggccgtgctggtgaagcccaccggcagcctgcagatccgctacaacctgggcggcacccgggagccctacaacattgatgtggaccacaggaacatggccaacggccagccccacagcgtgaacatcaccaggcatgagaagaccatcttcctgaagctggaccactaccccagcgtgtcctaccacctgcccagcagcagtgacaccctcttcaacagccccaagagcctcttcctgggcaaggtgattgaaacaggcaagattgaccaggagatccacaagtacaacaccccaggcttcaccggctgcctgagccgggtgcagttcaaccagatcgcccccctgaaggccgccctgcggcagaccaatgccagcgcccacgtgcacatccagggcgagctggtggagagcaactgtggggccagccccctgaccctgagccccatgagcagcgccacagacccctggcacctggaccacctggacagcgccagcgctgacttcccctacaaccctggccagggccaggccatcagaaatggagtgaacagaaacagcgccatcattggaggagtgattgctgtggtgatcttcaccatcctgtgcaccctggtgttcctgatccgctacatgttccgccacaagggcacctaccacaccaatgaggccaagggagctgagagcgctgagagcgcagatgctgccatcatgaacaatgaccccaacttcacagagaccattgatgagagcaagaaggagtggctgatctag

SEQ ID NO: 290004 - DNA, 1173 bp, Artificial Sequence
  derived and/or modified sequence
atgaacggcgtgaccctggacctggaggagcgggccaaggtgacctccggattcatctcaggctgcagtgggcactgcaccagttatgggaccaactgcgaaaacggcggaaagtgcctcgaaaggtatcacggctatagctgcgactgttcaaatacggcttacgacggcactttttgtaacaaggatgtcggtgcttttttcgaggagggtatgtggttgagatataatttccaggcaccagcaaccaatgcacgggactcatcatcaagggtcgacaacgcaccagaccagcagaatagtcacccggatttagcccaagaggaaattcggtttagctttagtacaacaaaggcaccatgcattctgttgtacataagcagctttacgaccgactttctagctgtactcgttaagcccaccggaagtctgcaaatacgctacaacctaggcggcacccgcgagccttacaacattgacgtggaccacagaaatatggctaatggacagccccattctgtaaatatcacacgccacgaaaagacaattttcctgaaactggatcactacccatccgtctcttaccatttaccaagcagctcagatacattatttaatagcccaaagtctttgttccttgggaaagtgatcgagaccggcaaaatagaccaagagatccacaagtataatacaccagggttcactgggtgcttgagtcgtgttcagtttaatcagatagcaccgttaaaggctgcccttaggcagacaaacgccagtgcacacgtgcacatacaaggcgagctcgttgagtctaactgtggagcatccccattgacgctttccccgatgtccagcgcgacggacccttggcacttagatcaccttgactctgccagtgcagacttcccgtataaccccggacagggccaggccatacgaaatggggtaaatcgaaattccgctatcataggaggggtaattgcagtggtcatattcaccattttgtgtacactcgtatttctgatccgctacatgttccgccacaaagggacctatcacacaaacgaggcgaaaggggcagagtctgcagagtctgcggatgcagccatcatgaataatgatcccaatttcacagagaccattgacgagtcaaagaaagaatggctgatatag

SEQ ID NO: 290005 - DNA, 1173 bp, Artificial Sequence
  derived and/or modified sequence
atgaatggcgtgactctagatctggaagaaagagccaaggtgacttccggattcataagcggctgcagcggtcactgcacctcttacggtaccaattgcgaaaacgggggtaaatgcttggaacggtaccacgggtactcgtgcgattgttccaacactgcttatgatgggactttttgtaataaggatgtcggtgctttttttgaagaggggatgtggctgcggtataacttccaagccccagccaccaacgctagagacagttcttcaagagtggacaacgctccagatcaacagaacagtcaccctgacttagcccaggaggaaatccggttctcattctctactaccaaagcaccctgcatcctcctgtatatatccagcttcactaccgatttcctggcagttcttgtcaaacctaccggcagccttcagatcaggtacaaccttggagggacccgagagccgtataacatcgatgtagaccaccggaatatggcaaacgggcagcctcattcagtaaatatcacacgacacgaaaaaacaatttttctcaagctggaccattacccctcggtgtcataccatcttcctagctcctctgacaccttgttcaatagtcccaaaagtttgttcctgggtaaggtcattgagactggcaaaatagatcaggagattcacaaatacaacaccccaggctttacgggatgtctatcccgggtacaatttaaccagatagcaccgctgaaggccgcacttcgtcagaccaacgcatcagcgcatgtgcacatacaaggggaactggtggagagtaattgtggtgcgtcgccgctgacactctcacctatgagcagtgctaccgacccttggcaccttgatcacctggatagcgcttccgccgatttcccctacaatcccggacagggccaagccatccgtaatggcgttaatcgtaacagtgccatcatcggcggtgtgattgccgtggtgatcttcacgatcttgtgcactctggtgttcctaattaggtacatgtttcgtcataagggaacttatcatacgaacgaggctaagggcgcagaaagtgcggagtctgcagatgcagctatcatgaacaatgacccaaactttactgagaccatcgatgagtctaagaaagagtggctgatttag

SEQ ID NO: 290006 - DNA, 1173 bp, Artificial Sequence
  derived and/or modified sequence
atgaacggcgtgaccctggacctggaggagagagccaaggtgaccagcggcttcatcagcggctgcagcggccactgcaccagctacggcaccaactgcgagaacggcggcaagtgcctggagagataccacggctacagctgcgactgcagcaacaccgcctacgacggcaccttctgcaacaaggacgtgggcgccttcttcgaggagggcatgtggctgagatacaacttccaggcccccgccaccaacgccagagacagcagcagcagagtggacaacgcccccgaccagcagaacagccaccccgacctggcccaggaggagatcagattcagcttcagcaccaccaaggccccctgcatcctgctgtacatcagcagcttcaccaccgacttcctggccgtgctggtgaagcccaccggcagcctgcagatcagatacaacctgggcggcaccagagagccctacaacatcgacgtggaccacagaaacatggccaacggccagccccacagcgtgaacatcaccagacacgagaagaccatcttcctgaagctggaccactaccccagcgtgagctaccacctgcccagcagcagcgacaccctgttcaacagccccaagagcctgttcctgggcaaggtgatcgagaccggcaagatcgaccaggagatccacaagtacaacacccccggcttcaccggctgcctgagcagagtgcagttcaaccagatcgcccccctgaaggccgccctgagacagaccaacgccagcgcccacgtgcacatccagggcgagctggtggagagcaactgcggcgccagccccctgaccctgagccccatgagcagcgccaccgacccctggcacctggaccacctggacagcgccagcgccgacttcccctacaaccccggccagggccaggccatcagaaacggcgtgaacagaaacagcgccatcatcggcggcgtgatcgccgtggtgatcttcaccatcctgtgcaccctggtgttcctgatcagatacatgttcagacacaagggcacctaccacaccaacgaggccaagggcgccgagagcgccgagagcgccgacgccgccatcatgaacaacgaccccaacttcaccgagaccatcgacgagagcaagaaggagtggctgatctag

SEQ ID NO: 290007 - protein, 908 aa, Artificial Sequence
  derived and/or modified sequence
MVCEGKRSASCPCFFLLTAKFYWILTMMQRTHSQEYAHSIRVDGDIILGGLFPVHAKGERGVPCGELKKEKGIHRLEAMLYAIDQINKDPDLLSNITLGVRILDTCSRDTYALEQSLTFVQALIEKDASDVKCANGDPPIFTKPDKISGVIGAAASSVSIMVANILRLFKIPQISYASTAPELSDNTRYDFFSRVVPPDSYQAQAMVDIVTALGWNYVSTLASEGNYGESGVEAFTQISREIGGVCIAQSQKIPREPRPGEFEKIIKRLLETPNARAVIMFANEDDIRRILEAAKKLNQSGHFLWIGSDSWGSKIAPVYQQEEIAEGAVTILPKRASIDGFDRYFRSRTLANNRRNVWFAEFWEENFGCKLGSHGKRNSHIKKCTGLERIARDSSYEQEGKVQFVIDAVYSMAYALHNMHKDLCPGYIGLCPRMSTIDGKELLGYIRAVNFNGSAGTPVTFNENGDAPGRYDIFQYQITNKSTEYKVIGHWTNQLHLKVEDMQWAHREHTHPASVCSLPCKPGERKKTVKGVPCCWHCERCEGYNYQVDELSCELCPLDQRPNMNRTGCQLIPIIKLEWHSPWAVVPVFVAILGIIATTFVIVTFVRYNDTPIVRASGRELSYVLLTGIFLCYSITFLMIAAPDTIICSFRRVFLGLGMCFSYAALLTKTNRIHRIFEQGKKSVTAPKFISPASQLVITFSLISVQLLGVFVWFVVDPPHIIIDYGEQRTLDPEKARGVLKCDISDLSLICSLGYSILLMVTCTVYAIKTRGVPETFNEAKPIGFTMYTTCIIWLAFIPIFFGTAQSAEKMYIQTTTLTVSMSLSASVSLGMLYMPKVYIIIFHPEQNVQKRKRSFKAVVTAATMQSKLIQKGNDRPNGEVKSELCESLETNTSSTKTTYISYSNHSI

SEQ ID NO: 290008 - protein, 20 aa, Artificial Sequence
  derived and/or modified sequence
MVCEGKRSASCPCFFLLTAK

SEQ ID NO: 290009 - protein, 294 aa, Artificial Sequence
  derived and/or modified sequence
MVCEGKRSASCPCFFLLTAKFYWILTMMQRTHSQEYAHSIRVDGDIILGGLFPVHAKGERGVPCGELKKEKGIHRLEAMLYAIDQINKDPDLLSNITLGVRILDTCSRDTYALEQSLTFVQALIEKDASDVKCANGDPPIFTKPDKISGVIGAAASSVSIMVANILRLFKIPQISYASTAPELSDNTRYDFFSRVVPPDSYQAQAMVDIVTALGWNYVSTLASEGNYGESGVEAFTQISREIGGVCIAQSQKIPREPRPGEFEKIIKRLLETPNARAVIMFANEDDIRRILEAA

SEQ ID NO: 290010 - DNA, 4415 bp, Artificial Sequence
  derived and/or modified sequence
gggtgcgccttcccggcgtctaggggagcgaaggctgaggtggcagcggcaggagagtccggccgcgacaggacgaactcccccactggaaaggattctgaaagaaatgaagtcagccctcagaaatgaagttgactgcctgctggctttctgttgactggcccggagctgtactgcaagacccttgtgagcttccctagtctaagagtaggatgtctgctgaagtcatccatcaggttgaagaagcacttgatacagatgagaaggagatgctgctctttttgtgccgggatgttgctatagatgtggttccacctaatgtcagggaccttctggatattttacgggaaagaggtaagctgtctgtcggggacttggctgaactgctctacagagtgaggcgatttgacctgctcaaacgtatcttgaagatggacagaaaagctgtggagacccacctgctcaggaaccctcaccttgtttcggactatagagtgctgatggcagagattggtgaggatttggataaatctgatgtgtcctcattaattttcctcatgaaggattacatgggccgaggcaagataagcaaggagaagagtttcttggaccttgtggttgagttggagaaactaaatctggttgccccagatcaactggatttattagaaaaatgcctaaagaacatccacagaatagacctgaagacaaaaatccagaagtacaagcagtctggtggatggaatggaacctggatgaccaaagcctcctttagcttgtggctagaaatcgcgtccctttatattcttcatatcccagatctgccaactccattgccctgtatattcatgatctctgcaaaatgctgccaagcagttcttaacatttcagtcttcaagaaagaatctgggatctgcacaggctggcagagctatggacattcaggggttttgcatgtatgctgaaccctactgccttgctctggtatttggcctcacaaccactgtccaacttcgggtgatgtcacttgggtctcataccttccttgcatgtgtcccaagtttcacaaaacctccttatggaaaagagcacattcgatttcttccttgataaaagggaccagattcacattggccttctgctttacttgcattcctcattgtcttttagactcagcctcagcttgggctttgttagcaagttcactgccaccatagcatcacagcctaaagggcatggctgagactcattgatctatagagcactcttttaccccaacatactctaaatgactgatcaaagatcaaaaacagaagagcatttatactccattcttgttttttgagacctgcttgatttattccgattatttaacacacagggacgcaacagtgatcccaaagtgtgtaaagttaaagccttcaactgcagctgaggagagggcaggaatggggacggtggtgagtcaggaatgacaggcaggcagccatgaccagggcagcctcctccccagggccagggactggggagtggcctaaggagcaggacctaagggtagcccagagctggggaagggggcagagacctccccttggcctaggtctggagctcagaagtgccacatgcctgagggggcagcggcctgggaagggccagaggcagggtcaggagagcaccatttcctggggggctggggacagggaggtgccctataggagaagccaggaggggccgtctgcccctgaggtgggggctgggctggagcaggctgcagcaagaaagacctgaggcaggcacagggcctgagagcccagctgcctgggttcaggggggctcccagggcagcctggcccagggagcagtcctgactctgcaggggatgcccagcaaggggggctgcagacccctcagagcctcccctcctctctccctggaaaggagctggggaacccatagtgcaaatctgtggaccactcagttatggagggaggctgtgcctgaaggtggacactggggtgcactccctccaccatctcgccctgcaccgctgtcctcagtacagccacttctcgtaagagtgcaggccatggatgccaccgtcgatctgggctgacatggtctgcttctcaaacttgagctcccctgagtacatcatggaccgaaggacagacaggctgtgggccccgatatcctggcagccatgctggatgcccactatgaggtagggcacgaacttctgaatggaccctttgtcctggatggagcccaagacatcctgcgtgatcttcgccttatccccgtcgttgaagtattgtttctggctgctgctgctcttctccatggcatccagtgagcccatgccctggtacttcttgagctgcattccgtctgagaagaagcactcgccgggggcctccatggtggcggccagcagggagcccatcatcactgtggaggctcctagggccagggccttgaccacatgccccatggtctggatgccaccatcggctatgatgggcacaccaaagttctgggtatgcttggccaccttgtacacagcagtgccctggggctgactgcaggctatcacttcctggttgatgtagatggagccgcgcagtccatgcccctgcccagcccatccacaccagcgtcaatcaggttgttggcctgggctgctgtcaccacgttccccccaatcacctggaggtggggttacttttgtttgatgtaatgcaccatggcgatctgatacaccgagttcccttgggacgagtccaagcctatgacattgacgcctacctgggtgagcaggtccaggtggtatttgtcatcctcatgggtacccacagctgccccgcccagcagctgctcatgggaatccttggaggccacagggtagtctcggttcttcagcgcggtgcaggtgataatggccaccagctcatcgcgatcattgacgataggcagcttcctttcttactaagctgcaggatctcatttgcctctttcaacctcacactgctggagccaccactagcttgatccttggcatcatcacctcactgaggagggtggtgtggtccttctcagcaagaaagtcgatgtctcgggaggtgacgatgcccaccagcttgctgcccatggtacccgtctcagtgatggggatgccagagaagccatgacgcatcttggcctccaacacatcacccacagtgtgcaaggggctcagcaccacggggtgtgtgataaagcccggttcaaacttcttgaccttctgcacctcactggcctggaactctggggtgcagttgtggtgaatgaaaccagtacctcccatcagagccatcacgatggccaggtcggcctctgtcacagtgtccatgggggaggagatcagcggcgtcttcagagtgaccattgggtcagggctgaggtcaggtccacctcatcagctatgaagtctatgaatcctgggagaatcaagaagtcgttgtaggtgagtccctggtcactggcgaagagctgctgcacggtgtggggaaaagaaagagagatcagattgttactgtgtctgtgtagaaagaagtagacataggagactccattttgttctgtactaagaaaaattcttctgcctcgagatgctgttaatctgtaaccttacccccaaccctgtgctccctgaaacatgtgctatgtcaactcagggttaagtggattaagggctgtgcaagatgtgctttgttaaacagatgcttgaaggcagcgtgctcgttaagagtcatcaccactccctaatctcaagtacccagggacacaaacactgcggaaggccgcagggacctctgcctaggaaagccaggtattgtccaaggtttctccccatgtgatagtctgaaatatggcctcatgggaagggaaagacctgaccgtcccccagcccgacacccataaagggtctgtgctgaggaggattagtaaaagaggaaggaacgcctgtttgcagttgagagaagaggaaggcatctgtctcctgccagtccctgggcaatggaatgtctcggtgtaaaacctgattgtatgttccatctgctgagataggggaaaaccgccttagggctggaggtgggacatgcgggcagcactactgctctttaagtcattgagatgtttatgtgtatgcatatctgaagcacagcacttaattctttaccttgttcttgatgcagagacctttgttcacgtgtttatctgctgaccttctctccactattattctatgaccctgccacacccccctctccgagaaacacctaaaaatgatcaataaatactaagggaactaagaggccggcgggatcctccgtatgctgaacgccggtcccctgggcccccttttttctttctct

SEQ ID NO: 290011 - DNA, 783 bp, Artificial Sequence
  derived and/or modified sequence
atgaaggacttcagccaccccaacgtgctgagcctgctgggcatctgcctgagaagcgagggcagccccctggtggtgctgccctacatgaagcacggcgacctgagaaacttcatcagaaacgagacccacaaccccaccgtgaaggacctgatcggcttcggcctgcaggtggccaagggcatgaagtacctggccagcaagaagttcgtgcacagagacctggccgccagaaactgcatgctggacgagaagttcaccgtgaaggtggccgacttcggcctggccagagacatgtacgacaaggagtactacagcgtgcacaacaagaccggcgccaagctgcccgtgaagtggatggccctggagagcctgcagacccagaagttcaccaccaagagcgacgtgtggagcttcggcgtgctgctgtgggagctgatgaccagaggcgcccccccctaccccgacgtgaacaccttcgacatcaccgtgtacctgctgcagggcagaagactgctgcagcccgagtactgccccgaccccctgtacgaggtgatgctgaagtgctggcaccccaaggccgagatgagacccagcttcagcgagctggtgagcagaatcagcgccatcttcagcaccttcatcggcgagcactacgtgcacgtgaacgccacctacgtgaacgtgaagtgcgtggccccctaccccagcctgctgagcagcgaggacaacgccgacgacgaggtggacaccagacccgccagcttctgggagaccagctag

SEQ ID NO: 290012 - DNA, 783 bp, Artificial Sequence
  derived and/or modified sequence
atgaaagacttttcccaccccaacgtattatccctgctgggcatctgcctccggtctgaggggtctccgctcgtggtgttgccttatatgaagcacggtgacctgagaaacttcatccggaacgaaacacataatcccacagtcaaggatctgatcggttttggtctgcaggtggccaaaggcatgaagtatctggctagcaaaaagtttgtccaccgtgacctggcagcgaggaactgcatgctagacgagaagtttaccgtcaaagtggctgactttggattggcaagagacatgtacgacaaggaatactacagtgttcataataagacaggcgccaaattgccagttaaatggatggccctggaatctttacagacccagaaattcactaccaagagcgatgtgtggagctttggcgtgctcctgtgggaactgatgacgcggggagcacctccataccctgacgttaatacttttgacatcactgtgtacttacttcagggaagaagactgttgcaaccagagtattgtcctgaccctctctatgaagtcatgttaaagtgttggcaccctaaggcagaaatgcggccttccttttcagagttggtgagtagaatttcggccatattttctacctttataggggaacattacgtccacgtgaatgccacatacgtgaacgtgaagtgtgtggcgccatatccctcactgttatcatccgaggataatgctgacgacgaagtagatacgcgccctgcctctttttgggagacaagctag

SEQ ID NO: 290013 - DNA, 783 bp, Artificial Sequence
  derived and/or modified sequence
atgaaggacttcagccaccccaacgtgctgagcctgctgggcatctgcctgcggtctgagggcagccccctggtggtgctgccctacatgaagcacggggacctgaggaacttcatcagaaatgagacccacaaccccaccgtgaaggacctgattggcttcggcctgcaggtggccaagggcatgaagtacctggccagcaagaagtttgtgcaccgggacctggccgccaggaactgcatgctggatgagaagttcaccgtgaaggtggccgactttggcctggcccgggacatgtatgacaaggagtactacagcgtgcacaacaagacaggagccaagctgcctgtgaagtggatggccctggagagcctgcagacccagaagttcaccaccaagagtgatgtgtggagctttggagtgctgctgtgggagctgatgaccaggggggccccaccctacccagatgtgaacacctttgacatcaccgtgtacctgctgcagggccggcggctgctgcagcctgagtactgcccagaccccctgtatgaggtgatgctgaagtgctggcaccccaaggccgagatgaggcccagcttcagcgagctggtgagccgcatcagcgccatcttcagcaccttcatcggggagcactacgtgcacgtgaatgccacctacgtgaatgtgaagtgtgtggccccctaccccagcctgctgagcagcgaggacaatgctgatgatgaggtggacaccaggcctgccagcttctgggagaccagctag

SEQ ID NO: 290014 - DNA, 1460 bp, Artificial Sequence
  derived and/or modified sequence
gcttatatccttgggtgaaatgtgttgcatctacatatatatttacaaacacacctacgtacctatagtgggcattttggttgtgtatatcatgggactttgttggacaatgatggcaagaaaattcactgtgctgtgaaatccttgaacagaatcactgacataggagaagtttcccaatttctgaccgagggaatcatcatgaaagattttagtcatcccaatgtcctctcgctcctgggaatctgcctgcgaagtgaagggtctccgctggtggtcctaccatacatgaaacatggagatcttcgaaatttcattcgaaatgagactcataatccaactgtaaaagatcttattggctttggtcttcaagtagccaaaggcatgaaatatcttgcaagcaaaaagtttgtccacagagacttggctgcaagaaactgtatgctggatgaaaaattcacagtcaaggttgctgattttggtcttgccagagacatgtatgataaagaatactatagtgtacacaacaaaacaggtgcaaagctgccagtgaagtggatggctttggaaagtctgcaaactcaaaagtttaccaccaagtcagatgtgtggtcctttggcgtgctcctctgggagctgatgacaagaggagccccaccttatcctgacgtaaacacctttgatataactgtttacttgttgcaagggagaagactcctacaacccgaatactgcccagaccccttatatgaagtaatgctaaaatgctggcaccctaaagccgaaatgcgcccatccttttctgaactggtgtcccggatatcagcgatcttctctactttcattggggagcactatgtccatgtgaacgctacttatgtgaacgtaaaatgtgtcgctccgtatccttctctgttgtcatcagaagataacgctgatgatgaggtggacacacgaccagcctccttctgggagacatcatagtgctagtactatgtcaaagcaacagtccacactttgtccaatggttttttcactgcctgacctttaaaaggccatcgatattctttgctcttgccaaaattgcactattataggacttgtattgttatttaaattactggattctaaggaatttcttatctgacagagcatcagaaccagaggcttggtcccacaggccacggaccaatggcctgcagccgtgacaacactcctgtcatattggagtccaaaacttgaattctgggttgaattttttaaaaatcaggtaccacttgatttcatatgggaaattgaagcaggaaatattgagggcttcttgatcacagaaaactcagaagagatagtaatgctcaggacaggagcggcagccccagaacaggccactcatttagaattctagtgtttcaaaacacttttgtgtgttgtatggtcaataacatttttcattactgatg

SEQ ID NO: 290015 - DNA, 783 bp, Artificial Sequence
  derived and/or modified sequence
atgaaggacttcagccaccccaacgtgctgagcctgctgggcatctgcctccgctcagaaggatcgccactggtggtgctcccatatatgaaacatggagatttgcggaatttcattaggaatgagacccataatcccaccgtaaaggacctgatcggctttggcctgcaggtagctaaagggatgaagtatctggccagtaaaaaattcgtgcacagagacctggccgcgaggaactgcatgcttgatgagaagtttacagtgaaagttgccgactttggccttgcccgggacatgtacgacaaagaatactatagcgtgcacaataagaccggagcgaaactgccagtcaaatggatggccttggaatcactacagacccaaaaattcaccacaaaaagtgatgtgtggtccttcggagtgcttctctgggagttaatgaccaggggcgctccaccctatcccgacgtgaataccttcgacatcactgtctatctgttgcaagggaggcgactactgcaacccgagtactgtcctgatccactttatgaagtcatgctcaagtgttggcaccctaaagcggagatgcgcccctccttttcagaacttgtgtctagaattagcgctattttttccaccttcatcggggaacactatgtgcatgtgaacgcaacatatgtcaacgtcaaatgtgtggccccgtatccgagcctcctgtcatccgaggacaatgccgacgacgaagtagatacacgcccagcctccttttgggagacctcctag

SEQ ID NO: 290016 - DNA, 783 bp, Artificial Sequence
  derived and/or modified sequence
atgaaggacttctctcatcctaatgtgctctcccttctggggatctgcctccgttcagaggggagccccctggttgtgctgccgtacatgaaacacggcgacctgcgcaactttattcgcaatgagacccacaaccccactgtgaaggatttaattggattcggactccaggtggcaaaaggcatgaagtatctggcaagtaaaaaatttgtgcaccgcgacctagcagctagaaactgcatgctcgatgagaagtttactgtcaaagtcgcagactttggcttagcacgggatatgtacgacaaggagtattatagtgttcataacaaaaccggcgcaaaacttcccgttaaatggatggccctggaatctcttcagactcagaaattcactactaaaagtgacgtttggagctttggtgtgcttctgtgggagctgatgacacgcggtgcccctccctatccggatgtgaacacctttgacatcaccgtgtatctgctccagggcagaagactcctccagccagaatactgccccgacccactctacgaagtgatgctgaagtgctggcaccctaaagccgagatgcgccctagtttcagtgaattggtctcccgcatatcggccatcttctccactttcattggcgagcattacgttcacgtaaatgctacctacgtgaacgtcaagtgcgtagccccatatccttccctcctctcatctgaagacaacgctgacgacgaggtggataccaggccagctagcttctgggagacatcatag

SEQ ID NO: 290017 - protein, 1236 aa, Artificial Sequence
  derived and/or modified sequence
MQLKIMPKKKRLSAGRVPLILFLCQMISALEVPLDQKSTEVMVQPPTITQQSPKDYIIDPRENIVIQCEAKGKPPPSFSWTRNGTHFDIDKDPLVTMKPGTGTLIINIMSEGKAETYEGVYQCTARNERGAAVSNNIVVRPSRSPLWTKEKLEPITLQSGQSLVLPCRPPIGLPPPIIFWMDNSFQRLPQSERVSQGLNGDLYFSNVLPEDTREDYICYARFNHTQTIQQKQPISVKVISVDELNDTIAANLSDTEFYGAKSSRERPPTFLTPEGNASNKEELRGNVLSLECIAEGLPTPIIYWAKEDGMLPKNRTVYKNFEKTLQIIHVSEADSGNYQCIAKNALGAIHHTISVRVKAAPYWITAPQNLVLSPGEDGTLICRANGNPKPRISWLTNGVPIEIAPDDPSRKIDGDTIIFSNVQERSSAVYQCNASNEYGYLLANAFVNVLAEPPRILTPANTLYQVIANRPALLDCAFFGSPLPTIEWFKGAKGSALHEDIYVLHENGTLEIPVAQKDSTGTYTCVARNKLGMAKNEVHLEIKDPTWIVKQPEYAVVQRGSMVSFECKVKHDHTLSLTVLWLKDNRELPSDERFTVDKDHLVVADVSDDDSGTYTCVANTTLDSVSASAVLSVVAPTPTPAPVYDVPNPPFDLELTDQLDKSVQLSWTPGDDNNSPITKFIIEYEDAMHKPGLWHHQTEVSGTQTTAQLKLSPYVNYSFRVMAVNSIGKSLPSEASEQYLTKASEPDKNPTAVEGLGSEPDNLVITWKPLNGFESNGPGLQYKVSWRQKDGDDEWTSVVVANVSKYIVSGTPTFVPYLIKVQALNDMGFAPEPAVVMGHSGEDLPMVAPGNVRVNVVNSTLAEVHWDPVPLKSIRGHLQGYRIYYWKTQSSSKRNRRHIEKKILTFQGSKTHGMLPGLEPFSHYTLNVRVVNGKGEGPASPDRVFNTPEGVPSAPSSLKIVNPTLDSLTLEWDPPSHPNGILTEYTLKYQPINSTHELGPLVDLKIPANKTRWTLKNLNFSTRYKFYFYAQTSAGSGSQITEEAVTTVDEAGILPPDVGAGKVQAVNPRISNLTAAAAETYANISWEYEGPEHVNFYVEYGVAGSKEEWRKEIVNGSRSFFGLKGLMPGTAYKVRVGAVGDSGFVSSEDVFETGPAMASRQVDIATQGWFIGLMCAVALLILILLIVCFIRRNKGGKYPVKEKEDAHADPEIQPMKEDDGTFGEYRLFSFVSSASF

SEQ ID NO: 290018 - protein, 1308 aa, Artificial Sequence
  derived and/or modified sequence
MQLKIMPKKKRLSAGRVPLILFLCQMISALEVPLDQKSTEVMVQPPTITQQSPKDYIIDPRENIVIQCEAKGKPPPSFSWTRNGTHFDIDKDPLVTMKPGTGTLIINIMSEGKAETYEGVYQCTARNERGAAVSNNIVVRPSRSPLWTKEKLEPITLQSGQSLVLPCRPPIGLPPPIIFWMDNSFQRLPQSERVSQGLNGDLYFSNVLPEDTREDYICYARFNHTQTIQQKQPISVKVISVDELNDTIAANLSDTEFYGAKSSRERPPTFLTPEGNASNKEELRGNVLSLECIAEGLPTPIIYWAKEDGMLPKNRTVYKNFEKTLQIIHVSEADSGNYQCIAKNALGAIHHTISVRVKAAPYWITAPQNLVLSPGEDGTLICRANGNPKPRISWLTNGVPIEIAPDDPSRKIDGDTIIFSNVQERSSAVYQCNASNEYGYLLANAFVNVLAEPPRILTPANTLYQVIANRPALLDCAFFGSPLPTIEWFKGAKGSALHEDIYVLHENGTLEIPVAQKDSTGTYTCVARNKLGMAKNEVHLEIKDPTWIVKQPEYAVVQRGSMVSFECKVKHDHTLSLTVLWLKDNRELPSDERFTVDKDHLVVADVSDDDSGTYTCVANTTLDSVSASAVLSVVAPTPTPAPVYDVPNPPFDLELTDQLDKSVQLSWTPGDDNNSPITKFIIEYEDAMHKPGLWHHQTEVSGTQTTAQLKLSPYVNYSFRVMAVNSIGKSLPSEASEQYLTKASEPDKNPTAVEGLGSEPDNLVITWKPLNGFESNGPGLQYKVSWRQKDGDDEWTSVVVANVSKYIVSGTPTFVPYLIKVQALNDMGFAPEPAVVMGHSGEDLPMVAPGNVRVNVVNSTLAEVHWDPVPLKSIRGHLQGYRIYYWKTQSSSKRNRRHIEKKILTFQGSKTHGMLPGLEPFSHYTLNVRVVNGKGEGPASPDRVFNTPEGVPSAPSSLKIVNPTLDSLTLEWDPPSHPNGILTEYTLKYQPINSTHELGPLVDLKIPANKTRWTLKNLNFSTRYKFYFYAQTSAGSGSQITEEAVTTVDEAGILPPDVGAGKVQAVNPRISNLTAAAAETYANISWEYEGPEHVNFYVEYGVAGSKEEWRKEIVNGSRSFFGLKGLMPGTAYKVRVGAVGDSGFVSSEDVFETGPAMASRQVDIATQGWFIGLMCAVALLILILLIVCFIRRNKGGKYPVKEKEDAHADPEIQPMKEDDGTFGEYSSLKNDAEDHKPLKKGSRTPSDRTVKKEDSDDSLVDYGEGVNGQFNEDGSFIGQYSGKKEKEPAEGNESSEAPSPVNAMNSFV

SEQ ID NO: 290019 - DNA, 3927 bp, Artificial Sequence
  derived and/or modified sequence
atgcaactgaagattatgccgaagaagaagcggctcagtgccgggcgggtgccactgatcctgtttctgtgccagatgatctctgctctggaagtgccccttgatcagaaaagtactgaggtgatggtccagcctccaacaattacccaacagtcacctaaagactatattatcgacccaagagaaaacatcgtgatccagtgtgaagctaaggggaaacctcctccttcattcagttggacaagaaacggcacccattttgatatagataaggatccgctggtgacaatgaaaccagggacaggaacactgataataaatattatgtcagagggcaaagctgagacttatgagggagtctatcagtgtaccgcccgcaatgagaggggggcggctgtgtctaacaatatcgtggtgcgaccatccaggtcacctctgtggacaaaggagaaactggagcctataactttacagagcggtcagagtctcgttcttccatgtagacctccaatcggcctgccaccaccaattatcttttggatggacaattcctttcaacgcctgcctcagtcagaaagagtctcacaaggcttgaacggggatctttacttttccaacgtgctgccagaggatacaagggaggactatatatgttacgctcggttcaaccacacacaaacaatccagcagaagcagcccatttccgtaaaggttataagcgtggacgaactgaatgacacaatcgcggcgaatctcagcgatactgagttttacggggctaagagctctagagaacgccccccgacttttttgacacctgaaggtaatgcttcaaataaagaggagctgcgaggtaatgtgctgagcttggaatgcattgcggagggtctgcccacacctatcatttattgggcaaaggaagacggaatgctcccaaagaatagaacagtttataagaattttgagaagaccctgcagattatccacgtcagtgaggcggacagtggcaactaccagtgtattgctaaaaacgctctaggtgcaattcaccatacaatatccgtgagagttaaagcagcgccgtattggatcactgcaccccagaacctggtgctgagccccggtgaggacgggacccttatctgccgggccaatgggaaccccaagcctagaatctcttggctgactaacggagtgcccatcgagattgcccccgacgacccttcccgcaagattgatggtgatacaatcatcttttctaatgtccaagagagaagctcagcagtataccagtgcaatgccagtaatgagtacggctaccttctagcaaatgcttttgtcaatgtgctcgcggaaccgccgaggatcttaactccggctaacaccttgtaccaagtgatagctaacagaccagctctgctggactgcgcattctttggcagccctttgccaaccatcgaatggttcaagggggcgaaggggtccgcgctgcacgaagacatctacgtgttgcacgaaaacgggacgctcgaaattcccgtggcccagaaggactccacaggaacgtacacatgcgtcgcccgaaacaagctgggcatggccaagaatgaagtgcacttggaaatcaaggaccccacatggatcgtgaagcaaccagagtatgctgtggtccagcgggggtccatggttagttttgagtgcaaagttaagcacgatcacactctatccctgacggtcctctggcttaaggacaaccgggagctcccatctgatgagcgctttactgtagataaagatcacctggtcgtggctgatgtgtcagacgacgattctggaacgtacacttgcgttgcaaacactaccttagacagcgtgtcagcctcagccgtgctaagtgtggtcgctcctacgccaaccccagccccggtctacgacgttccaaatcctccatttgatcttgagctaacagaccagctggacaaaagcgtgcagctgagttggacgccaggggatgacaataatagtccgattactaagttcataattgaatacgaagatgccatgcataagcctggcctctggcaccatcagaccgaggtgtccggaacccagacgacagcccagcttaagctttccccgtacgtcaactattccttcagagtgatggcagtgaactccatcgggaaaagcctgccctccgaggcaagcgagcagtacctcacaaaagcctctgaacccgacaagaaccccacagcggtggaagggttgggttctgagccagacaatttggtaattacgtggaagcccctcaatggtttcgaatccaacgggccaggcctgcagtataaagtaagctggcgccaaaaggacggggacgacgagtggacgtctgtcgttgtggcaaatgtaagtaagtatatcgtgtccgggacaccaaccttcgtcccttatttaatcaaggtacaggcgctgaacgatatgggcttcgcaccagagccagccgttgtgatggggcacagcggggaagatttgcccatggtcgctcctgggaatgtgagagtgaacgtggtaaattccaccctggccgaggttcattgggatccggtacctctgaagagtattcgcggccatctgcagggctacaggatttattactggaaaactcagtccagtagtaagcggaatcgacgccacattgagaagaaaattctgacctttcaggggtccaagacccatgggatgctgcccggcctggaaccttttagccactacacgctaaacgtgagggtggtcaacggtaagggagagggtccagcatccccagatcgcgtctttaatacccctgagggggtaccatcggcacccagtagtctcaaaatagttaatcccaccttagattctctgactttagagtgggatcctccatcccaccctaacggtatcctgacagagtatactttaaagtatcagccaattaattccacacacgagcttggaccactcgtggatttaaagatacccgccaacaagacccggtggaccctcaaaaacctaaacttctccacaagatacaagttttacttttatgcgcagacaagtgctggctccggctctcagattacggaagaggccgttaccacagtcgacgaagcaggaatcctcccccccgatgtaggcgctggcaaagtacaggccgtcaatccccggatctccaatctgaccgccgccgcagccgaaacatatgccaatatctcttgggagtatgagggccccgagcatgttaacttttatgttgaatatggcgtcgctggttctaaggaggagtggcggaaagaaattgtgaacggcagccggtctttcttcggcctcaaggggctgatgcctggcacagcatataaggttcgggtcggagccgtgggtgacagtggcttcgtgtcctctgaagacgtgtttgagactggccccgctatggccagccggcaagtagatatcgccacgcagggatggttcatcggactgatgtgcgcggttgccctcctgattctgattttgctaatcgtctgttttatccgccggaataaaggaggaaagtatcctgtcaaggagaaggaggacgcacacgcagatcccgaaatacagcccatgaaagaggacgacgggacttttggagagtattctagtctgaaaaacgacgctgaagaccataagcccctcaagaaggggtcgaggacacctagcgatcgcaccgtcaaaaaagaggacagcgacgattcacttgtggactacggcgagggggtgaacggccagttcaatgaggatggatcctttattgggcagtattccgggaaaaaagagaaggagccagcagagggaaatgaatctagtgaggccccatcgcccgtaaatgctatgaatagcttcgtctag

SEQ ID NO: 290020 - DNA, 3927 bp, Artificial Sequence
  derived and/or modified sequence
atgcagctgaagatcatgcccaagaagaagaggctgtctgctggccgggtgcccctcatcctcttcctgtgccagatgatcagcgccctggaggtgcccctggaccagaagagcacagaggtgatggtgcagccccccaccatcacccagcagagccccaaggactacatcatcgacccccgggagaacatcgtcatccagtgtgaggccaagggcaagcccccacccagcttctcctggaccagaaatggcacccactttgatattgacaaggaccccctggtgaccatgaagccaggcaccggcaccctcatcatcaacatcatgtctgagggcaaggccgagacctatgaaggagtgtaccagtgcacagccagaaatgaaagaggagctgctgtgagcaacaacatcgtggtgcggcccagccgcagccccctgtggaccaaggagaagctggagcccatcaccctgcagagcggccagagcctggtgctgccctgcaggcctcccatcggcctgcccccacccatcatcttctggatggacaacagcttccagaggctgccccagagcgagcgggtgtcccagggcctgaatggagacctgtacttcagcaatgtgctgcctgaggacacccgggaggactacatctgctacgcccgcttcaaccacacccagaccatccagcagaagcagcccatctctgtgaaggtgatctctgtggatgagctgaatgacaccatcgccgccaacctgagtgacacagagttctacggggccaagagcagccgggagaggcctcccaccttcctgaccccagagggcaatgccagcaacaaggaggagctgcggggaaatgtgctgagcctggagtgcatcgccgagggcctgcccacccccatcatctactgggccaaggaggatggcatgctgcccaagaacagaacagtgtacaagaactttgagaagaccctgcagatcatccacgtgtctgaggccgacagcggcaactaccagtgcatcgccaagaatgccctgggcgccatccaccacaccatctctgtgcgggtgaaggccgccccctactggatcacagccccccagaacctggtgctgagccctggagaagatggcaccctcatctgccgggccaatggaaaccccaagccccgcatctcctggctgaccaatggagtgcccattgaaattgccccagatgaccccagcaggaagattgatggagacaccatcatcttcagcaatgtgcaggagaggagcagcgctgtgtaccagtgcaatgccagcaatgaatatggctacctgctggccaatgcctttgtgaatgtgctggccgagcccccacgcatcctgaccccagccaacaccctgtaccaggtgattgccaacagacctgccctgctggactgtgccttcttcggcagccccctgcccaccatcgagtggttcaagggggccaagggcagcgccctgcacgaggacatctacgtgctgcatgaaaatggcaccctggagatccctgtggcccagaaggacagcacaggcacctacacctgtgtggccaggaacaagctgggcatggccaagaatgaggtgcacctggagatcaaggaccccacctggatcgtgaagcagccagaatatgctgtggtgcagaggggctccatggtgtcctttgagtgcaaggtgaagcatgaccacaccctgagcctgactgtgctgtggctgaaggacaaccgggagctgcccagtgatgagcgcttcaccgtggacaaggaccacctggtggtggctgatgtgtctgatgatgattctggcacctacacctgtgtggccaacaccaccctggacagcgtgtctgccagcgctgtgctgtctgtggtggcccccacccccaccccagcccctgtgtatgatgtgcccaaccccccatttgacctggagctgacagaccagctggacaagtctgtgcagctgtcctggaccccaggagatgacaacaacagccccatcaccaagttcatcatcgagtatgaagatgccatgcacaagccaggcctgtggcaccaccagacagaggtgtctggcacccagaccacagcccagctgaagctgagcccctacgtgaactacagcttccgggtgatggctgtgaacagcatcggcaagagcctgcccagcgaggccagcgagcagtacctgaccaaggccagcgagccagacaagaaccccacagctgtggagggcctgggcagcgagccagacaacctggtgatcacctggaagcccctgaatggatttgagagcaatggacctggcctgcagtacaaggtgtcctggaggcagaaggatggagatgatgagtggacctctgtggtggtggccaacgtgtccaagtacatcgtgtctggcacccccacctttgtgccctacctgatcaaggtgcaggccctgaatgacatgggctttgcccctgagcctgctgtggtgatgggccacagcggggaggacctgcccatggtggcccctggaaatgtgcgggtgaatgtggtgaacagcaccctggccgaggtgcactgggaccctgtgcccctgaagagcatccggggccacctgcagggctaccgcatctactactggaagacccagagcagcagcaagaggaacagaagacacatcgagaagaagatcctgaccttccagggcagcaagacccacggcatgctgcccggcctggagcccttcagccactacaccctgaatgtgcgggtggtgaatggcaagggggagggccctgccagcccagacagagtcttcaacaccccagagggcgtgcccagcgcccccagcagcctgaagatcgtgaaccccaccctggacagcctgaccctggagtgggacccccccagccaccccaacggcatcctgacagagtacaccctgaagtaccagcccatcaacagcacccatgagctgggccccctggtggacctgaagatcccagccaacaagacccgctggaccctgaagaacctgaacttcagcacccgctacaagttctacttctacgcccagaccagcgctggcagcggcagccagatcacagaggaggccgtgaccaccgtggatgaagctggcatcctgcccccagatgtgggcgctgggaaggtgcaggccgtgaacccccgcatcagcaacctgacagctgctgctgctgagacctacgccaacatctcctgggagtatgagggccctgagcacgtgaacttctacgtggagtatggagtggccggcagcaaggaggagtggaggaaggagatcgtgaatggcagccgctccttcttcggcctgaagggcctgatgcctggaacagcctacaaggtgcgggtgggcgctgtgggggacagcggctttgtgtccagtgaagatgtgtttgaaacaggccctgccatggccagccggcaggtggacatcgccacccagggctggttcatcggcctgatgtgtgctgtggccctgctgatcctgatcctgctgattgtgtgcttcatcagaagaaacaagggcggcaagtaccctgtgaaggagaaggaggatgcccacgccgaccctgagatccagcccatgaaggaggatgatggcaccttcggggagtacagcagcctgaagaatgatgctgaggaccacaagcccctgaagaagggcagcaggacccccagcgacagaacagtgaagaaggaggacagtgatgacagcctggtggactatggagaaggagtgaatggccagttcaatgaagatggcagcttcatcggccagtacagcggcaagaaggagaaggagcctgctgagggcaatgaatcttctgaggcccccagccctgtgaatgccatgaacagctttgtgtag

SEQ ID NO: 290021 - DNA, 3927 bp, Artificial Sequence
  derived and/or modified sequence
atgcagctgaagatcatgcccaagaagaagcggctgagcgccggcagagttccattgattctattcctgtgccagatgatcagcgctctggaggtaccgcttgatcagaaatcaactgaggttatggtacagccccccacaatcacccagcagagtccaaaggactacataattgaccctagggaaaatatcgttattcagtgcgaggcaaagggtaaacctccccctagtttttcctggacccggaacgggacacactttgacatcgacaaggatcccctggtcactatgaagcctggcacaggcaccctaatcatcaacattatgtcagagggcaaagctgagacctatgagggggtctaccaatgtacagctagaaatgaacgaggtgctgcagttagtaataatatcgtggtgcgaccttctcggtcccccctgtggaccaaggaaaagcttgaacccatcaccctgcagtcaggacagagtctagttttgccctgtcgaccccccattggactgcctcctcccatcatcttctggatggataacagttttcaacggttacctcaaagcgaaagagttagccagggtctaaacggggatttgtacttctccaacgtgttgcccgaagacacaagggaagattatatctgctacgcccgcttcaaccacacacaaactattcagcagaaacagcctatctctgtgaaagtgatttctgtcgatgagctgaacgacaccatcgccgcaaacctgagcgacactgaattctatggagccaagtcttctagagagcggccccctactttcctcacacccgagggaaatgctagtaacaaagaggaactccgcggcaacgtgctgtccctggagtgcatcgctgaggggctgccaaccccgattatatattgggctaaggaggatggcatgctgcctaagaatagaaccgtctacaaaaacttcgagaaaacattacagattatccatgtcagtgaagccgactctggaaactaccagtgtatcgccaaaaatgccctgggcgctatccatcatactatttctgtgcgagtaaaggccgccccttactggatcactgcaccccaaaacctggtcctgagtcccggggaggatggtacactgatatgccgggcaaatggaaatcctaaacctcggatctcctggctcaccaatggagtgcctatcgagatcgcaccagatgatccaagcagaaagatcgacggagataccataatctttagcaacgttcaggagcgctcgtcagccgtctatcagtgtaatgccagcaacgaatacggctaccttctcgcaaacgcattcgtgaacgtgttagccgaacccccaaggatactcacgccagccaatactctgtaccaggtgatcgccaacagaccggccctgctggactgtgcgttttttggctctcctttgcccacgatcgagtggttcaaaggagccaagggatccgcactccacgaagatatttatgtgcttcatgaaaacggaacactggagatccccgtggcccaaaaggactctacaggaacttacacctgcgtggcgcggaataagctggggatggctaagaatgaggtccatctcgaaatcaaggaccccacatggattgtcaagcagcccgagtacgccgtggtgcaaagggggagtatggtttcgtttgaatgcaaggttaagcatgatcacacgctgtctctaaccgtcttgtggttaaaagataacagggagctgccttccgacgaacgcttcacagttgataaggatcacctggtcgtggcggatgtgtcagatgatgactcagggacctacacatgtgtggctaatacaacgttagattctgtgagcgcgtctgccgttctcagtgttgtcgccccgaccccgacgcccgcccccgtgtatgacgttcccaaccctcccttcgacctggagcttaccgaccagttggacaaatcggtgcaactcagttggacccccggggatgataacaattcaccaataaccaaatttattattgaatacgaggatgccatgcacaaacccgggctgtggcaccaccaaacagaggtgagtgggactcagactaccgcccaacttaaactcagcccatatgtaaactactcctttcgcgtgatggcagtgaactctatcggtaaaagcctgccaagcgaagccagcgagcagtacctcacaaaagcctctgaaccagacaaaaaccctacagccgtggagggacttggcagcgaacctgataacctagtcattacttggaagcctttgaatgggtttgaaagcaatggcccgggcctgcaatacaaagtttcctggcgacagaaagacggagatgacgaatggacgtccgttgtggttgctaacgtttcgaagtacattgtatctggaacccctaccttcgtaccttaccttattaaggtgcaagcactgaacgacatgggcttcgcccctgaacccgccgtggtgatgggccattccggggaagacctgccgatggtggccccaggcaacgtgcgcgtgaatgtagtcaacagcacactggcagaggtccactgggatcccgtccctctgaagtctatccggggccatttacagggctacaggatttactactggaaaacacagagctcgagcaaaagaaaccgacgccacattgaaaaaaagatactaacctttcagggcagtaaaacacacggcatgctgcctggtctggagcctttttcccattacaccctgaacgtccgtgtcgttaatggtaagggagagggtcccgcttcacccgatagagtgttcaacacacctgagggcgtacccagtgccccttcctccctgaaaattgtaaaccccaccttagactctctcactctggagtgggaccctccttctcatccaaacgggatcctgacagagtatacgcttaagtaccagcccataaactctacccacgagctcggacccctggtggatttgaagatcccagcaaataagacacgctggaccctgaagaatcttaacttcagcacccgctacaagttttatttttacgcacagacctccgccggtagcggttcacagatcacggaagaggctgtgaccacagtggacgaagcagggatccttccccccgacgtgggggcgggaaaagttcaggcagtgaatccccgtatatcaaatttgacggctgcagcggcagagacatacgcaaatatatcctgggaatatgaagggccagagcatgtgaacttctacgtagagtacggagtggccggcagcaaagaggaatggcgaaaagaaatcgtaaacggatctaggtccttttttggactgaagggtctgatgccgggcacagcgtacaaggtgcgcgtgggcgcagtgggcgattccggctttgtgtcatccgaggacgtgttcgagactgggcccgctatggcaagccggcaggtggacatagcgacccagggatggttcattggcctgatgtgcgcggtggcgctgctcattttgatcctcctgattgtgtgtttcattaggcgtaataaaggggggaaatatcctgtgaaggagaaagaagatgcccatgccgaccctgaaatccagccaatgaaggaggatgatggtaccttcggagagtactcatcactcaagaatgatgccgaagatcataaacccctgaagaaggggagcaggacccccagcgatcggaccgtgaagaaagaagacagtgatgactcgcttgtggactatggagaaggagtcaacggtcaatttaacgaagacggtagcttcattggccaatactccggaaaaaaagagaaagagcccgctgaaggcaacgagagcagtgaagccccctctcccgtgaacgctatgaactcttttgtctag

SEQ ID NO: 290022 - DNA, 6671 bp, Artificial Sequence
  derived and/or modified sequence
cgcgcgggcgcgggggacggcgcaggggccgcctggctggagcagccagaggggatagcttcgtcgagaacggaggacaccggcggtccagggtcctgggcagtcgcgccagagctgagcggagggcgcggcgcgagaacgaatctttgtgacattctctctcagcattctttatcccctgtttgctgaagacttcgacaaaagctggtcttagctgttggcattctcctgagaaaaggatagcttcagaaatcagaaaaacatttgggaggtgtctagcccagtggaccttctgaagagcaatgctaagaagacgtttggtttaaagaattaaaaggaagaacaacttaagagcttcttcaaagtttcccgcatgaaaattacttaaacgttgcacacaacgtttcacaaaatcttttgtgaaagaagaaaaggaaattcagtgtgtgagtctcagcaggagttaagctaatgcagcttaaaataatgccgaaaaagaagcgcttatctgcgggcagagtgcccctgattctcttcctgtgccagatgattagtgcactggaagtacctcttgatcaaaaatctactgaagtaatggtacagcctccaaccatcacccaacagtctccaaaagattacattattgaccctcgggagaatattgtaatccagtgtgaagccaaagggaaaccgcccccaagcttttcctggacccgtaatgggactcattttgacatcgataaagaccctctggtcaccatgaagcctggcacaggaacgctcataattaacatcatgagcgaagggaaagctgagacctatgaaggagtctatcagtgtacagcaaggaacgaacgcggagctgcagtttctaataacattgttgtccgcccatccagatcaccattgtggaccaaagaaaaacttgaaccaatcacacttcaaagtggtcagtctttagtacttccctgcagacccccaattggattaccaccacctataatattttggatggataattcctttcaaagacttccacaaagtgagagagtttctcaaggtttgaatggggacctttatttttccaatgtcctcccagaggacacccgcgaagactatatctgttatgctagatttaatcatactcaaaccatacagcagaagcaacctatttctgtgaaggtgatttcagtggatgaattgaatgacactatagctgctaatttgagtgacactgagttttatggtgctaaatcaagtagagagaggccaccaacatttttaactccagaaggcaatgcaagtaacaaagaggaattaagaggaaatgtgctttcactggagtgcattgcagaaggactgcctaccccaattatttactgggcaaaggaagatggaatgctacccaaaaacaggacagtttataagaactttgagaaaaccttgcagatcattcatgtttcagaagcagactctggaaattaccaatgtatagcaaaaaacgcattaggagccatccaccataccatttctgttagagttaaagcggctccatactggatcacagcccctcaaaatcttgtgctgtccccaggagaggatgggaccttgatctgcagagctaatggcaaccccaaacccagaattagctggttaacaaatggagtcccaatagaaattgcccctgatgaccccagcagaaaaatagatggcgataccattattttttcaaatgttcaagaaagatcaagtgcagtctatcagtgcaatgcctctaatgaatatggatatttactggcaaacgcatttgtaaatgtgctggctgagccaccacgaatcctcacacctgcaaacacactctaccaggtcattgcaaacaggcctgctttactagactgtgccttctttgggtctcctctcccaaccatcgagtggtttaaaggagctaaaggaagtgctcttcatgaagatatttatgttttacatgaaaatggaactttggaaattcctgtggcccaaaaggacagtacaggaacttatacgtgtgttgcaaggaataaattagggatggcgaagaatgaagttcacttagaaatcaaagatcctacatggatcgttaaacagcccgaatatgcagttgtgcaaagagggagcatggtgtcctttgaatgcaaagtgaaacatgatcacaccttatccctcactgtcctgtggctgaaggacaacagggaactgcccagtgatgaaaggttcactgttgacaaggatcatctagtggtagctgatgtcagtgacgatgacagcgggacctacacgtgtgtggccaacaccactctggacagcgtctccgccagcgctgtgcttagcgttgttgctcctactccaactccagctcccgtttacgatgtcccaaatcctccctttgacttagaactgacagatcaacttgacaaaagtgttcagctgtcatggaccccaggcgatgacaacaatagccccattacaaaattcatcatcgaatatgaagatgcaatgcacaagccagggctgtggcaccaccaaactgaagtttctggaacacagaccacagcccagctgaagctgtctccttacgtgaactactccttccgcgtgatggcagtgaacagcattgggaagagcttgcccagcgaggcgtctgagcagtatttgacgaaagcctcagaaccagataaaaaccccacagctgtggaaggactgggatcagagcctgataatttggtgattacgtggaagcccttgaatggtttcgaatctaatgggccaggccttcagtacaaagttagctggcgccagaaagatggtgatgatgaatggacatctgtggttgtggcaaatgtatccaaatatattgtctcaggcacgccaacctttgttccatacctgatcaaagttcaggccctgaatgacatggggtttgcccccgagccagctgtagtcatgggacattctggagaagacctcccaatggtggctcctgggaacgtgcgtgtgaatgtggtgaacagtaccttagccgaggtgcactgggacccagtacctctgaaaagcatccgaggacacctacaaggctatcggatttactattggaagacccagagttcatctaaaagaaacagacgtcacattgagaaaaagatcctcaccttccaaggcagcaagactcatggcatgttgccggggctagagccctttagccactacacactgaatgtccgagtggtcaatgggaaaggggagggcccagccagccctgacagagtctttaatactccagaaggagtccccagtgctccctcgtctttgaagattgtgaatccaacactggactctctcactttggaatgggatccaccgagccacccgaatggcattttgacagagtacaccttaaagtatcagccaattaacagcacacatgaattaggccctctggtagatttgaaaattcctgccaacaagacacggtggactttaaaaaatttaaatttcagcactcgatataagttttatttctatgcacaaacatcagcaggatcaggaagtcaaattacagaggaagcagtaacaactgtggatgaagctggtattcttccacctgatgtaggtgcaggcaaagttcaagcagtaaatcccaggatcagcaatcttactgctgcagctgctgagacctatgccaatatcagttgggaatatgagggaccagagcatgtgaacttttatgttgaatatggtgtagcaggcagcaaagaagaatggagaaaagaaattgtaaatggttctcggagcttctttgggttaaagggtctaatgccaggaacagcatacaaagttcgagttggtgctgtgggggactctggttttgtgagttcagaggatgtgtttgagacaggcccagcgatggcaagccggcaggtggatattgcaactcagggctggttcattggtctgatgtgtgctgttgctctccttatcttaattttgctgattgtttgcttcatcagaagaaacaagggtggtaaatatccagttaaagaaaaggaagatgcccatgctgaccctgaaatccagcctatgaaggaagatgatgggacatttggagaatacagttcattgaaaaatgatgcagaagaccacaagcctttgaaaaaaggaagtcgaactccttcagacaggactgtgaaaaaagaagatagtgacgacagcctagttgactatggagaaggggttaatggccagttcaatgaggatggctcctttattggacaatacagtggtaagaaagagaaagagccggctgaaggaaacgaaagctcagaggcaccttctcctgtcaacgccatgaattcctttgtttaatttttaagctctttgccaatattccatttctctagaatgtttatcctaagcacttgtttgtcagccctctcatactatgaacatatgggtagagagtatattttctgctgtatgttagtattatgagaatagttacagcaaaaacataactcagtcaaatgatatgttaatatgaactggaatgcaaagtgcatactttttcattcaaaatgggtattcttgatttcctcagaactgataaaaaataatgcaacatcaccaacagatcctgttatttcctctgcaggatacagttcaatatgatgcatgaaaaatgctccacatttaaaggacatacccgtgtatgttatgaaaacatggtttgatactttgtttatactaccctcagctgaacccctatatatgaattccgttttcattgtcaagaatgttactgtagtattctctagaacttcaatgtctttgtggacattgttgtgaaattggtgactatgtatagctgtcgttagtctttttgggagactgttaggaacagtttgtacagtatatacttgctaaatgagttcattatgacagtcacattgctgatgcttactgagaactattacctactcttggctcctgttactccgtaggcttcttaatcttccaggcattacagcagcacagtgttctactttttacatcatttctatgttcggttgtttttaggcataaacaatgtgtattgcagtgcatttcggcatttgtgccatactgaaagaatcaaaaacaaatcatccaaattaaatttcaaacattatttcagagaacacagggcaagacacatacagtgccttcagatattaagcattccacaacatcgtgcattctgtatcagctggtccagtccattctgggtcctagattactgtcattgtctaaaagtaacttttaaaaagcagagttcatgaaaactgcaatgctgggaaaagaaggaaacatgaaaataaaaataagacagtttattagaaatagcatttcctcataagcataaaaagaaaatctttgttgccaactgaagcacatgatgattttgtggtcctttatggtttctattacattcagtaagaaagatgtcaacatgctagaaaattaattttaaaactaagttattccaacactaaaagcatacaacagcatgccaacagtaatatattattctccaagactttacctatgtaagtgttcaaaactctgcagcattaaacaacgtgtatgcaaattgttatggatacatttcagaatctaagaaatcaggcaagtgcttaaaaggccaacggtccaagggattacatctgcagtttaaaaagtaaatatatattctatcgtattcataaacaatatctatcaaatgggttacctccaaatatgaaaatctataacaacctatggttgaaggaatgctcagtttcatttgccaataaattggtttctcataacttgcatcaagtttaattttaagtaaagctttttatatgtagatattttgttgaatttgtaaatacacttaaaatgtagatgctatatgcttataggtgttacatacaaataaacatgcaatgtttatgttgtactgtataagaggtaagctaattaatgcagtgaatgggattggaaagcatctacttaaatatctattgggttcccccctccccccaccttttttgctgtgaaactgaaatagtgaacttttctacgtattgacagcagatttttcgatgaaatcttcagagctttgcctatggggcacagtaggcctagtaacctggcatgtttgatatatgtaggtaaagcataatttaaagtaatcccaggtaaagatggccctaaatactttcatgtctctatattcatttttcacagatccacctgtctcttgaaaatataaaaagacaaaacaggtttgccttggcatcagagagcacaaagattaaaagttactttaaatttgccaatattttgggagaacaataaaactacattttttcctcttccatactggtagatgcgaaatttatctgtgcatgaaagggtcacttctgtaatagtgcaacagatttggtattaaaaattaaatgtggttttaaaagttcctctctcttttgtaatttatgttcccaattgagtgtgaatgtccaagtaatggtgtatgtaatggtacaggcaaatgtgactggatttccctcaaaaaagtaactattaaacagtcttgatctctttgtgacttttaa

SEQ ID NO: 290023 - DNA, 3927 bp, Artificial Sequence
  derived and/or modified sequence
atgcagctcaagattatgccaaaaaaaaaacgactgagtgctggcagagtccctttgatcctgttcctttgtcagatgataagcgcattagaggtgcccctagatcagaagtcaactgaagtcatggtgcaaccacctacaattactcaacaatcccccaaggactatatcattgacccaagagagaatatagtgatccagtgcgaggcaaagggcaagccgccaccaagcttcagctggaccaggaacggtacacacttcgatatcgacaaagatccactggtcacaatgaagccaggaacagggaccctgatcatcaacataatgtcagagggcaaggcagaaacttatgagggcgtctaccagtgcaccgcaaggaatgaaagaggagccgctgtgtcgaataacatcgtggtgcgaccttccaggtcaccactctggaccaaagagaagttagaaccaatcaccctccagagcggccaatcccttgtcctcccgtgcaggcctcccatcgggttaccccctcctatcatattctggatggataatagttttcagaggctgcctcagtctgagcgagtgagtcagggacttaacggagacctgtacttctccaacgttttacccgaagataccagagaggattatatctgctacgccaggttcaatcacacacagacaattcagcagaaacagccaattagtgtcaaggtgatcagcgtggacgagctgaacgataccatagccgctaacctgtcggacacagagttctacggtgccaagagctccagagagcgacccccaacgttcctcactcccgagggaaatgcttcaaacaaggaggagctgcggggaaatgtgttatccttggagtgcatagcagaaggattgccaacccccatcatctattgggctaaagaagacgggatgttgcccaagaacaggacagtctataaaaacttcgaaaagacgctgcagattattcatgtcagcgaggctgactcaggcaattaccagtgcattgccaagaacgcactaggagcaatccaccacaccatatctgtacgggtgaaagccgcaccctactggataacagcccctcagaacttggtgctttcgccaggagaggacggaaccctgatctgccgagctaacggcaatcccaaaccacgtatcagttggctgaccaacggagttccaatcgagatcgctcccgatgacccatcgagaaaaatagacggcgataccatcatcttcagcaatgtacaggagcggagcagcgccgtgtaccagtgcaacgcttcaaatgagtacggatacctgcttgccaatgctttcgtcaacgttctggctgagccacctcgaatactaacccctgcaaacactctttatcaggtcattgcaaaccggccagctctgctcgattgcgcattttttggctccccattgcccacaatcgaatggtttaagggtgccaaagggagcgctctacacgaagatatctacgtcctgcatgagaacggtactcttgaaatacccgttgctcagaaggatagcaccggaacctacacatgtgtggcccgtaacaaactcggtatggctaagaacgaggtgcaccttgagattaaggaccctacttggattgtcaaacagcctgagtacgctgtcgtccaacgcggttcgatggtaagtttcgagtgtaaggtgaagcacgatcataccctttcccttactgttttgtggcttaaggacaaccgggagctaccaagtgatgagagattcaccgtcgacaaggatcacctcgtggttgccgatgtcagcgatgacgactcgggcacctacacgtgtgtcgcaaacactaccctggacagcgtgagtgccagcgcagttctatcggttgtcgccccaaccccaacacccgcacccgtgtatgatgtgccaaatccaccctttgaccttgaacttactgaccagttggataagagtgtgcaactttcatggaccccaggggacgataacaacagccccatcactaagttcatcatagagtacgaagacgctatgcacaaaccaggattatggcatcatcagactgaggtctctgggacccagaccaccgctcagctaaagctgagcccgtacgtgaattatagcttccgcgtgatggctgtgaactctattggtaaatccttgccttccgaggccagtgagcagtatttgacaaaggcaagtgaaccagacaaaaacccaacagccgttgaaggattgggctcggagcccgataatttggtgattacctggaaacctctcaatgggttcgagtctaacgggcctggactgcagtacaaagtctcctggcgacagaaagatggtgacgatgagtggacctcggttgttgttgctaatgtcagcaagtacatcgttagtggcacacccacgtttgtgccatatcttataaaagtgcaggcactcaacgacatgggatttgctcctgaacctgccgtcgtgatggggcattcaggcgaagatctacccatggtggccccagggaacgtaagggtgaacgtggtcaatagcactctggctgaggtccactgggatccagtgccattgaaaagcatccgtggtcatctacagggctatagaatctactattggaagactcagtctagttccaagcgaaacaggcgccacatagaaaaaaaaattcttacctttcagggatctaagacccatgggatgctgccagggcttgagccttttagtcattatacattgaatgtgagggttgttaacggcaagggggagggacccgctagccccgatcgagtgttcaatactccagagggagtgccaagtgcccctagctcactcaaaatagtcaatcctacactcgactctctcacgctggagtgggatcctccgtcccaccccaatgggattttgaccgagtataccctcaagtatcagccaataaattctacgcatgaactgggccctcttgtggacctgaaaatccccgctaacaagactagatggacgctgaaaaacctgaacttttccacacgatataaattttacttttacgcacagacatcagcaggatccggctcccagatcaccgaggaggctgtgaccactgttgacgaggccggaattctgcctcccgatgttggcgctgggaaggtccaggcggttaatcccagaatttccaacctgaccgcggctgccgctgagacctatgctaacataagctgggagtacgaggggcctgagcatgttaacttctacgtggaatacggagtggctggttcaaaagaggaatggcgcaaggagattgtgaatggttcccggtccttctttgggctgaaaggtttaatgccaggtacagcttacaaagtgagggtgggagcggtgggagattcaggattcgtgtccagcgaggacgtcttcgagactggacccgctatggcgagtcggcaggtggatattgctacccagggatggttcatcggccttatgtgtgctgttgctctcttgatcctcatactgctgatagtgtgctttataaggagaaataagggtggaaagtaccctgtgaaggaaaaagaggacgctcatgccgaccccgagatccagcccatgaaggaagacgatggaacgtttggagagtactcctcactgaaaaatgacgccgaggatcataagccacttaagaaaggcagcagaactccgtctgacaggacagtgaaaaaggaagattcagacgacagtctggtagactatggcgagggggtcaatgggcagttcaacgaagatggtagtttcattgggcagtacagcgggaagaaagaaaaagaaccagcagagggcaatgagagttcagaagcaccaagtcctgtgaatgctatgaactcatttgtgtag

SEQ ID NO: 290024 - DNA, 3927 bp, Artificial Sequence
  derived and/or modified sequence
atgcagctgaagatcatgcccaagaagaagagactgagcgccggcagagtgcccctgatcctgttcctgtgccagatgatcagcgccctggaggtgcccctggaccagaagagcaccgaggtgatggtgcagccccccaccatcacccagcagagccccaaggactacatcatcgaccccagagagaacatcgtgatccagtgcgaggccaagggcaagcccccccccagcttcagctggaccagaaacggcacccacttcgacatcgacaaggaccccctggtgaccatgaagcccggcaccggcaccctgatcatcaacatcatgagcgagggcaaggccgagacctacgagggcgtgtaccagtgcaccgccagaaacgagagaggcgccgccgtgagcaacaacatcgtggtgagacccagcagaagccccctgtggaccaaggagaagctggagcccatcaccctgcagagcggccagagcctggtgctgccctgcagaccccccatcggcctgcccccccccatcatcttctggatggacaacagcttccagagactgccccagagcgagagagtgagccagggcctgaacggcgacctgtacttcagcaacgtgctgcccgaggacaccagagaggactacatctgctacgccagattcaaccacacccagaccatccagcagaagcagcccatcagcgtgaaggtgatcagcgtggacgagctgaacgacaccatcgccgccaacctgagcgacaccgagttctacggcgccaagagcagcagagagagaccccccaccttcctgacccccgagggcaacgccagcaacaaggaggagctgagaggcaacgtgctgagcctggagtgcatcgccgagggcctgcccacccccatcatctactgggccaaggaggacggcatgctgcccaagaacagaaccgtgtacaagaacttcgagaagaccctgcagatcatccacgtgagcgaggccgacagcggcaactaccagtgcatcgccaagaacgccctgggcgccatccaccacaccatcagcgtgagagtgaaggccgccccctactggatcaccgccccccagaacctggtgctgagccccggcgaggacggcaccctgatctgcagagccaacggcaaccccaagcccagaatcagctggctgaccaacggcgtgcccatcgagatcgcccccgacgaccccagcagaaagatcgacggcgacaccatcatcttcagcaacgtgcaggagagaagcagcgccgtgtaccagtgcaacgccagcaacgagtacggctacctgctggccaacgccttcgtgaacgtgctggccgagccccccagaatcctgacccccgccaacaccctgtaccaggtgatcgccaacagacccgccctgctggactgcgccttcttcggcagccccctgcccaccatcgagtggttcaagggcgccaagggcagcgccctgcacgaggacatctacgtgctgcacgagaacggcaccctggagatccccgtggcccagaaggacagcaccggcacctacacctgcgtggccagaaacaagctgggcatggccaagaacgaggtgcacctggagatcaaggaccccacctggatcgtgaagcagcccgagtacgccgtggtgcagagaggcagcatggtgagcttcgagtgcaaggtgaagcacgaccacaccctgagcctgaccgtgctgtggctgaaggacaacagagagctgcccagcgacgagagattcaccgtggacaaggaccacctggtggtggccgacgtgagcgacgacgacagcggcacctacacctgcgtggccaacaccaccctggacagcgtgagcgccagcgccgtgctgagcgtggtggcccccacccccacccccgcccccgtgtacgacgtgcccaacccccccttcgacctggagctgaccgaccagctggacaagagcgtgcagctgagctggacccccggcgacgacaacaacagccccatcaccaagttcatcatcgagtacgaggacgccatgcacaagcccggcctgtggcaccaccagaccgaggtgagcggcacccagaccaccgcccagctgaagctgagcccctacgtgaactacagcttcagagtgatggccgtgaacagcatcggcaagagcctgcccagcgaggccagcgagcagtacctgaccaaggccagcgagcccgacaagaaccccaccgccgtggagggcctgggcagcgagcccgacaacctggtgatcacctggaagcccctgaacggcttcgagagcaacggccccggcctgcagtacaaggtgagctggagacagaaggacggcgacgacgagtggaccagcgtggtggtggccaacgtgagcaagtacatcgtgagcggcacccccaccttcgtgccctacctgatcaaggtgcaggccctgaacgacatgggcttcgcccccgagcccgccgtggtgatgggccacagcggcgaggacctgcccatggtggcccccggcaacgtgagagtgaacgtggtgaacagcaccctggccgaggtgcactgggaccccgtgcccctgaagagcatcagaggccacctgcagggctacagaatctactactggaagacccagagcagcagcaagagaaacagaagacacatcgagaagaagatcctgaccttccagggcagcaagacccacggcatgctgcccggcctggagcccttcagccactacaccctgaacgtgagagtggtgaacggcaagggcgagggccccgccagccccgacagagtgttcaacacccccgagggcgtgcccagcgcccccagcagcctgaagatcgtgaaccccaccctggacagcctgaccctggagtgggacccccccagccaccccaacggcatcctgaccgagtacaccctgaagtaccagcccatcaacagcacccacgagctgggccccctggtggacctgaagatccccgccaacaagaccagatggaccctgaagaacctgaacttcagcaccagatacaagttctacttctacgcccagaccagcgccggcagcggcagccagatcaccgaggaggccgtgaccaccgtggacgaggccggcatcctgccccccgacgtgggcgccggcaaggtgcaggccgtgaaccccagaatcagcaacctgaccgccgccgccgccgagacctacgccaacatcagctgggagtacgagggccccgagcacgtgaacttctacgtggagtacggcgtggccggcagcaaggaggagtggagaaaggagatcgtgaacggcagcagaagcttcttcggcctgaagggcctgatgcccggcaccgcctacaaggtgagagtgggcgccgtgggcgacagcggcttcgtgagcagcgaggacgtgttcgagaccggccccgccatggccagcagacaggtggacatcgccacccagggctggttcatcggcctgatgtgcgccgtggccctgctgatcctgatcctgctgatcgtgtgcttcatcagaagaaacaagggcggcaagtaccccgtgaaggagaaggaggacgcccacgccgaccccgagatccagcccatgaaggaggacgacggcaccttcggcgagtacagcagcctgaagaacgacgccgaggaccacaagcccctgaagaagggcagcagaacccccagcgacagaaccgtgaagaaggaggacagcgacgacagcctggtggactacggcgagggcgtgaacggccagttcaacgaggacggcagcttcatcggccagtacagcggcaagaaggagaaggagcccgccgagggcaacgagagcagcgaggcccccagccccgtgaacgccatgaacagcttcgtgtag

SEQ ID NO: 290025 - DNA, 675 bp, Artificial Sequence
  derived and/or modified sequence
atgcccaacagatgcggcatcatccacgtgagaggccccatgccccccaacagaatcagccacggcgaggtgctggagtggcagaagaccttcgaggagaagctgacccccctgctgagcgtgagagagagcctgagcgaggaggaggcccagaagatgggcagaaaggaccccgagcaggaggtggagaagttcgtgaccagcaacacccaggagctgggcaaggacaagtggctgtgccccctgagcggcaagaagttcaagggccccgagttcgtgagaaagcacatcttcaacaagcacgccgagaagatcgaggaggtgaagaaggaggtggccttcttcaacaacttcctgaccgacgccaagagacccgccctgcccgagatcaagcccgcccagccccccggccccgcccagatcctgccccccggcctgacccccggcctgccctacccccaccagaccccccagggcctgatgccctacggccagcccagaccccccatcggcctgtggagctggtgctgccccccctgcagcccccaggaggccctgcacacccccatgcccagaatggtgctggtggagggcaccatgatgcccagcgaggccagagaggtgatcctgggcaacctggccaccggctggttcgtggagacccagggcccctag

SEQ ID NO: 290026 - DNA, 675 bp, Artificial Sequence
  derived and/or modified sequence
atgcccaacagatgcggcatcatacacgtacgtggccccatgccccctaataggatctctcacggtgaagtccttgaatggcagaagacattcgaagagaagctcacacctctgttatctgtgcgggagtctttaagcgaagaagaggctcaaaaaatgggccgcaaggatcccgagcaggaagtcgagaagtttgtcacctccaacacccaagagctcggtaaggacaaatggctctgccccctctcaggtaagaaatttaagggaccagaatttgtgcgaaagcacatctttaataagcatgctgagaaaattgaagaagtcaagaaggaagttgcgttctttaataacttcctgacggatgctaaacggcctgctttgccagagattaagcccgctcagcctcccggacccgcgcagattttgccgcctgggctgacacctggcctcccttatccacaccaaacaccacaaggattgatgccatacgggcaaccacgcccacctatagggttatggtcttggtgttgccccccctgttccccccaggaggcactgcatacacctatgccccggatggtgctggtggagggcacgatgatgccatccgaggccagagaagtgatcctggggaacctcgctacaggctggttcgtcgaaacccagggcccctag

SEQ ID NO: 290027 - DNA, 675 bp, Artificial Sequence
  derived and/or modified sequence
atgcccaacagatgtggcatcatccacgtgcggggccccatgccacccaaccgcatcagccatggagaggtgctggagtggcagaagacctttgaggagaagctgacccccctgctgtctgtgcgggagagcctgtctgaggaggaggcccagaagatgggcaggaaggaccctgagcaggaggtggagaagtttgtgaccagcaacacccaggagctgggcaaggacaagtggctgtgccccctgagcggcaagaagttcaagggccctgagtttgtgaggaagcacatcttcaacaagcacgccgagaagattgaggaggtgaagaaggaggtggccttcttcaacaacttcctgacagatgccaagaggcctgccctgcctgagatcaagccagcccagcccccaggccctgcccagatcctgcccccaggcctgaccccaggcctgccctacccccaccagaccccccagggcctgatgccctacggccagccccggccccccatcggcctgtggagctggtgctgccccccctgcagcccccaggaggccctgcacacccccatgcccaggatggtgctggtggagggcaccatgatgcccagcgaggcccgggaggtgatcctgggcaacctggccaccggctggtttgtggagacccagggcccctag

SEQ ID NO: 290028 - DNA, 675 bp, Artificial Sequence
  derived and/or modified sequence
atgcccaaccggtgcggcatcatccacgtgcggggccccatgccccctaataggatctctcacggcgaagtgctagaatggcagaaaacttttgaagaaaaactgactcccttactaagcgtgcgggagtcattgagtgaagaagaggcacaaaagatggggaggaaggatccagagcaggaggtggaaaaattcgtgacctctaacactcaggaactggggaaagataagtggctgtgccccctctcgggaaaaaaatttaaggggcctgagtttgtgcgcaaacacatcttcaacaaacatgctgaaaagatcgaagaggtgaagaaagaggtagccttttttaataatttcctaacagacgccaagcggccagccctccctgagatcaagcccgcgcaacccccaggtccagcacaaatactgcctccggggctgacacctggcctcccctatccccatcaaaccccacagggactgatgccatacggccagccaaggccacctatcgggctgtggtcttggtgctgccctccctgttcaccacaagaggccctccacacccccatgccacgcatggtactagtagaaggcacaatgatgccatcagaggctcgagaggttatactcggaaacctcgctacagggtggtttgttgagacgcagggcccttag

SEQ ID NO: 290029 - DNA, 675 bp, Artificial Sequence
  derived and/or modified sequence
atgcccaaccggtgcggtatcatccatgtgagaggcccaatgccccctaaccggatcagtcacggggaggttctcgaatggcagaagactttcgaggaaaaacttacgccactgctctccgtgcgcgagtcactgagcgaggaggaggcacagaaaatgggccgaaaagatccagaacaggaggttgaaaaattcgtcacgtcgaacacacaagagctgggcaaggacaaatggctttgtcctctgtccgggaagaagtttaagggccctgagtttgtccggaaacatatcttcaacaagcatgccgagaaaattgaggaggtaaaaaaggaggtggccttcttcaataactttctgaccgacgctaagaggcctgccctccctgagatcaagcctgcacagccacctgggccagctcagattctcccccctggcctgacaccaggtctgccctatccccatcaaacaccgcagggtctgatgccatatggacaaccacgacctcccataggcttatggtcttggtgctgtccaccttgcagtccacaggaggctctccacactcccatgcctaggatggtcctcgtggagggaacaatgatgccttccgaagctcgcgaagtcatcttggggaatctagctaccggctggtttgtggagacccaaggtccttag

SEQ ID NO: 290030 - DNA, 396 bp, Artificial Sequence
  derived and/or modified sequence
atggctgctccaggtggccgctcagagccaccccagctgccggagtatagctgttcctatatggtcagccggcccgtgtatagtgaattggcttttcagcagcagcatgaaaggcggctccaggagcgtaaaacacttagagagagcctcgcaaaatgctgcagctgttcccgaaagcgagcgttcggagtcctcaaaaccctggtacctattctcgaatggctgccgaagtacagggtgaaagaatggctgctgtcggacgtgataagcggcgtctcaaccggattagtcgcaacactacagggcatggcatacgctcttctggccgctgttcctgttggttacggactctacagtgcattcttccccattttgacctactttatctttggttag

SEQ ID NO: 290031 - DNA, 396 bp, Artificial Sequence
  derived and/or modified sequence
atggccgcccctgggggccgctctgagcccccccagctgcctgagtacagctgcagctacatggtgtccaggcctgtgtacagcgagctggccttccagcagcagcacgagcggcggctgcaggagaggaagaccctgcgggagagcctggccaagtgctgcagctgcagcaggaagagggccttcggcgtgctgaagaccctggtgcccatcctggagtggctgcccaagtacagagtgaaggagtggctgctgagtgatgtgatcagcggcgtgtccacaggcctggtggccaccctgcagggcatggcctatgccctgctggccgctgtgcctgtgggctacggcctgtacagcgccttcttccccatcctgacctacttcatcttcggctag

SEQ ID NO: 290032 - DNA, 396 bp, Artificial Sequence
  derived and/or modified sequence
atggccgcccccggcggccggagcgagcccccccagctgcccgagtacagttgctcctacatggtcagccgcccagtgtactccgagttagcctttcaacagcagcatgagcggagactgcaggagcggaaaacactgcgggaaagcctagccaaatgctgctcatgctccaggaagcgggcattcggcgtgttgaaaactctggtgcctattcttgaatggctgcccaaatacagagtcaaggaatggctcctttcggatgtgatctctggggtgtcaacgggcttggtggcaaccctgcaaggaatggcatatgccctgctagcagcagtaccagtcggctacggactgtattcggccttttttccaatccttacatatttcatttttgggtag

SEQ ID NO: 290033 - DNA, 396 bp, Artificial Sequence
  derived and/or modified sequence
atggctgccccagggggaagatcggagccgcctcagctgcccgagtacagctgtagttacatggtgtcacgccctgtgtacagcgagctcgctttccaacagcagcatgaacgtcggctgcaagaaagaaagactctccgtgagagtttggccaagtgttgtagctgtagccgaaagcgcgcatttggggtgctgaaaaccctggttcccatacttgagtggttacctaaatacagagtgaaggagtggctactgtccgacgtgatctctggggtttccaccgggttagtggccacactgcaagggatggcatatgccctgttggccgctgttccagtcggttacggattgtatagtgccttttttccaatcctcacctattttatttttggatag

SEQ ID NO: 290034 - DNA, 600 bp, Artificial Sequence
  derived and/or modified sequence
aggctgctcggaaaacaggacgaggggagagacttgctcaataagctgaaagttctgcccccgagagggctgcgacagctgctggaatgtgcctgcagcgtccgcctcttggggacccgcggagcgcgccctgacggttccacgcctggcccgggggtctgcacctctcctccagtgcgcacctggagctgcgtcccgggtcaggtcatggcagcgccaggcggcaggtcggagccgccgcagctccccgagtacagctgcagctacatggtgtcgcggccggtctacagcgagctcgctttccagcaacagcacgagcggcgcctgcaggagcgcaagacgctgcgggagagcctggccaagtgctgcagttgttcaagaaagagagcctttggtgtgctaaagactcttgtgcccatcttggagtggctccccaaataccgagtcaaggaatggctgcttagtgacgtcatttcgggagttagtactgggctagtggccacgctgcaagggatggcatatgccctactagctgcagttcctgtcggatatggtctctactctgcttttttccctatcctgacatactttatctttgga

SEQ ID NO: 290035 - DNA, 396 bp, Artificial Sequence
  derived and/or modified sequence
atggccgcccccggcggcagaagcgagcccccccagctgcccgagtacagctgcagctacatggtgagcagacccgtgtacagcgagctggccttccagcagcagcacgagagaagactgcaggagagaaagaccctgagagagagcctggccaagtgctgcagctgcagcagaaagagagccttcggcgtgctgaagaccctggtgcccatcctggagtggctgcccaagtacagagtgaaggagtggctgctgagcgacgtgatcagcggcgtgagcaccggcctggtggccaccctgcagggcatggcctacgccctgctggccgccgtgcccgtgggctacggcctgtacagcgccttcttccccatcctgacctacttcatcttcggctag

SEQ ID NO: 290036 - protein, 469 aa, Artificial Sequence
  derived and/or modified sequence
MMTTLQNKEECGKGPKRIFAPPAQKSYSLLPCSPNSPKEETPGISSPETEARISLPKASLKKKEEKATMKNVPSREQEKKRKAQINKQAEKKEKEKSSLTNAEFEEIVQIVLQKSLQECLGGMGSGLDFAETSCAQPVVSTQSDKEPGITASATDTDNANGEEVPHTQEISVSWEGEAAPEIRTSKLGQPDPAPSKKKSNRLTLSKRKKEAQDEKVEKTQGGHEHRQEDRLKKTVQDHSQIRDQQKGEISGFGQCLVWVQCSFPNCGKWRRLCGNIDPSVLPDNWSCDQNTADVQYNRCDIPEETWTGLESDVAYASYIPGSIIWAKQYGYPWWPGMIESDPDLGEYFLFTSHLDSLPSKYHVTFFGETVSRAWIPVNMLKNFQELSLELSVMKKRRNDCSQKLGVALMMAQEAEQISIQERVNLFGFWSRFNGSNSNGERKDLQLSGLNSPGSCLENGKERRPREFRF

SEQ ID NO: 290037 - protein, 477 aa, Artificial Sequence
  derived and/or modified sequence
MGSGLDFAETSCAQPVVSTQSDKEPGITASATDTDNANGEEVPHTQEISVSWEGEAAPEIRTSKLGQPDPAPSKKKSNRLTLSKRKKEAQDEKVEKTQGGHEHRQEDRLKKTVQDHSQIRDQQKGEISGFGQCLVWVQCSFPNCGKWRRLCGNIDPSVLPDNWSCDQNTDVQYNRCDIPEETWTGLESDVAYASYIPGSIIWAKQYGYPWWPGMIESDPDLGEYFLFTSHLDSLPSKYHVTFFGETVSRAWIPVNMLKNFQELSLELSVMKKRRNDCSQKLGVALMMAQEAEQISIQERVNLFGFWSRFNGSNSNGERKDLQLSGLNSPGSCLEKKEKEEELEKEEGEKTDPILPIRKRVKIQTQKTKPRGPKKKFKAPQSKALAASFSEGKEVRTVPKNLGLSACKGACPSSAKEEPRHREPLTQEAGSVPLEDEASSDLDLEQLMEDVGRELGQSGELQHSNSDGEDFPVALFGK

SEQ ID NO: 290038 - DNA, 1434 bp, Artificial Sequence
  derived and/or modified sequence
atgggcagcggcctggacttcgccgagaccagctgcgcccagcccgtggtgagcacccagagcgacaaggagcccggcatcaccgccagcgccaccgacaccgacaacgccaacggcgaggaggtgccccacacccaggagatcagcgtgagctgggagggcgaggccgcccccgagatcagaaccagcaagctgggccagcccgaccccgcccccagcaagaagaagagcaacagactgaccctgagcaagagaaagaaggaggcccaggacgagaaggtggagaagacccagggcggccacgagcacagacaggaggacagactgaagaagaccgtgcaggaccacagccagatcagagaccagcagaagggcgagatcagcggcttcggccagtgcctggtgtgggtgcagtgcagcttccccaactgcggcaagtggagaagactgtgcggcaacatcgaccccagcgtgctgcccgacaactggagctgcgaccagaacaccgacgtgcagtacaacagatgcgacatccccgaggagacctggaccggcctggagagcgacgtggcctacgccagctacatccccggcagcatcatctgggccaagcagtacggctacccctggtggcccggcatgatcgagagcgaccccgacctgggcgagtacttcctgttcaccagccacctggacagcctgcccagcaagtaccacgtgaccttcttcggcgagaccgtgagcagagcctggatccccgtgaacatgctgaagaacttccaggagctgagcctggagctgagcgtgatgaagaagagaagaaacgactgcagccagaagctgggcgtggccctgatgatggcccaggaggccgagcagatcagcatccaggagagagtgaacctgttcggcttctggagcagattcaacggcagcaacagcaacggcgagagaaaggacctgcagctgagcggcctgaacagccccggcagctgcctggagaagaaggagaaggaggaggagctggagaaggaggagggcgagaagaccgaccccatcctgcccatcagaaagagagtgaagatccagacccagaagaccaagcccagaggccccaagaagaagttcaaggccccccagagcaaggccctggccgccagcttcagcgagggcaaggaggtgagaaccgtgcccaagaacctgggcctgagcgcctgcaagggcgcctgccccagcagcgccaaggaggagcccagacacagagagcccctgacccaggaggccggcagcgtgcccctggaggacgaggccagcagcgacctggacctggagcagctgatggaggacgtgggcagagagctgggccagagcggcgagctgcagcacagcaacagcgacggcgaggacttccccgtggccctgttcggcaagtag

SEQ ID NO: 290039 - DNA, 1434 bp, Artificial Sequence
  derived and/or modified sequence
atgggttctggactcgactttgctgaaacaagctgcgcccagccagtcgtctctactcaatccgacaaggaacctggcattacagcctctgccacagacactgacaatgcaaacggggaagaagtgccacatactcaggagatcagtgtctcttgggagggagaggctgcaccagaaatcaggacttcgaagctgggtcaacccgatccagctcccagcaagaagaaaagcaataggctgacactgtcaaaaaggaaaaaagaagcgcaggacgaaaaggtggagaaaacgcagggcgggcatgagcatcgccaggaagacaggctgaagaaaacagtccaggaccactcccagatccgagatcagcaaaaaggtgagatatcggggttcgggcagtgcctggtgtgggtgcaatgctcatttcccaactgtggtaagtggcgccgcctgtgtggcaatattgatcccagcgtgttgcccgacaactggtcttgcgaccagaatacagatgtgcagtataatcgctgtgatattcccgaggaaacatggaccgggctcgagtcagacgtggcatacgcttcctacattcctgggagcattatatgggctaaacaatacggctatccttggtggccagggatgattgagagcgatcctgacctgggggagtactttttgtttactagtcacttggactccctcccgtccaagtaccacgttaccttcttcggggaaactgtgagccgagcttggatacctgtgaatatgctcaaaaattttcaagagctatccctagagctgtcagtgatgaaaaagagaaggaatgactgcagccagaagcttggcgtggctctgatgatggcccaggaagctgagcagattagcatccaagagcgggtgaacctttttggattttggagccggttcaatggatcaaattccaacggtgagcggaaggatctccagctgtccggtttgaactccccaggatcatgtctggagaagaaagaaaaggaagaggagctcgagaaagaggaaggcgagaagaccgatccaattctccctattcgtaagagggtgaaaattcagacgcagaaaacaaagcccagggggccaaagaaaaaatttaaggccccgcagtccaaggcactcgccgcctcttttagtgagggcaaggaggttcgcacagtgccaaagaatctgggcctcagtgcgtgcaagggcgcatgtccgagcagcgccaaggaagagcctcgtcatcgggaacctctgacacaggaagcaggctcagtccccctcgaggacgaggctagctcggacctggatctggaacagttgatggaagatgtgggaagagagctgggacaatcaggagagttgcagcattccaatagcgatggagaggatttccccgtggctctttttggcaagtag

SEQ ID NO: 290040 - DNA, 1434 bp, Artificial Sequence
  derived and/or modified sequence
atgggcagcggcctggactttgctgagaccagctgtgcccagcctgtggtgtccacccagagcgacaaggagcccggcatcacagccagcgccacagacacagacaatgccaacggggaggaggtgccccacacccaggagatctctgtgtcctgggagggggaggccgcccctgagatccgcaccagcaagctgggccagcctgaccctgcccccagcaagaagaagagcaaccggctgaccctgagcaagaggaagaaggaggcccaggatgagaaggtggagaagacccagggcggccacgagcaccggcaggaggaccggctgaagaagacagtgcaggaccacagccagatccgggaccagcagaagggggagatcagcggcttcggccagtgcctggtgtgggtgcagtgcagcttccccaactgtgggaagtggaggcggctgtgtggcaacatcgaccccagcgtgctgcctgacaactggagctgtgaccagaacacagatgtgcagtacaacagatgtgacatccctgaggagacctggacaggcctggagagtgatgtggcctatgccagctacatccctggcagcatcatctgggccaagcagtatggctacccctggtggccaggcatgattgaaagtgaccctgacctgggggagtacttcctgttcaccagccacctggacagcctgcccagcaagtaccacgtgaccttctttggagagaccgtgtcccgggcctggatccctgtgaacatgctgaagaacttccaggagctgagcctggagctgtctgtgatgaagaagagaagaaatgactgcagccagaagctgggcgtggccctgatgatggcccaggaggccgagcagatcagcatccaggagcgggtgaacctgtttggcttctggagccgcttcaacggcagcaacagcaatggagagaggaaggacctgcagctgagcggcctgaacagccctggcagctgcctggagaagaaggagaaggaggaggagctggagaaggaggagggggagaagacagaccccatcctgcccatcaggaagagggtgaagatccagacccagaagaccaagccccggggccccaagaagaagttcaaggccccccagagcaaggccctggccgccagcttcagcgagggcaaggaggtgaggacagtgcccaagaacctgggcctgagcgcctgcaagggggcctgccccagcagcgccaaggaggagcccaggcaccgggagcccctgacccaggaggccggctctgtgcccctggaggatgaggccagcagtgacctggacctggagcagctgatggaggatgtgggccgggagctgggccagagcggggagctgcagcacagcaacagtgatggagaggacttccctgtggccctgtttgggaagtag

SEQ ID NO: 290041 - DNA, 1434 bp, Artificial Sequence
  derived and/or modified sequence
atgggcagcggcctggacttcgccgagaccagctgcgcccagcccgtcgtcagcactcagtcggacaaggaacccgggattactgcaagtgccaccgataccgataacgccaacggcgaggaagtgccccatacccaggagattagtgtatcctgggaaggcgaggctgcccccgagatccgcacaagcaagctgggacagcccgaccctgccccaagcaagaagaaaagcaataggctgaccctatcaaaaaggaaaaaggaagctcaggacgagaaagttgaaaagactcagggcggacacgagcaccgtcaagaagaccgtttgaaaaaaacagtacaggatcattctcaaattcgcgaccagcagaagggggagattagcggtttcggtcagtgtttagtgtgggtgcagtgttcgtttccaaattgcggcaagtggcgccgtttatgtgggaatatagaccccagcgttctccccgataattggtcctgtgaccagaacacggacgtccagtacaatcgatgcgacatccccgaagagacctggactggactcgagagtgatgtggcatacgcctcttatatccctggcagtatcatttgggccaagcagtatggctacccctggtggcccggaatgatcgagtccgaccctgacctaggcgagtactttctgtttacctcacatctcgacagtttgccgagtaagtatcatgtgactttcttcggagaaaccgtgtcaagagcttggatacctgtcaacatgctcaaaaatttccaggagctgtccctggagctgtcagtgatgaagaagcgcagaaacgattgtagccagaagttaggagtggcattgatgatggcccaagaggctgaacagataagtatccaggagcgcgtgaatctgtttggattttggagccgcttcaacgggagcaatagtaatggcgaaagaaaagacttacagctcagtggactaaatagccccggctcatgcctggaaaagaaagagaaggaagaggaactagagaaggaggagggggagaagacagatcctattttgcccattcgcaagagggtgaaaattcagacgcaaaagaccaagccccgtgggcccaaaaaaaaattcaaggctccacagagtaaagcactggccgcctcgttcagtgagggcaaagaagtacggactgtacctaagaatctggggttgtccgcctgcaagggggcatgtccttcttctgctaaggaggagcctcggcacagagaaccactcacccaggaagctgggtcagtccctctcgaggatgaggccagctctgacctcgatcttgagcagctgatggaggatgtgggccgggaactggggcagtctggggagctgcagcattcaaacagcgacggagaggacttccctgtggctttatttggtaagtag

SEQ ID NO: 290042 - DNA, 1434 bp, Artificial Sequence
  derived and/or modified sequence
atgggaagtggtctcgactttgcagaaactagctgtgcccaaccagtggtctcaacacaatctgataaggagcccggaattaccgcaagtgctactgacactgataacgcaaatggcgaagaggttccacatactcaagagatatccgtgagttgggagggggaagcggcacccgagatcagaacatcaaagctgggccaacctgacccggctccgtccaagaaaaagtctaatcgcttgaccctgagtaaacggaaaaaagaggcacaggatgagaaagttgaaaaaacacagggaggacatgaacatcgccaggaggaccggcttaagaaaactgttcaagatcactcccagatccgggatcagcagaaaggggaaatctccggctttggtcaatgcctggtctgggtgcaatgttcttttccgaactgtggaaagtggcgacggttatgtggaaatattgacccgtccgttctgccagacaattggtcttgcgatcaaaacaccgacgtgcagtacaaccggtgcgatattccagaggagacatggacaggcctagagtctgatgtggcatacgcttcatacatacctggttctatcatatgggcaaagcagtatggctacccatggtggcctgggatgatcgagtctgatcctgatctgggagagtattttctgtttaccagtcacctcgatagtctcccaagcaagtatcacgttaccttctttggggaaactgtatccagggcatggatccctgtgaacatgctcaagaattttcaggaactgagcctcgaattatcagtcatgaagaaacgtcgaaacgactgctcccagaagctgggggtagctttgatgatggctcaggaggccgagcagatatccatacaagagagggtaaacctattcggattttggtcccgcttcaacggctcaaacagtaacggagagagaaaggacctgcagctttccggtctcaattccccaggtagctgcctagagaaaaaggagaaggaggaagagctggagaaagaggaaggcgaaaaaacagatcctatcctgcctatccggaagcgggtgaagatacagacacagaaaactaaacccagggggccaaagaagaagttcaaggccccacagtccaaagctctggccgcttctttttctgagggcaaggaagttaggacggtgcctaagaatttgggactgagcgcatgcaaaggcgcatgtccaagttcagctaaagaggaacccagacacagggaacccctgacccaggaggccggaagcgtgccgcttgaggacgaggctagcagcgacctagatctggaacaactcatggaagacgttgggcgagagctcgggcaaagcggggagctgcaacattcgaactcggacggggaggattttccagtagctctgttcggtaaatag

SEQ ID NO: 290043 - DNA, 2186 bp, Artificial Sequence
  derived and/or modified sequence
cgccgttttcccggggagatgcgccgcccggtctccctgccagcggagtgctgggccgaggacagggcggcaggggtgacagtggggtccaggagagtctcaaaatcctaagctttcagtatttgttattgtgaaagaagttaattcacctgaaacagaggaggggcaacctgagttatcagaaagtgacttcctggccttcccttctttactgatcagaggcacacaaagcgtagtttctaagctgaatgatgacaacgttgcagaataaagaagaatgtggaaagggaccaaagagaatctttgccccacctgcacaaaaatcttacagcctgttaccttgtagccctaactcccctaaggaggagaccccggggatcagttccccagagacagaggccaggataagcctgccaaaggccagtttaaagaagaaagaggaaaaagcaaccatgaagaatgttccaagcagggaacaggagaaaaaaagaaaggcacaaatcaacaagcaagcagagaagaaagaaaaggaaaaatcaagtcttaccaatgcagaatttgaggagattgtccagattgttctgcagaagtcccttcaggagtgcttggggatgggatctggccttgattttgcagagacttcttgtgcccagcccgtagtatctacccaatcagacaaggagccaggaattactgcttctgctactgatactgataatgctaatggagaggaggtaccacatactcaagagatttcagtgtcttgggaaggtgaagctgcccctgagataaggacatctaagttaggccagccagatcctgcaccctctaagaagaaatccaatagactcaccttaagcaaaagaaagaaggaagctcaagatgagaaggtggagaaaactcaaggtggacatgagcacagacaggaagaccgactaaagaaaacagttcaggatcattctcagatcagggaccagcaaaaaggagagataagtggttttggtcaatgtctggtctgggtccagtgttccttcccaaactgtgggaaatggaggcggctgtgtgggaacattgacccctcagttctcccagataattggtcctgtgatcagaacacagatgtgcagtataatcgctgtgatattcctgaggagacctggacagggcttgagagtgatgtggcctatgcctcctacatcccaggatccatcatctgggccaagcaatacggttacccctggtggccaggcatgatagaatctgatcctgacttaggggaatattttctttttacttcccatcttgattccctgccgtctaagtaccatgtgacgttttttggagaaacagtttctcgtgcatggatcccagtcaacatgctaaagaacttccaggagctgtccctggagctatcagtcatgaaaaagcgcagaaatgactgcagccagaaactgggggtggccctgatgatggctcaagaggcagaacagatcagcattcaggaacgggttaacttgtttggtttctggagccgattcaacggatctaacagtaatggggaaagaaaagacttacagctctctggtttgaacagcccaggatcctgcttagagaaaaaggagaaagaggaagagttggaaaaggaggaaggagagaaaacagacccaattttgcccattcgtaagcgagtcaaaatacagacccaaaaaaccaagccaagaggccctaagaaaaaatttaaagctccccagagcaaggccttggcagccagcttttcagagggaaaagaagttagaacagtgccaaagaacctgggcctatcagcgtgtaagggggcctgcccctcatctgcgaaagaagagcccagacaccgggaacccctgacccaggaggctggaagtgtcccccttgaggacgaagcctccagtgacctggacctggagcaactcatggaagatgttgggagagagctggggcagagcggggagctgcagcacagcaacagtgatggcgaggacttccccgtggcgctgtttgggaagtagctggtgctcctctgctccctctttttctcccttctctggggcgcaggagggagaagttgctaagtgctgggtctgttcattggctatgaggttcaaatgtgtgtggtgcagtttctgtgttaataaagcaggttacagtcg

SEQ ID NO: 290044 - DNA, 498 bp, Artificial Sequence
  derived and/or modified sequence
atgagctgcagcagaagcagaagcctggaggccagcagcagcagaggcaccctgcccgccagctgggtgagaggcagcagatgcctgggcagcagcttcgccgacgagggccaggcccccctgcacgccgacagacccagattcttcggcaccgtgctgaccagcttccccagcgagaagctggccgccaaggccctgctgtggggcgccctgaacttcttcctgggccccaactggagcgagagcgagttcccctggcccagcttcctgcccatcctgggcgccggcggcgccgtggacttcctgcccagagacctgttcatcatcttcctgtgcagcgtgctgcccagacccagcgccgtgcccgccagcccccccagccccttcagcctgctgccccccttccccaccctgcccctgagccccttcagcctgagcagaatcctgggctgcagcaaccagagagccgtgagcctgttcttcccccactactgctag

SEQ ID NO: 290045 - DNA, 498 bp, Artificial Sequence
  derived and/or modified sequence
atgtcttgctcaaggtcaaggtctttggaagcctcatcttctcgtggcactctgcccgcgtcgtgggtccgcggcagccgttgcctgggctcatccttcgcagacgaaggacaggctccactacatgccgacaggccgcgcttctttggcactgtgttgacgagctttcccagcgagaagctggccgcaaaagctttgctctggggtgctcttaacttctttctaggcccaaattggtcagagagtgagttcccatggccatccttcttaccgatcttgggcgcaggtggcgcagtggatttccttcccagggacttgttcattatatttctgtgtagcgttctccctcgcccatcagcagtgccggccagtccaccttcaccattctctctgctgccacccttcccaaccctgcccctgagtcctttctccctgtcccgaatcctgggctgctctaatcaacgcgccgtaagtctatttttccctcattattgttag

SEQ ID NO: 290046 - DNA, 498 bp, Artificial Sequence
  derived and/or modified sequence
atgagctgcagccgcagccgcagcctggaggccagcagcagccggggcaccctgcctgcctcctgggtgcggggcagccgctgcctgggcagcagctttgctgatgagggccaggcccccctgcatgctgaccggccccgcttctttggaacagtgctgaccagcttccccagcgagaagctggccgccaaggccctgctgtggggcgccctgaacttcttcctgggccccaactggagcgagagcgagttcccctggcccagcttcctgcccatcctgggcgccggcggcgctgtggacttcctgccccgggacctcttcatcatcttcctgtgcagcgtgctgccccggcccagcgctgtgcctgccagcccccccagccccttcagcctgctgccccccttccccaccctgcccctgagccccttcagcctgagccgcatcctgggctgcagcaaccagagagctgtgtccctcttcttcccccactactgctag

SEQ ID NO: 290047 - DNA, 498 bp, Artificial Sequence
  derived and/or modified sequence
atgagctgcagccggagccggagcctggaggccagcagcagccggggcactctgcccgcaagctgggtccgcggaagccggtgcttaggatcaagcttcgcagatgaaggacaagccccactgcacgcggacagaccccgattttttggaaccgtcctgacctcctttccgagcgaaaaactggccgcaaaagctttgttatggggtgctctgaacttttttctggggcccaattggtctgagtccgagtttccatggccaagcttccttcctatccttggtgccggaggcgctgttgacttccttccccgtgatctcttcattatcttcctgtgctcagtgctgccacggccatccgctgtccccgctagccctccatcccccttttctcttctcccccccttccccacccttcctttatccccctttagcctttcacgtatcttaggatgctctaaccaacgcgcggtgtcccttttcttcccacactactgttag

SEQ ID NO: 290048 - DNA, 498 bp, Artificial Sequence
  derived and/or modified sequence
atgagctgcagccgttcacggagcctggaggcatcctcctcccgaggtacattgcctgctagctgggttcgtgggtctcgctgcctgggtagctctttcgcagacgagggtcaagcgccactacatgctgaccgtccaaggttttttggcactgtgctgacttcttttcctagtgagaaactggctgccaaagccctactgtggggtgccctcaatttctttctggggcctaattggagtgaatccgaatttccctggccttccttcctcccgatcctaggggctggaggcgctgtggacttcctaccacgcgaccttttcattatttttctgtgttccgttctcccacgtccatcagccgtgcctgcatcccctccctcacccttctctcttctccccccttttccgactttgccattgagcccattctccttgtcaagaatccttggatgcagtaaccaacgggcagttagtttgttcttccctcactactgctag

SEQ ID NO: 290049 - DNA, 498 bp, Artificial Sequence
  derived and/or modified sequence
atgagttgctccaggtccaggtcactggaggcttcgtcctcaagggggacacttccagcctcctgggtcaggggttcccggtgtctgggctcttctttcgcagatgaggggcaggcccccttacacgctgataggcccaggttctttggcactgttctaacttcttttccctctgaaaagctggctgccaaggccttgctctggggagctttaaattttttcttagggcctaactggtcagaatctgaattcccttggccttctttccttcccattctgggtgcaggaggagctgtggatttcctgcctagagatctcttcattatcttcctctgcagtgtcctgcctcggccatctgctgtgcctgcatcacccccaagccctttttctctccttcctccttttccaactcttcctctttctcctttttctctaagcaggatcctgggctgttcaaaccagagagctgtaagtcttttctttccccattactgttag

SEQ ID NO: 290050 - protein, 1816 aa, Artificial Sequence
  derived and/or modified sequence
MSIVIPLGVDTAETSYLEMAAGSEPESVEASPVVVEKSNSYPHQLYTSSSHHSHSYIGLPYADHNYGARPPPTPPASPPPSVLISKNEVGIFTTPNFDETSSATTISTSEDGSYGTDVTRCICGFTHDDGYMICCDKCSVWQHIDCMGIDRQHIPDTYLCERCQPRNLDKERAVLLQRRKRENMSDGDTSATESGDEVPVELYTAFQHTPTSITLTASRVSKVNDKRRKKSGEKEQHISKCKKAFREGSRKSSRVKGSAPEIDPSSDGSNFGWETKIKAWMDRYEEANNNQYSEGVQREAQRIALRLGNGNDKKEMNKSDLNTNNLLFKPPVESHIQKNKKILKSAKDLPPDALIIEYRGKFMLREQFEANGYFFKRPYPFVLFYSKFHGLEMCVDARTFGNEARFIRRSCTPNAEVRHEIQDGTIHLYIYSIHSIPKGTEITIAFDFDYGNCKYKVDCACLKENPECPVLKRSSESMENINSGYETRRKKGKKDKDISKEKDTQNQNITLDCEGTTNKMKSPETKQRKLSPLRLSVSNNQEPDFIDDIEEKTPISNEVEMESEEQIAERKRKMTREERKMEAILQAFARLEKREKRREQALERISTAKTEVKTECKDTQIVSDAEVIQEQAKEENASKPTPAKVNRTKQRKSFSRSRTHIGQQRRRHRTVSMCSDIQPSSPDIEVTSQQNDIENTVLTIEPETETALAEIITETEVPALNKCPTKYPKTKKHLVNEWLSEKNEKTGKPSDGLSERPLRITTDPEVLATQLNSLPGLTYSPHVYSTPKHYIRFTSPFLSEKRRRKEPTENISGSCKKRWLKQALEEENSAILHRFNSPCQERSRSPAVNGENKSPLLLNDSCSLPDLTTPLKKRRFYQLLDSVYSETSTPTPSPYATPTHTDITPMDPSFATPPRIKSDDETCRNGYKPIYSPVTPVTPGTPGNTMHFENISSPESSPEIKRRTYSQEGYDRSSTMLTLGPFRNSNLTELGLQEIKTIGYTSPRSRTEVNRQCPGEKEPVSDLQLGLDAVEPTALHKTLETPAHDRAEPNSQLDSTHSGRGTMYSSWVKSPDRTGVNFSVNSNLRDLTPSHQLEVGGGFRISESKCLMQDDTRGMFMETTVFCTSEDGLVSGFGRTVNDNLIDGNCTPQNPPQKKKVSLLEYRKRQREARKSGSKTENFPLISVSPHASGSLSNNGDGCASSNDNGEQVDHTASLPLPTPATVYNATSEETSNNCPVKDATASEKNEPEVQWTASTSVEQVRERSYQRALLLSDHRKDKDSDPDPENPEPTTTNECPSPDTSQNTCKSPPKMSKPGSPGSVIPAQAHGKIFTKPDPQWDSTVSASEAENGVHLKTELQQKQLSNNNQALSKNHPPQTHVRNSSEQLSQKLPSVPTKLHCPPSPHLENPPKSSTPHTPVQHGYLSPKPPSQQLGSPYRPHHSQSPQVGTPQREPQRNFYPAAQNLPANTQQATSGTLFTQTPSGQSSATYSQFNQQSLNSTAPPPPPPPPPSSSYYQNQQPSANFQNYNQLKGSLSQQTVFTSGPNQALPGTTSQQTVPGHHVTPGHFLPSQNPTIHHQTAAAVVPPPPPPPPAPGPHLVQQPNSHQQHSVAHVVGPVHAVTPGSHIHSQTAGHHLPPPPPPPGPAPHHHPPPHPSTGLQGLQAQHQHVVNSAPPPPPPPPPSSVLASGHHTTSAQALHHPPHQGPPLFPSSAHPTVPPYPSQATHHTTLGPGPQHQPSGTGPHCPLPVTGPHLQPQGPNSIPTPTASGFCPHPGSVALPHGVQGPQQASPVPGQIPIHRAQVPPTFQNNYHGSGWH

SEQ ID NO: 290051 - protein, 125 aa, Artificial Sequence
  derived and/or modified sequence
  misc_feature (1)..(1): Xaa can be any naturally occurring amino acid
XGSLSNNGDGCASSNDNGEQVDHTASLPLPTPATVYNATSEETSNNCPVKDATASEKNEPEVQWTASTSVEQVRERSYQRALLLSDHRKDKDSDPDPENPEPTTTNECPSPDTSQNTCKSPPKMS

SEQ ID NO: 290052 - protein, 71 aa, Artificial Sequence
  derived and/or modified sequence
MSIVIPLGVDTAETSYLEMAAGSEPESVEASPVVVEKSNSYPHQLYTSSSHHSHSYIGLPYADHNYGARPP

SEQ ID NO: 290053 - protein, 609 aa, Artificial Sequence
  derived and/or modified sequence
MSIVIPLGVDTAETSYLEMAAGSEPESVEASPVVVEKSNSYPHQLYTSSSHHSHSYIGLPYADHNYGARPPPTPPASPPPSVLISKNEVGIFTTPNFDETSSATTISTSEDGSYGTDVTRCICGFTHDDGYMICCDKCSVWQHIDCMGIDRQHIPDTYLCERCQPRNLDKERAVLLQRRKRENMSDGDTSATESGDEVPVELYTAFQHTPTSITLTASRVSKVNDKRRKKSGEKEQHISKCKKAFREGSRKSSRVKGSAPEIDPSSDGSNFGWETKIKAWMDRYEEANNNQYSEGVQREAQRIALRLGNGNDKKEMNKSDLNTNNLLFKPPVESHIQKNKKILKSAKDLPPDALIIEYRGKFMLREQFEANGYFFKRPYPFVLFYSKFHGLEMCVDARTFGNEARFIRRSCTPNAEVRHEIQDGTIHLYIYSIHSIPKGTEITIAFDFDYGNCKYKVDCACLKENPECPVLKRSSESMENINSGYETRRKKGKKDKDISKEKDTQNQNITLDCEGTTNKMKSPETKQRKLSPLRLSVSNNQEPDFIDDIEEKTPISNEVEMESEEQIAERKRKMVSWEASSLGLVTAALHMVIVAAFTWAFTLFFEVSE

SEQ ID NO: 290054 - protein, 230 aa, Artificial Sequence
  derived and/or modified sequence
MSIVIPLGVDTAETSYLEMAAGSEPESVEASPVVVEKSNSYPHQLYTSSSHHSHSYIGLPYADHNYGARPPPTPPASPPPSVLISKNEVGIFTTPNFDETSSATTISTSEDGSYGTDVTRCICGFTHDDGYMICCDKCSVWQHIDCMGIDRQHIPDTYLCERCQPRNLDKERAVLLQRRKRENMSDGDTSATESGDEVPVELYTAFQHTPTSITLTASRVSKVNDKRRKK

SEQ ID NO: 290055 - DNA, 5451 bp, Artificial Sequence
  derived and/or modified sequence
atgtctattgttataccattgggcgtggacacagccgaaacgtcctacctggaaatggcggcaggatcagaaccagagagtgtcgaggctagccccgtggtagtggaaaagtccaatagttatccgcaccagctgtacacatcttcaagccaccactcacacagctatataggtctaccttatgccgaccacaattacggagctcggcccccacccacgcctcccgcctcccccccgccttcggtgctgatctccaagaatgaggtaggcatctttaccactcccaacttcgatgagacttcatccgccaccaccatcagcacttcagaagatggctcttatgggacagacgtgacccgatgtatctgtgggtttacccacgatgacggctacatgatatgttgcgataaatgctcggtttggcagcatatcgactgtatgggcatcgatagacaacatattcccgatacctatctgtgcgaacgctgtcagcctcgtaatctggacaaggagcgggccgtgctacttcagagacgcaaaagggagaatatgtccgacggggatacaagcgccacagaatctggagatgaagtgcctgtggaactgtacaccgcctttcagcatacgccaacaagcataactctaaccgcgtccagggtctcaaaggttaatgacaagcgacgtaagaagtcaggagaaaaggagcaacatataagtaaatgtaaaaaggccttccgggaaggcagccgaaagtcttccagggtaaagggctctgcccccgaaatagacccctcctcagacggatctaactttggctgggagacaaaaattaaagcctggatggatcgctacgaagaggccaacaataatcagtattctgagggggtacagagggaggcacagcgtatcgccctacgtctgggcaacggcaatgacaaaaaggaaatgaacaagtccgacttgaacacgaataacctgcttttcaaaccacctgtggagagtcatatacaaaaaaataagaagatattgaagtcggccaaggacctccctccagatgcactaattatagagtacagggggaaattcatgctccgcgagcagtttgaagcgaatgggtacttttttaagcgaccctatccattcgtgctgttctatagcaaattccacggtctggagatgtgcgtggacgcccgcacttttggaaatgaagccagatttatccgacggagctgcacccctaacgcagaggttcggcatgagatacaagatggcacaatccacctgtatatctatagcattcatagtattcctaagggcactgagatcactatcgcattcgattttgattatggcaattgcaagtacaaagtcgattgtgcttgcctaaaagagaatccagagtgccccgtgctgaagaggagctccgaaagcatggaaaacatcaatagtggttacgaaacccgccgaaagaaaggaaaaaaagacaaggacatcagcaaagagaaagatactcagaatcaaaacatcaccctggattgtgaggggacaaccaacaagatgaagtcgcctgagaccaaacagcggaaactgagccctctccgactcagcgtgtcaaacaaccaagaacctgactttattgacgacatcgaagaaaaaacacccattagcaatgaagtggagatggaatccgaggagcagattgccgaacgcaagaggaagatgacaagagaagagcggaagatggaggctattctccaggcctttgcccgtctagagaagcgggaaaagcgtcgcgaacaggcactcgagaggatcagtacagccaaaaccgaggtgaagacggagtgcaaggatacgcaaatcgttagcgacgctgaagtcatccaggagcaggcgaaggaggaaaatgccagtaaaccgacccccgccaaggttaataggaccaaacaacgcaaaagcttcagccgcagtcgcacgcacattggacagcagcggcgtagacacaggactgtgagtatgtgctctgatatccagccttccagtcctgatatcgaggtaactagccagcaaaatgatattgagaatactgtcctaaccatcgaacctgagacggaaacagctcttgctgagatcatcaccgagactgaagttcctgcacttaataaatgcccgaccaaataccccaagacgaaaaagcacctcgtcaacgagtggctgtccgagaagaatgagaagactggtaaacctagcgacggcctgagcgagcgccccttgagaatcacaaccgatcccgaagtgcttgcgacgcagctgaactcccttcccgggttgacttacagtcctcacgtgtactccaccccaaaacattatatccggtttaccagcccattcttatctgagaagcggcgtcgaaaggagcccactgaaaatataagtggatcctgcaaaaaacgttggctcaaacaggccctggaagaagaaaatagcgcgattctccaccgctttaacagcccctgccaagagcggtcaagaagccctgcggtaaacggtgaaaacaagtctccattacttctgaacgattcttgttccctgccagacctcaccacgccgcttaaaaaaaggaggttctaccagctgttagatagtgtgtactcagagacatccactcctactccaagtccctatgcaacccccacccatactgatataacgccaatggaccccagcttcgccacgccacctcgaattaagagtgacgacgaaacctgtcgaaatggatataaacctatttattcccccgtgactccagtgacacccgggacacctggaaacactatgcattttgaaaacatctccagccccgagtcatcgcccgagataaaaagaagaacatacagccaagaggggtatgaccgcagttccaccatgctcacactcggacccttcaggaactccaacctgactgagctagggctgcaggaaatcaaaacgattggctacaccagcccaagaagtcggacggaagtcaatcggcaatgccctggagaaaaagaacctgtgtctgacttgcagcttgggctagacgccgtcgaacccactgccctccataagaccctcgagacaccagcacacgaccgggcagagcccaattcacagctagattctacacatagcgggcgaggcacaatgtattcctcttgggtgaagagccctgatagaacaggtgtcaacttttctgttaactcaaaccttcgcgatctcaccccaagccaccagttggaggtaggtggaggctttaggatctccgagtccaagtgtctcatgcaggacgatactcgaggaatgttcatggagactacagtgttttgcaccagcgaggacggtctggtgagcggattcggtcggaccgtgaacgacaatctgatcgacggcaactgcactccccaaaatcctccacagaagaagaaggtgtctctgctggaataccgcaagagacagcgggaggctaggaagtctgggagtaagacagagaatttcccccttatttcagtcagcccccacgcctccggatctttatccaacaacggagatggatgtgcttctagtaacgataatggggagcaggtagaccacaccgcttcgttaccgttgccaacgcctgccacagtatacaacgccacatctgaggagacatcgaacaactgccccgtcaaggatgccacagcctcagagaagaacgagcctgaggtccaatggaccgcatccacttctgtggagcaggtgcgggagcggtcctaccagagggcgctgctacttagcgatcaccgcaaagataaagacagcgaccccgaccctgagaatccagagcctaccacaactaacgagtgtccttcacccgataccagccagaatacttgcaagagcccacctaaaatgtcaaagccagggtctccgggttctgtcattcctgctcaggcacatggtaagatttttaccaagcccgaccctcagtgggacagtacagtctcggcatccgaggcagaaaatggggtgcatttgaagactgagttgcagcaaaaacagctgtcgaacaataatcaagccctctcaaagaatcaccctccgcagacccatgttagaaatagcagtgagcagctctcacagaaactgccatccgttccaacgaagttgcactgtccaccttccccacacctggagaatcccccaaagtctagtactccccatactccagtccagcacgggtacctatcccctaaaccacccagccagcagctcggatccccatatcgtcctcaccattcccagagtccccaagtaggcacgccacagagagaaccgcaacgcaacttctaccctgccgctcagaacttgccagctaatactcaacaagctacctccggcacactattcacacagacaccctccgggcagtccagcgctacatactcacagttcaatcagcagagcctaaatagcaccgccccacccccgcccccgcctcctccccccagctccagttattatcagaaccagcaaccctcggccaactttcaaaactacaatcagttaaagggctccctgtcacagcagacggtttttacgtctggtccaaaccaggcccttcctggcactacctcacagcagaccgttcccggacaccatgtgacccccggccattttctgccgtcccagaatccaaccatacaccaccaaacagcagccgctgtagtgccccccccgccacccccgccgccagccccaggcccacacctagtgcagcagcccaattcgcaccagcaacatagtgtggctcacgttgttggcccagtccatgccgttacgcccggcagccatatccacagccagaccgcggggcaccaccttccgcctcccccgccacccccaggccctgctccacaccaccacccccccccacacccatctactggccttcaggggctgcaggctcagcatcagcacgttgtaaactcggcgccgcccccgcctccccctccacccccttcctccgtgctggcctcaggtcaccacaccacctctgcgcaggcactccatcaccccccccaccaagggccgcccctgttccccagtagcgcacacccaactgtgcccccctacccttcccaggccacccaccacacaactctgggtccgggccctcagcatcagccaagcggaacggggccgcactgtccactgccggtaacaggcccacacctacagccacagggtccgaattccattccaacacctacggcttccggcttctgcccccatcccggcagcgttgccctgccccacggcgtacagggaccacagcaggcaagccctgtccccggacagattccaatccatagagcgcaagtgcctcctacatttcagaacaactatcacggctccggttggcactag

SEQ ID NO: 290056 - DNA, 378 bp, Artificial Sequence
  derived and/or modified sequence
tgaggttccttgtccaataatggcgacggttgcgcctcaagcaacgacaacggtgagcaggtcgaccacaccgccagcttaccattgccgactcctgcaaccgtttataacgctacttctgaggaaacctcaaacaattgcccagtcaaggacgccactgcttccgaaaaaaatgagcccgaggtccagtggaccgcctccacttccgttgagcaggtgagggagcggtcttatcaacgcgccctcctgctctccgaccatcgtaaagacaaagattcagatcctgatcctgaaaatcccgagccaacaacaaccaacgaatgtccttccccggacacttctcagaacacgtgtaaaagcccacccaaaatgtcttag

SEQ ID NO: 290057 - DNA, 216 bp, Artificial Sequence
  derived and/or modified sequence
atgagcattgtcatcccgctgggcgtggacacagcagaaacgtcttatctggaaatggcagcaggatccgagcccgagtccgtcgaggcatcccccgtcgtggtggagaagtccaattcctatccccatcaactctatacaagctccagccaccactcccatagttacattggattaccctacgcagaccataactacggggcacgacctccctag

SEQ ID NO: 290058 - DNA, 693 bp, Artificial Sequence
  derived and/or modified sequence
atgagtattgttatccctttgggagtagatactgctgagacctcctatctcgagatggcagccgggtcggagccggaatccgtagaagcctcacccgtggtcgttgaaaaaagcaacagttacccacaccagctgtacacatcctcgagccaccactcccactcctacatcggccttccttatgccgaccacaattacggcgctaggcccccccctactcccccagcttcacccccccctagtgtgctgatttctaagaacgaggttgggattttcacgaccccaaattttgacgagaccagttccgctactaccattagcacttctgaggacggctcctacggcacagatgtgactcgttgtatctgtggattcactcatgacgatggatacatgatttgctgtgacaagtgcagcgtgtggcagcacattgattgcatgggaattgatcgtcagcatatacctgatacctacctgtgtgaaaggtgccagccccggaatctggataaggaaagggccgtgttgctgcagcgcaggaaacgggaaaatatgtctgatggcgacacaagcgctacggaaagcggcgacgaagtgcctgttgagttgtatacggccttccaacatacaccaaccagcatcacgctcactgctagtagagtgagcaaggtgaatgacaagagacggaagaaatag

SEQ ID NO: 290059 - DNA, 1362 bp, Artificial Sequence
  derived and/or modified sequence
atggtcctggtgctgtccgacacgtctgccagccctccaccctcagtactgatttctaagaacgaggtcggtattttcaccactccaaattttgatgagacatcatccgcgaccactattagcacatccgaagatgggtcatacggcaccgacgtcacgcggtgtatctgcgggtttactcatgacgacggctacatgatttgctgcgacaaatgttctgtgtggcaacacatcgattgcatggggatcgaccggcagcatatacccgacacatatctgtgtgagaggtgtcagcctaggaatctcgataaggaaagggctgtccttctacagagaagaaaacgcgagaacatgagcgatggggacacctccgcgaccgaaagcggcgacgaggtgccggtcgagctgtacaccgcattccagcatacccctacctccatcacactcacagcaagccgcgtgtcaaaagtgaacgacaagaggaggaagaagtctggggagaaagagcaacacatttccaagtgcaagaaggcttttcgggagggatcgcggaagagtagtcgggtgaaaggcagcgctcctgaaatagatcccagtagtgatggctcgaatttcggctgggagaccaagatcaaggcctggatggaccgctacgaagaagcaaataacaatcagtattccgagggggttcagagagaggcgcagaggatcgccctgcgcttgggaaacggcaacgataagaaggaaatgaataagagcgacctgaatactaataaccttctgttcaaaccccctgttgagagccatatacagaagaacaagaaaatcctcaagtccgccaaggacttaccacccgacgcgctgatcatcgaatacaggggaaagtttatgctgcgagaacagttcgaggctaacgggtacttctttaagaggccgtaccctttcgttcttttctacagcaaattccatgggcttgaaatgtgcgtagatgctcggacgtttggaaacgaagcacgttttataaggcgaagttgtacccctaacgccgaggtgcgacacgaaattcaagatggcaccatacacctgtacatatattcaatacacagcattccaaaagggactgagatcaccattgccttcgattttgactatggtaactgtaagtacaaggtggattgtgcttgcttaaaagaaaaccccgagtgccccgtgctcaaacgaagttccgagagcatggagaacattaacagcggctatgagacgcgccgtaaaaaagggaagaagactaagattttccagaagaagaaaatccacaagatccgtatcctgctgtggatcgtgaaagagcgtccaaccaagtag

SEQ ID NO: 290060 - DNA, 5451 bp, Artificial Sequence
  derived and/or modified sequence
atgagcatcgtcatccccctgggcgtggacacagctgagaccagctacctggagatggctgctggcagcgagcctgagagcgtggaggccagccctgtggtggtggagaagagcaacagctacccccaccagctgtacaccagcagcagccaccacagccacagctacatcggcctgccctatgctgaccacaactacggggcccggcccccacccaccccaccagccagccccccaccttctgtgctgatcagcaagaatgaggtgggcatcttcaccacccccaactttgatgagaccagcagcgccaccaccatcagcaccagtgaagatggcagctatggaacagatgtgacccgctgcatctgtggcttcacccatgatgatggctacatgatctgctgtgacaagtgcagcgtgtggcagcacatcgactgcatgggcatcgaccggcagcacatcccagacacctacctgtgtgagcgctgccagcccaggaacctggacaaggagagagctgtgctgctgcagaggaggaagcgggagaacatgtctgatggagacaccagcgccacagagagcggagatgaggtgcctgtggagctgtacacagccttccagcacacccccaccagcatcaccctgacagccagccgggtgtccaaggtgaatgacaagaggaggaagaagtctggagagaaggagcagcacatcagcaagtgcaagaaggccttccgggagggcagcaggaagagcagccgggtgaagggcagcgcccctgagattgaccccagcagtgatggcagcaactttggctgggagaccaagatcaaggcctggatggacagatatgaggaggccaacaacaaccagtacagcgagggcgtgcagcgggaggcccagagaattgccctgcggctgggcaatggaaatgacaagaaggagatgaacaagagtgacctgaacaccaacaacctgctcttcaagccccctgtggagagccacatccagaagaacaagaagatcctgaagagcgccaaggacctgcccccagatgccctgatcatcgagtaccggggcaagttcatgctgcgggagcagtttgaggccaacggctacttcttcaagaggccctacccctttgtgctcttctacagcaagttccacggcctggagatgtgtgtggatgcccggacctttggaaatgaggcccgcttcatccgccgcagctgcaccccaaatgctgaggtgagacatgagatccaggacggcaccatccacctgtacatctacagcatccacagcatccccaagggcacagagatcaccatcgcctttgattttgattatggcaactgcaagtacaaggtggactgtgcctgcctgaaggagaacccagaatgtcctgtgctgaagaggagcagcgagagcatggagaacatcaacagcggctatgagaccaggaggaagaagggcaagaaggacaaggacatcagcaaggagaaggacacccagaaccagaacatcaccctggactgtgagggcaccaccaacaagatgaagagccctgagaccaagcagaggaagctgagccccctgcggctgtctgtgagcaacaaccaggagccagacttcattgatgacatcgaggagaagacccccatcagcaatgaggtggagatggagagcgaggagcagattgctgagaggaagaggaagatgacccgggaggagaggaagatggaggccatcctgcaggcctttgcccggctggagaagcgggagaagagaagagagcaggccctggagcgcatcagcacagccaagacagaggtgaagacagagtgcaaggacacccagatcgtgtctgatgctgaggtgatccaggagcaggccaaggaggagaatgccagcaagcccaccccagccaaggtgaacagaaccaagcagaggaagagcttcagccgcagcaggacccacatcggccagcagaggcggcggcacaggacagtgtccatgtgcagcgacatccagcccagcagcccagacatcgaggtgaccagccagcagaatgacatcgagaacacagtgctgaccatcgagcctgagacagaaacagccctggccgagatcatcacagaaacagaggtgcctgccctgaacaagtgccccaccaagtaccccaagaccaagaagcacctggtgaatgagtggctgtctgagaagaatgagaagacaggcaagcccagtgatggcctgtctgagcggcccctgcgcatcaccacagatcctgaggtgctggccacccagctgaacagcctgcccggcctgacctacagcccccacgtgtacagcacccccaagcactacatccgcttcaccagccccttcctgtctgagaagagaagaaggaaggagcccacagagaacatcagcggcagctgcaagaagcgctggctgaagcaggccctggaggaggagaacagcgccatcctgcaccgcttcaacagcccctgccaggagaggagccgcagccctgctgtgaatggagagaacaagagccccctgctgctgaatgacagctgcagcctgcctgacctgaccacccccctgaagaagaggcgcttctaccagctgctggacagcgtgtacagcgagaccagcacccccacccccagcccctatgccacccccacccacacagacatcacccccatggaccccagctttgccaccccaccccgcatcaagagtgatgatgagacctgcagaaatggctacaagcccatctacagccctgtgacccctgtgaccccaggcaccccaggcaacaccatgcactttgagaacatcagcagccctgagagcagccctgagatcaagaggaggacctacagccaggagggctatgacaggagcagcaccatgctgaccctgggccccttcaggaacagcaacctgacagagctgggcctgcaggagatcaagaccatcggctacaccagccccaggagcaggacagaggtgaaccggcagtgccctggagagaaggagcctgtgtctgacctgcagctgggcctggatgctgtggagcccacagccctgcacaagaccctggagaccccagcccatgacagagctgagcccaacagccagctggacagcacccacagcggccggggcaccatgtacagctcctgggtgaagagcccagacagaactggagtgaacttctctgtgaacagcaacctgcgggacctgacccccagccaccagctggaggtgggcggcggcttccgcatcagcgagagcaagtgcctgatgcaggatgacacccggggcatgttcatggagaccaccgtcttctgcaccagtgaagatggcctggtgtctggctttggaagaacagtgaatgacaacctgattgatggcaactgcaccccccagaaccccccccagaagaagaaggtgtccctgctggagtacaggaagaggcagcgggaggccaggaagagcggcagcaagacagagaacttccccctcatctctgtgagcccccacgccagcggcagcctgagcaacaatggagatggctgtgccagcagcaatgacaatggagagcaggtggaccacacagccagcctgcccctgcccaccccagccaccgtgtacaatgccaccagcgaggagaccagcaacaactgccctgtgaaggatgccacagccagcgagaagaatgaacctgaggtgcagtggacagccagcacctctgtggagcaggtgcgggagaggagctaccagagggccctgctgctgagtgaccacaggaaggacaaggacagcgaccctgaccctgagaaccctgagcccaccaccaccaatgaatgtcccagcccagacaccagccagaacacctgcaagagcccccccaagatgagcaagccaggcagccctggcagcgtcatcccagcccaggcccacggcaagatcttcaccaagccagacccccagtgggacagcacagtgtctgccagcgaggccgagaatggagtgcacctgaagacagagctgcagcagaagcagctgagcaacaacaaccaggccctgagcaagaaccaccccccccagacccacgtgaggaacagcagcgagcagctgagccagaagctgcccagcgtgcccaccaagctgcactgcccccccagcccccacctggagaacccccccaagagcagcaccccccacacccctgtgcagcacggctacctgagccccaagccacccagccagcagctgggcagcccctaccggccccaccacagccagagcccccaggtgggcaccccccagcgggagccccagaggaacttctacccagctgcccagaacctgcctgccaacacccagcaggccaccagcggcaccctcttcacccagacccccagcggccagagcagcgccacctacagccagttcaaccagcagagcctgaacagcacagcccctcctcctcctcctcctcctccacccagcagcagctactaccagaaccagcagcccagcgccaacttccagaactacaaccagctgaagggcagcctgagccagcagaccgtcttcaccagcggccccaaccaggccctgcccggcaccaccagccagcagacagtgcccggccaccacgtgaccccaggccacttcctgcccagccagaaccccaccatccaccaccagacagctgctgctgtggtgcccccacctcctcctcctcctccagcccctggcccccacctggtgcagcagcccaacagccaccagcagcacagcgtggcccacgtggtgggccctgtgcatgctgtgaccccaggcagccacatccacagccagacagctggccaccacctgcccccacctcctcctcctcctggccctgccccccaccaccaccccccaccccaccccagcacaggcctgcagggcctgcaggcccagcaccagcacgtggtgaacagcgcccctcctcctcctcctcctcctccacccagctctgtgctggccagcggccaccacaccaccagcgcccaggccctgcaccaccccccccaccagggccccccactcttccccagcagcgcccaccccaccgtgcccccctaccccagccaggccacccaccacaccaccctgggccctggcccccagcaccagcccagcggcaccggcccccactgccccctgcctgtgacaggcccccacctgcagccccagggccccaacagcatccccacccccacagccagcggcttctgcccccaccctggctctgtggccctgccccacggcgtgcagggcccccagcaggccagccctgtgcccggccagatccccatccaccgggcccaggtgccccccaccttccagaacaactaccacggcagcggctggcactag

SEQ ID NO: 290061 - DNA, 378 bp, Artificial Sequence
  derived and/or modified sequence
tgaggaagcctgagcaacaatggagatggctgtgccagcagcaatgacaatggagagcaggtggaccacacagccagcctgcccctgcccaccccagccaccgtgtacaatgccaccagcgaggagaccagcaacaactgccctgtgaaggatgccacagccagcgagaagaatgaacctgaggtgcagtggacagccagcacctctgtggagcaggtgcgggagaggagctaccagagggccctgctgctgagtgaccacaggaaggacaaggacagcgaccctgaccctgagaaccctgagcccaccaccaccaatgaatgtcccagcccagacaccagccagaacacctgcaagagcccccccaagatgtcctag

SEQ ID NO: 290062 - DNA, 216 bp, Artificial Sequence
  derived and/or modified sequence
atgagcatcgtcatccccctgggcgtggacacagctgagaccagctacctggagatggctgctggcagcgagcctgagagcgtggaggccagccctgtggtggtggagaagagcaacagctacccccaccagctgtacaccagcagcagccaccacagccacagctacatcggcctgccctatgctgaccacaactacggggcccggcccccatag

SEQ ID NO: 290063 - DNA, 693 bp, Artificial Sequence
  derived and/or modified sequence
atgagcatcgtcatccccctgggcgtggacacagctgagaccagctacctggagatggctgctggcagcgagcctgagagcgtggaggccagccctgtggtggtggagaagagcaacagctacccccaccagctgtacaccagcagcagccaccacagccacagctacatcggcctgccctatgctgaccacaactacggggcccggcccccacccaccccaccagccagccccccaccttctgtgctgatcagcaagaatgaggtgggcatcttcaccacccccaactttgatgagaccagcagcgccaccaccatcagcaccagtgaagatggcagctatggaacagatgtgacccgctgcatctgtggcttcacccatgatgatggctacatgatctgctgtgacaagtgcagcgtgtggcagcacatcgactgcatgggcatcgaccggcagcacatcccagacacctacctgtgtgagcgctgccagcccaggaacctggacaaggagagagctgtgctgctgcagaggaggaagcgggagaacatgtctgatggagacaccagcgccacagagagcggagatgaggtgcctgtggagctgtacacagccttccagcacacccccaccagcatcaccctgacagccagccgggtgtccaaggtgaatgacaagaggaggaagaagtag

SEQ ID NO: 290064 - DNA, 1362 bp, Artificial Sequence
  derived and/or modified sequence
atggtgctggtgctgagtgacaccagcgccagccccccaccttctgtgctgatcagcaagaatgaggtgggcatcttcaccacccccaactttgatgagaccagcagcgccaccaccatcagcaccagtgaagatggcagctatggaacagatgtgacccgctgcatctgtggcttcacccatgatgatggctacatgatctgctgtgacaagtgcagcgtgtggcagcacatcgactgcatgggcatcgaccggcagcacatcccagacacctacctgtgtgagcgctgccagcccaggaacctggacaaggagagagctgtgctgctgcagaggaggaagcgggagaacatgtctgatggagacaccagcgccacagagagcggagatgaggtgcctgtggagctgtacacagccttccagcacacccccaccagcatcaccctgacagccagccgggtgtccaaggtgaatgacaagaggaggaagaagtctggagagaaggagcagcacatcagcaagtgcaagaaggccttccgggagggcagcaggaagagcagccgggtgaagggcagcgcccctgagattgaccccagcagtgatggcagcaactttggctgggagaccaagatcaaggcctggatggacagatatgaggaggccaacaacaaccagtacagcgagggcgtgcagcgggaggcccagagaattgccctgcggctgggcaatggaaatgacaagaaggagatgaacaagagtgacctgaacaccaacaacctgctcttcaagccccctgtggagagccacatccagaagaacaagaagatcctgaagagcgccaaggacctgcccccagatgccctgatcatcgagtaccggggcaagttcatgctgcgggagcagtttgaggccaacggctacttcttcaagaggccctacccctttgtgctcttctacagcaagttccacggcctggagatgtgtgtggatgcccggacctttggaaatgaggcccgcttcatccgccgcagctgcaccccaaatgctgaggtgagacatgagatccaggacggcaccatccacctgtacatctacagcatccacagcatccccaagggcacagagatcaccatcgcctttgattttgattatggcaactgcaagtacaaggtggactgtgcctgcctgaaggagaacccagaatgtcctgtgctgaagaggagcagcgagagcatggagaacatcaacagcggctatgagaccaggaggaagaagggcaagaagaccaagatcttccagaagaagaagatccacaagatccgcatcctgctgtggatcgtgaaggagcggcccaccaagtag

SEQ ID NO: 290065 - DNA, 423 bp, Artificial Sequence
  derived and/or modified sequence
atggacctgctgcccaccagcatcctgctggccagcctgtggatctgcagccacctgcaccccccaggagtgtctgtggacctgccccccaccagcatcctgctggtgtccctgtggatctgcagccacctgcaccccccaggagtgtctgtggaccggcccccaccacccagctcctggtgcctgtgtggcagcccccccaccagcatcctgctggtgtccctgtggatctgcagccccccacccagctcctggtgcctgtgtggcagcgcccccaccagcatcctgctggtgtccctgtggatctggaggctgtggggcctgacagaggtgggccacgtggagtttgtgttcctgccctggctgatctcctggaacatcatgttcagcaagctgttcagctgcttcctgtacctgggctag

SEQ ID NO: 290066 - DNA, 7013 bp, Artificial Sequence
  derived and/or modified sequence
cgccgccattttcccagagcgagaggcagtgacactgagcgggcgcagggggccgagtcggagaccgtgccggagttcgggagcggcaacagagtgggcatagacactccgagcagcctcgccgtcgtctctgcgttcctgttgactgcctggctgccccctcccctactcctcggttcctggtgaagaggctgcgcgctgctgtttggggagggggtgtgtggagccgggtcctgtgtccgcagtggctgctgtcggggggtcgcctgttcgcggaggtgcggagagactccttgggggtcgagcacataacggggttcgggtgtctcgtgtgtgaacatcacaggtctattctggataagcaggttttgtgaagacatttattctttcttggacctcagatttaccagacatctcatgggtttgtggatgcacttagatgtttgcaatgagcactgtggctggcatgccccagtgttttggataccaatgcataggactccatagtaatcgaatttaccagaggcgaacgtcatgagcatagtgatcccattgggggttgatacagcagagacgtcatacttggaaatggctgcaggttcagaaccagaatccgtagaagctagccctgtggtagttgagaaatccaacagttatccccaccagttatataccagcagctcacatcattcacacagttacattggtttgccctatgcggaccataattatggtgctcgtcctcctccgacacctccggcttcccctcctccatcagtccttattagcaaaaatgaagtaggcatatttaccactcctaattttgatgaaacttccagtgctactacaatcagcacatctgaggatggaagttatggtactgatgtaaccaggtgcatatgtggttttacacatgatgatggatacatgatctgttgtgacaaatgcagcgtttggcaacatattgactgcatggggattgataggcagcatattcctgatacatatctatgtgaacgttgtcagcctaggaatttggataaagagagggcagtgctactacaacgccggaaaagggaaaatatgtcagatggtgataccagtgcaactgagagtggtgatgaggttcctgtggaattatatactgcatttcagcatactccaacatcaattactttaactgcttcaagagtttccaaagttaatgataaaagaaggaaaaaaagcggggagaaagaacaacacatttcaaaatgtaaaaaggcatttcgtgaaggatctaggaagtcatcaagagttaagggttcagctccagagattgatccttcatctgatggttcaaattttggatgggagacaaagatcaaagcatggatggatcgatatgaagaagcaaataacaaccagtacagtgagggtgttcagagggaggcacaaagaatagctctgagattaggcaatggaaatgacaaaaaagagatgaataaatccgatttgaataccaacaatttgctcttcaaacctcctgtagagagccatatacaaaagaataagaaaattcttaaatctgcaaaagatttgcctcctgatgcacttatcattgaatacagagggaagtttatgctgagagaacagtttgaagcaaatgggtatttctttaaaagaccatacccttttgtgttattctactctaaatttcatgggctagaaatgtgtgttgatgcaaggacttttgggaatgaggctcgattcatcaggcggtcttgtacacccaatgcagaggtgaggcatgaaattcaagatggaaccatacatctttatatttattctatacacagtattccaaagggaactgaaattactattgcctttgattttgactatggaaattgtaagtacaaggtggactgtgcatgcctcaaagaaaacccagagtgccctgttctaaaacgtagttctgaatccatggaaaatatcaatagtggttatgagaccagacggaaaaaaggaaaaaaagacaaagatatttcaaaagaaaaagatacacaaaatcagaatattactttggattgtgaaggaacgaccaacaaaatgaagagcccagaaactaaacaaagaaagctttctccactgagactatcagtatcaaataatcaggaaccagattttattgatgatatagaagaaaaaactcctattagtaatgaagtagaaatggaatcagaggagcagattgcagaaaggaaaaggaagatgacaagagaagaaagaaaaatggaagcaattttgcaagcttttgccagacttgaaaagagagagaaaagaagagaacaagctttggaaaggatcagcacagccaaaactgaagttaaaactgaatgtaaagatacacagattgtcagtgatgctgaagttattcaggaacaagcaaaagaagaaaatgctagcaagccaacccctgccaaagtaaatagaactaaacagagaaaaagtttttctcggagtaggactcacattggacagcagcgtcggagacacagaactgtcagcatgtgttcagatatccagccatcttctcctgatatagaagttacttcacaacaaaatgatattgaaaatactgtacttacaatagaaccagaaactgaaactgcactagcagaaataattactgaaactgaagttccagcacttaataaatgtcctaccaagtaccccaaaacaaagaagcacttggttaatgaatggttaagtgagaagaatgagaagacaggaaaaccttcagatggcctttcagaaaggcctctacgcataactacagatcctgaagtgttagctacacaactcaattctttaccaggtctcacttacagcccccatgtatactccactcctaagcattatattagatttacttcaccattcctttcagaaaaaaggagaagaaaagaacctactgaaaacatttctggttcatgcaagaagcgatggttgaaacaagctctggaagaagaaaattcagcaattttacatagatttaattcaccctgtcaagaaagatccagaagtcctgcagtcaatggtgaaaataaaagtccactactattaaatgacagctgttcccttccagatttaactacaccactaaaaaaacgaagattttatcagttgctagattcggtttactcagaaacctccacacctactccttccccgtatgctacaccaactcacaccgatattactcctatggacccatcttttgccacgcctccacggataaaatcagatgatgaaacttgtagaaatggttataaacccatatattcaccagttaccccagtaactcctggtacaccaggaaataccatgcactttgagaatatttcttccccagaaagttctccagaaataaagagacgcacttatagtcaagagggatatgacagatcttcaaccatgttaacattggggccttttagaaattctaatttaactgaactgggtctgcaagaaataaagactattggttatacgagccctaggagtaggactgaagtcaacaggcagtgtcctggagaaaaggaacctgtgtcagaccttcagctaggactcgatgcagttgagccaactgccctacataaaaccctggaaacgcctgcacatgacagggctgagcccaacagccaactggactcgactcactctggacggggcacaatgtattcttcctgggtaaagagccctgacagaacaggagttaacttctcagtgaactccaacttgagggacctgacaccctcgcatcagttggaggttggaggaggcttccgaataagtgagtcaaagtgcctgatgcaggatgatactagaggcatgtttatggaaacaactgtgttttgtacttccgaagatgggcttgtatctggtttcggacggactgttaatgacaatttgatcgacgggaattgcacaccccagaatccaccacaaaagaaaaaggtttctctattagaataccgtaagagacaacgtgaagctaggaaaagtggctctaagacagagaactttccactcattagtgtatcaccccatgcaagtggaagcttgagcaacaatggtgatggctgtgccagcagtaatgacaatggggagcaggtggaccacactgctagcctacctttaccaacaccagctacagtttataatgccacttctgaagaaactagcaataactgccctgttaaggatgctactgctagtgagaagaatgaaccagaagttcaatggactgcctcaacttcagtggaacaagtcagagaaaggagttatcagagagctttacttctcagtgatcaccgaaaagataaagatagtgaccctgatcctgaaaatccagaacccacaactacgaatgaatgtccatccccagatacttctcaaaatacttgtaaaagtcctccaaaaatgagcaagcctggttcacctggatctgtaattcctgctcaagcacacgggaaaatattcacaaaaccagatccccaatgggactccacagttagtgcatccgaagctgaaaatggtgttcacctaaaaacagagctccaacaaaaacagctatcaaataacaaccaagcactttcaaagaatcatcctcctcagacacacgttcgtaattcatctgagcaactttcacaaaagctgccttctgtgccaacaaagttgcactgtcctccatcacctcacctagaaaatcctccaaagtcatccacgcctcacacacctgtacagcatggttatctttcaccaaagcctccttcacagcagttaggatctccctacaggcctcatcattcacagtcacctcaagttggaacacctcagcgagagcctcaaagaaacttttatccagcagcacagaaccttccagccaatactcagcaggcaacttctggaacattatttacacagacaccctcaggacaatcttcagcaacatacagtcagtttaaccaacaaagtctgaacagcacggcaccaccccctccacctcctccacctccttcttcgtcttactatcaaaaccagcagccctctgcaaactttcagaattataatcagctcaaaggtagtctttctcaacaaactgtgtttacatcaggaccaaatcaagcacttcctggcaccacaagccagcaaacagttccaggacaccacgtgactccagggcattttttgccctctcagaaccctaccattcaccatcaaactgctgctgccgtagtcccccctcctcctccaccaccacctgctccaggaccgcaccttgtacaacagccgaattcccatcagcaacactctgtagcacatgtagtagggcctgttcatgcggtcacccctgggtcgcatattcattctcaaactgctggacaccacttacccccacccccaccccctcctggtcctgcccctcatcaccatccaccaccccatccatccacaggactccaaggtctacaagcacaacaccagcatgttgtaaattcagcacccccaccaccccctccgccgccaccttccagtgttttggcttctgggcatcataccacatcagctcaagccttacaccacccacctcatcaaggacctccactttttccttcgagtgctcatccaactgtaccaccgtatccctcacaagctacacatcataccactttgggaccgggaccccagcaccagccttctggaacagggccacattgtccattacctgtcacaggtcctcatctccagccccaaggaccaaacagtattccaacacctactgcttcagggttctgtcctcatcctggctctgtggccctgccacatggggttcaaggacctcagcaggcatctccagtgcctggacagattccaattcacagagcacaggtgccaccaacatttcaaaacaattaccatgggtcagggtggcattaaaatggactccaaaaacatttttttaaatgttctgtaagataaactgtatatttcatatgtacctgttaaggtactttttaaagcttgtacatgaacctttgtataaaaaacaccagtgctctttcgttgtatttttctcatttttgctttttaaaattcctttaaaaaatgtgctgttaagccagtattaggtatctttattttgtaagtgaacattccagctgtttttttctggcagatctgatgctgatttgatgctgtatgatcttttttttttttttagttaaattcatttagtgaatgttctattattttatacatacacattaagtactcagctaagtaatggcactatgaggattttttttttctttcctgtcagcagcagttctgtgaatgcatcttaggtataaaaatgcaatacagatttttatattttggtgtggacatggctcattttgttttaccagttatttgcaagcaaaatgtaatttaatgtatagatgatttctaatgtctcctgacaaactgtaaatactgcatttcttttgcgtatataattgcttacagcttttctcatttgatatatagcattgtacatatgacaagtcttttgcaaaactgtgtgatctttgtgaaagtagtacagtatatgacctttaatttcttttttattttaaatatactgtcacactgaagcactggttgggcattttaattcatgttaataaatcacaattatgtcagttttaccagattgtcctgtacaacttctaagatcgggatctgtgtgtttctacagaagttctagttttcaaatatagattgtaaggagccttcaattttctttagcgactactacctcagcaacaggaggcagcaaggggctgttcctgtggtggtttctgtttgcatttttgcaggagccataggaaactactgaaatgattgtgctgggtaaattaaggatctggcatcatacaaaatgaagccagaccactaatgcattacagtagttcttgaataca

SEQ ID NO: 290067 - DNA, 375 bp, Artificial Sequence
  derived and/or modified sequence
tggaagcttgagcaacaatggtgatggctgtgccagcagtaatgacaatggggagcaggtggaccacactgctagcctacctttaccaacaccagctacagtttataatgccacttctgaagaaactagcaataactgccctgttaaggatgctactgctagtgagaagaatgaaccagaagttcaatggactgcctcaacttcagtggaacaagtcagagaaaggagttatcagagagctttacttctcagtgatcaccgaaaagataaagatagtgaccctgatcctgaaaatccagaacccacaactacgaatgaatgtccatccccagatacttctcaaaatacttgtaaaagtcctccaaaaatgagcaa

SEQ ID NO: 290068 - DNA, 617 bp, Artificial Sequence
  derived and/or modified sequence
cgcggaggtgcggagagactccttgggggtcgagcacataacggggttcgggtgtctcgtgtgtgaacatcacaggtctattctggataagcaggttttgtgaagacatttattctttcttggacctcagatttaccagacatctcatgacggagtctcgctctgtcaccaggctggagtgcagtggcgcgatcgcagctcactgcagcctctgactccctagttcaagcgattctcctgcctcagcgtcctgagtagctgggattacaggcacatgccaccaagcccagggtttgtggatgcacttagatgtttgcaatgagcactgtggctggcatgccccagtgttttggataccaatgcataggactccatagtaatcgaatttaccagaggcgaacgtcatgagcatagtgatcccattgggggttgatacagcagagacgtcatacttggaaatggctgcaggttcagaaccagaatccgtagaagctagccctgtggtagttgagaaatccaacagttatccccaccagttatataccagcagctcacatcattcacacagttacattggtttgccctatgcggaccataattatggtgctcgtcctcct

SEQ ID NO: 290069 - DNA, 1133 bp, Artificial Sequence
  derived and/or modified sequence
gcgagaggcagtgacactgagcgggcgcagggggccgagtcggagaccgtgccggagttcgggagcggcaacagagtgggcatagacactccgagcagcctcgccgtcgtctctgcgttcctgttgactgcctggctgccccctcccctactcctcggttcctggtgaagaggctgcgcgctgctgtttggggagggggtgtgtggagccgggtcctgtgtccgcagtggctgctgtcggggggtcgcctgttcgcggaggtgcggagagactccttgggggtcgagcacataacggggttcgggtgtctcgtgtgtgaacatcacagggtttgtggatgcacttagatgtttgcaatgagcactgtggctggcatgccccagtgttttggataccaatgcataggactccatagtaatcgaatttaccagaggcgaacgtcatgagcatagtgatcccattgggggttgatacagcagagacgtcatacttggaaatggctgcaggttcagaaccagaatccgtagaagctagccctgtggtagttgagaaatccaacagttatccccaccagttatataccagcagctcacatcattcacacagttacattggtttgccctatgcggaccataattatggtgctcgtcctcctccgacacctccggcttcccctcctccatcagtccttattagcaaaaatgaagtaggcatatttaccactcctaattttgatgaaacttccagtgctactacaatcagcacatctgaggatggaagttatggtactgatgtaaccaggtgcatatgtggttttacacatgatgatggatacatgatctgttgtgacaaatgcagcgtttggcaacatattgactgcatggggattgataggcagcatattcctgatacatatctatgtgaacgttgtcagcctaggaatttggataaagagagggcagtgctactacaacgccggaaaagggaaaatatgtcagatggtgataccagtgcaactgagagtggtgatgaggttcctgtggaattatatactgcatttcagcatactccaacatcaattactttaactgcttcaagagtttccaaagttaatgataaaagaaggaaaaaaa

SEQ ID NO: 290070 - DNA, 1588 bp, Artificial Sequence
  derived and/or modified sequence
ggaccataattatggtgctcgtcctctccgacacctccgcttcccctcctccatcagtccttattagcaaaaatgaagtaggcatatttaccactcctaattttgatgaaacttccagtgctactacaatcagcacatctgaggatggaagttatggtactgatgtaaccaggtgcatatgtggttttacacatgatgatggatacatgatctgttgtgacaaatgcagcgtttggcaacatattgactgcatggggattgataggcagcatattcctgatacatatctatgtgaacgttgtcagcctaggaatttggataaagagagggcagtgctactacaacgccggaaaagggaaaatatgtcagatggtgataccagtgcaactgagagtggtgatgaggttcctgtggaattatatactgcatttcagcatactccaacatcaattactttaactgcttcaagagtttccaaagttaatgataaaagaaggaaaaaaagcggggagaaagaacaacacatttcaaaatgtaaaaaggcatttcgtgaaggatctaggaagtcatcaagagttaagggttcagctccagagattgatccttcatctgatggttcaaattttggatgggagacaaagatcaaagcatggatggatcgatatgaagaagcaaataacaaccagtacagtgagggtgttcagagggaggcacaaagaatagctctgagattaggcaatggaaatgacaaaaaagagatgaataaatccgatttgaataccaacaatttgctcttcaaacctcctgtagagagccatatacaaaagaataagaaaattcttaaatctgcaaaagatttgcctcctgatgcacttatcattgaatacagagggaagtttatgctgagagaacagtttgaagcaaatgggtatttctttaaaagaccatacccttttgtgttattctactctaaatttcatgggctagaaatgtgtgttgatgcaaggacttttgggaatgaggctcgattcatcaggcggtcttgtacacccaatgcagaggtgaggcatgaaattcaagatggaaccatacatctttatatttattctatacacagtattccaaagggaactgaaattactattgcctttgattttgactatggaaattgtaagtacaaggtggactgtgcatgcctcaaagaaaacccagagtgccctgttctaaaacgtagttctgaatccatggaaaatatcaatagtggttatgagaccagacggaaaaaaggaaaaaagacaaagatatttcaaaagaaaaagatacacaaaatcagaatattactttggattgtgaaggaacgaccaacaaaatgaagagcccagaaactaaacaaagaaagctttctccactgagactatcagtatcaaataatcaggaaccagattttattgatgatatagaagaaaaaactcctattagtaatgaagtagaaatggaatcagaggagcagattgcagaaaggaaaaggaagatgacaagagaagaaagaaaaatggaagcaattttgcaagcttttgccagacttgaa

SEQ ID NO: 290071 - DNA, 5451 bp, Artificial Sequence
  derived and/or modified sequence
atgagcatcgtgatccccctgggcgtggacaccgccgagaccagctacctggaaatggctgccggcagcgagcccgagtcagtggaagcctccccggtcgtggtggaaaaatccaattcatacccccaccagttatacacctctagcagccatcatagccatagctatatcgggcttccctacgccgaccacaactatggggccaggccacctcccacgccaccagccagtcccccccccagcgttttgatcagcaagaatgaagtgggcatcttcacaacaccaaactttgacgagacatctagcgccaccaccatatccactagcgaagatggatcctatggcactgacgtgacccgttgcatctgtggtttcactcatgacgatggatatatgatctgttgtgataagtgctccgtatggcagcacattgattgtatgggcatagacaggcaacatattccggatacctacctatgcgagcgctgccagcccagaaatttagacaaggagcgcgctgtactcctccagaggcggaagcgtgagaacatgtctgacggggatactagcgcaaccgaatcaggtgatgaggttcccgtagagttgtatactgcctttcagcatacgcctaccagcatcactcttacagcctctcgtgtctcgaaggtaaatgacaagaggaggaagaaaagcggcgaaaaggagcagcacatttcaaaatgcaaaaaggcgttccgcgaagggtctcgaaagtcctcccgggtcaaggggtccgccccagaaatagaccctagcagcgatggctccaactttggatgggagactaagattaaggcatggatggacagatatgaggaagccaataacaaccagtattctgagggggtgcagcgcgaggctcagcgtattgcccttcggctggggaatgggaacgataaaaaagaaatgaacaaatccgacctcaacactaataatttgttgtttaaacctccagtggaaagtcacattcagaaaaataaaaagatcctgaagtcggcaaaggatctgcctccagatgcactaattatcgaatacagaggaaaattcatgctgagggagcagtttgaagctaatgggtattttttcaagcgaccctatccatttgtgctcttttatagcaagttccacgggcttgaaatgtgcgtcgacgctaggacatttggaaacgaagcgcggtttatccgccggagctgcacaccaaatgcagaggttagacatgaaatacaagacggtacaatccatctgtatatctatagcattcacagcattccaaaaggcaccgagatcaccatcgcctttgacttcgactatggtaattgtaaatacaaggtggattgcgcttgcctgaaggaaaacccggaatgccccgtgcttaagaggagttccgagagtatggaaaatataaacagtggatatgagacgcgacgcaaaaaagggaagaaggacaaggatatctcaaaggagaaagacactcagaaccagaatataacactagactgcgaggggacaacaaacaagatgaagagtccagaaacaaaacagagaaaactctcgcctctgcgactatccgtttctaacaaccaggaaccagattttatagatgatatcgaagaaaaaacccctatctcgaacgaagtagagatggagtctgaggaacaaattgcggagcggaagagaaaaatgactcgggaggagagaaagatggaggctatattgcaggcttttgcaaggttggaaaaaagggagaaacggcgtgagcaggcactagagaggattagcactgctaagacagaagtgaaaacagaatgcaaggacacccagattgtgagtgacgctgaggtgatccaagagcaagccaaggaggagaacgcctctaagcccacccctgcaaaggtgaatagaacgaagcagagaaagagcttttcacgcagtagaactcacatcggacaacagcgtaggcgacatagaaccgtctcgatgtgtagcgatattcagccgagtagcccagacattgaggtgacctctcagcagaacgacatagaaaacactgttctgacaattgagcccgagactgagacagccctcgccgaaattatcactgagacagaagtccctgcactgaataagtgccccaccaaatacccaaaaacaaagaagcacctggtgaatgagtggctctccgagaagaacgaaaagaccggcaagccttctgacggcctctctgagagaccgcttaggattaccacagatcccgaagtgctcgctacccagcttaatagtctacctggactgacttactccccacacgtctactcaactcctaagcattatattcgcttcaccagcccgtttttgtccgaaaagcgtaggcgcaaggagccaaccgaaaatatctctggttcttgtaaaaaacgatggcttaagcaggctctcgaagaagagaattctgccatccttcacagattcaacagtccttgtcaggaacgaagccgatcccctgccgtcaatggcgagaacaaatccccgctgctgctcaacgatagttgctctcttcctgacctgaccacccctctcaaaaagcgccggttttatcagttgctcgactcggtgtacagcgagaccagcactccaactcccagtccttacgctacccctactcacacagatattacgcctatggatcctagcttcgctacgcctcctagaatcaaaagcgatgatgagacttgccggaatggatacaagccaatttactcaccggtgactccagttacacccggcacccctggaaacaccatgcacttcgagaatattagcagtccagaatctagcccggaaatcaaaagaaggacatactcacaggagggatacgatcggagcagcactatgcttacgctaggcccctttcgcaacagtaacctgactgaactcggactgcaggaaatcaaaaccatcggatatacgtcacctcggtctcggacagaagtcaatcgccagtgcccgggtgagaaggagcctgtgtctgacctgcagctggggctagatgccgtggagcccaccgcgctgcacaaaaccctagaaacaccggctcacgatcgggctgagcccaacagccagttggactccacccattctggtagaggtacaatgtacagttcatgggtgaagtctccagacagaactggcgtcaattttagcgtgaactcaaaccttcgagacctgacgccatcccatcagcttgaggtcggcggcggattccggatttcagagtcaaagtgtttgatgcaggacgacactaggggaatgttcatggagacgaccgtgttttgcacatccgaggacggcttggtatctggcttcggacgcacagtaaacgataacctgatcgacggcaactgtacgccgcagaaccccccgcagaagaagaaggtcagcttactggagtaccgcaaacgtcagcgcgaggccaggaagtccggaagcaaaacggagaatttcccactgatttccgtgtcacctcacgcaagcggctccctctccaataatggagatggatgtgccagctcaaacgacaatggcgagcaggtggatcatactgctagtctgccgctcccgacccccgccaccgtgtacaatgccaccagtgaagagacttcaaacaattgccccgtgaaggacgccacagccagcgagaaaaacgaacccgaggttcagtggaccgccagtacctctgtggaacaggtgagggagcgcagctatcagagagcgctgttgctctccgaccaccgaaaggacaaggattctgatcccgaccctgagaacccagagccgaccacgacgaacgagtgtcctagtccggatacctcacagaatacatgtaagagtcccccaaagatgagcaaaccgggttcacccggaagtgtgattccagctcaggcgcacgggaaaatctttacgaagcccgacccacaatgggatagcacagtctccgcctctgaagccgaaaacggcgttcatctgaaaactgagttgcagcaaaagcaactgtcaaacaataatcaagcactgagcaagaatcaccccccacaaacccatgtgagaaactcctcggagcagctttcccagaaactgccatctgtgcctacaaagctgcactgccccccctcaccgcacctggagaacccccccaaatcctccacaccccacacccctgtccaacacgggtatttatctccaaaaccaccatcacagcagctgggtagcccctacaggccacaccattctcagtccccccaggttggtacgccccaaagggagcctcagagaaacttttacccagctgcgcaaaatctgccagccaatacacagcaggcgaccagcggcacacttttcacacagactccctcaggccagagcagcgccacatactcccaatttaaccagcagtctctgaactctaccgcgcccccgccaccaccacctcccccaccttctagtagctattatcaaaatcagcaaccatccgctaactttcagaattacaatcagttgaaaggctcccttagccaacagactgtcttcacctctggcccaaaccaggctttacctggcactacgtcccagcagaccgtgcccggtcatcatgtaacgcctggacatttcctaccatcacagaatccaaccattcaccaccagacagcagctgcagtagttcctccaccccctcctcccccacctgcacccggacctcatttggtgcagcagccaaactctcaccagcagcacagcgttgcgcacgtcgtggggcctgttcacgccgttactccaggaagccatatccactcacaaacagccgggcaccacctgcctcccccaccaccccccccaggtcccgcgcctcaccaccacccaccacctcacccaagcaccggcctccaggggctccaggcacaacaccaacacgtcgttaacagcgcaccccctcccccaccccctccaccaccgagttccgtactggcaagtggtcaccataccactagtgcgcaggctctgcaccatcctccccaccaaggtcctcccctgtttccctcctcggcccatcccaccgtccccccttatccctcacaggcaacacaccacacaacactgggcccaggaccccagcaccagccttccgggaccggaccccactgtcccctgcctgtgacaggcccacacctccagcctcagggcccaaacagtattccgactcccaccgcgagcgggttttgtcctcaccctgggagcgtcgccctcccccatggggtccagggtccccagcaggcatcccccgtgcccggacaaatacctattcacagggctcaggtgcccccaacttttcagaacaattatcacgggagcggatggcactag

SEQ ID NO: 290072 - DNA, 378 bp, Artificial Sequence
  derived and/or modified sequence
tgaggcagcctgagcaacaacggcgacggctgcgccagcagcaacgacaacggggagcaagttgaccacaccgcttctctgcctctaccgacccctgctacagtatacaacgcgacgtctgaagagaccagcaacaattgcccagtgaaggatgccacagcgtccgaaaaaaatgagccagaggtacagtggacagcatccacgtctgttgagcaagtgcgcgaacggagctatcagcgtgctttactgctcagcgaccaccggaaggataaggactcggacccagaccccgaaaatcccgagccgacgacaacaaatgagtgcccttcgcctgacacgtcccaaaacacgtgcaagagtcctccaaaaatgagctag

SEQ ID NO: 290073 - DNA, 216 bp, Artificial Sequence
  derived and/or modified sequence
atgagcatcgtgatccccctgggcgtggacaccgccgagaccagctacttagagatggcagcaggaagtgagcccgaatccgttgaggcctcccctgtggtggtcgagaaatccaacagttacccgcatcagctatacacatcctcttctcaccattcacactcctatattggcctgccgtatgcagaccacaattacggagccagacccccttag

SEQ ID NO: 290074 - DNA, 693 bp, Artificial Sequence
  derived and/or modified sequence
atgagcatcgtgatccccctgggcgtggacaccgccgagaccagctatctggaaatggccgccggttccgagcccgagtcggttgaagcctcacccgtggtagtggagaaaagcaacagctatccacatcagctgtacacatcaagcagtcaccactcccactcctacattggcctcccatacgccgatcataactatggtgccaggcccccccctacacccccggcttcccccccgccaagtgtactcatctcgaagaacgaagtcgggatctttacaacgcccaatttcgacgagacatccagcgctacaaccatatccacctccgaggacggcagttacggcaccgacgtaaccaggtgcatttgcggattcactcatgacgacggttatatgatctgctgtgacaaatgctcagtctggcagcatatcgactgtatggggatagaccgccagcacattcctgatacctacctgtgcgaacggtgtcagcctcggaacctagacaaggagagggcggtgttgctgcagaggcggaaacgtgagaatatgtccgacggggatacatcagcaacagagagcggcgatgaggttcctgtggaactgtataccgcatttcaacacacgccaacctccatcaccttgacagcttcccgagtgtctaaagttaacgataaacggcggaaaaagtag

SEQ ID NO: 290075 - DNA, 1362 bp, Artificial Sequence
  derived and/or modified sequence
atggtgctggtgctgagcgacaccagcgccagccccccccccagcgtcctcataagcaagaacgaggtcgggattttcacaacccctaacttcgatgagactagctcggccactaccatcagtacctcggaagatgggtcatatggtactgacgtcacccgctgtatatgtggctttacccacgacgatgggtacatgatttgttgcgacaaatgtagtgtgtggcagcatatcgattgcatgggcatcgatcgccagcacattcctgatacgtatttatgcgaaaggtgtcagccacgaaatttagataaagagcgcgccgtgcttctgcagagacgcaagcgggagaacatgtcagacggcgacacctcagctacagagagcggggacgaggtccctgtggagctatacacggcctttcaacacacacctaccagtatcactctgacagccagtagggttagcaaagtgaatgacaaaaggagaaaaaaatctggcgaaaaagagcagcacatctcgaagtgcaaaaaagcttttcgcgagggttcaaggaaatctagtcgggtgaagggatcagcacccgaaatcgatccatcttctgacgggagcaacttcgggtgggagactaagatcaaggcctggatggatcgatatgaagaagccaacaacaatcagtatagcgagggtgtccagcgggaggcccaacgaatcgcactgcgcctgggcaatggtaatgataaaaaggagatgaacaagtcagacctcaacaccaacaatctgctttttaagccgcctgttgagtcacatatccagaagaataagaaaattctgaagtccgctaaagacctcccacctgacgccctgatcatagagtacaggggcaagttcatgctgcgtgagcagtttgaagccaacggatatttcttcaagagaccatatccctttgtgctcttttattccaagttccatggactggaaatgtgtgtggatgctcgcacatttgggaatgaagcaagattcatccgaagatcttgtacacctaacgcggaggtgaggcatgaaatacaggacgggaccattcatctgtatatctattctatacatagcataccgaaagggactgagatcaccatcgccttcgattttgactacggaaactgcaagtacaaagtagattgcgcttgcctaaaggaaaatccagagtgtccagtgttgaagcgctcatccgagagtatggaaaacattaattctggatatgagactagacggaagaaggggaaaaagaccaagatatttcagaagaagaaaattcacaagattaggatcttgctgtggattgtcaaagagcgaccgaccaagtag

SEQ ID NO: 290076 - DNA, 5450 bp, Artificial Sequence
  derived and/or modified sequence
atgagtatcgttattcctcttggcgtcgacacagcggagacaagctatctagaaatggctgccggaagcgagcccgaaagcgtggaggcatcaccagtcgtggtagaaaagtctaacagttaccctcatcagttgtatacctcctcctcacaccactcgcactcatacatcggcctgccctatgccgatcataactacggggcaaggccccctccaactccacccgcttctccccctcctagtgtactgatctcaaaaaacgaggtgggaatctttactacccccaacttcgatgaaacaagttccgctaccacgatatcgacttctgaggacggctcgtacgggactgacgtcacaaggtgtatctgcgggttcactcatgacgatggttatatgatttgctgcgataagtgcagcgtgtggcagcacatcgattgcatggggattgatcggcaacacattcccgacacctatctgtgcgagagatgccagcccagaaacctcgacaaggagcgcgctgtgctcctgcagcgacgaaagcgcgaaaatatgtccgacggggatacaagcgctaccgagagcggcgacgaggtcccagtggagctgtatactgccttccaacacacgcccaccagtatcaccttgaccgcgtcccgtgtgtctaaagtgaatgacaaacgcagaaagaagtcgggagaaaaagaacaacatatcagcaagtgcaaaaaagccttccgggaaggctctcgaaaaagctcgcgtgtgaagggctcagcccctgagatagatccgagctccgatgggagtaactttggatgggaaactaaaattaaggcatggatggatcgctacgaggaagcaaacaacaatcagtactcggagggggtgcaacgcgaagcgcagcgcattgctctgcgactcggaaacgggaatgacaaaaaagagatgaacaagagcgatctgaacacaaacaacctgctcttcaagcccccagtggagagtcacatccagaagaacaagaagatcctcaagagtgctaaagatttgcctcctgatgctctcatcattgaatatcggggtaagtttatgctgagagagcagttcgaggctaacggatactttttcaagagaccctatccgtttgtcttattctattctaagttccacggactagagatgtgcgtggatgccagaacattcggaaatgaagccagatttattagacgcagctgtacgcccaatgcagaagtgcggcatgaaatccaagatgggaccatccacctctatatctattccatccattcgattccaaaagggacagagattaccattgcattcgattttgattatggcaactgcaagtacaaggtcgattgtgcttgcctaaaagagaaccccgaatgcccagtgcttaaaaggtcgagtgagtccatggagaacattaacagcggatacgaaacgagaaggaagaaaggcaaaaaagacaaagatatctctaaagagaaggacacccagaatcagaacatcacactcgattgcgagggaaccactaataaaatgaagagccccgagactaaacagaggaagctctcccctctgcgcctgtcagtgagcaacaaccaagaacctgattttatcgacgacattgaggaaaaaaccccgatctccaacgaggtcgaaatggagtcagaagagcagatcgccgagcgcaaaagaaaaatgacacgagaggagagaaagatggaggcaattctacaggcctttgcaagattagagaaacgggagaaacgcagagagcaagctctggaacgaatctctacagcaaaaacagaggtcaaaaccgagtgtaaggacacccagatcgtgtccgacgccgaagtgattcaggagcaggcgaaggaggagaacgcctctaaacctaccccagcgaaagtaaaccgcacaaagcagagaaagagtttcagccgcagtaggactcacatcggtcagcagcgtaggcgccatagaacggtttctatgtgttccgacattcagccatcgagccctgatattgaggtaacttctcaacagaacgacattgaaaacactgtcctgaccattgagcccgagaccgaaaccgcacttgccgagatcatcacagaaactgaagtgccggcattgaacaaatgccccactaaatatccaaagactaagaaacacttggtcaacgaatggctgtcagaaaaaaatgaaaagacagggaaaccctccgatggcctcagtgaaagacccctacgaataaccaccgacccagaggtgctggccacgcaactgaattcacttcctggcttaacctactctcctcatgtttattcgacccccaagcattatatacgatttaccagcccctttctctctgaaaagcgacggaggaaagagcctaccgaaaacatctcaggctcatgtaaaaagagatggttgaaacaggcactcgaggaagagaatagtgcaattctgcacagatttaattcgccttgccaggaacgcagtaggtcccccgcagttaatggggaaaataagagtcccctgctgctgaacgattcttgctcccttcctgacctgactaccccgttaaagaaaaggcggttctaccagctgctggattcggtgtacagtgaaacttcgacccctaccccatcaccctatgcaactccaacccataccgatatcacgccaatggacccatcctttgcaactcccccacggataaagtccgacgatgaaacctgtagaaacggttataaacctatctattccccagtgaccccagtaacccctggcacgcctggtaatacgatgcatttcgaaaacatttcctcccctgagtcaagtcctgagattaagaggcgtacttactcccaggaaggatatgaccgtagctccactatgctcactctcggtccgtttaggaacagtaatctgacggaattggggctgcaggaaatcaagaccatcggctatacttctcctcgaagtcgtacggaagttaaccggcagtgccctggagagaaggaaccagtatcagacctgcagctgggtctggacgctgtggagccgacggccctgcataagaccctagaaacgccagcacatgaccgggctgagccaaatagtcagctagattcaactcacagcggcaggggcaccatgtatagcagctgggttaagagcccagatagaaccggcgtgaatttcagcgttaacagtaatctcagggacctgacaccctcccaccagctcgaggtaggcggaggtttcaggatttctgaatccaagtgcctgatgcaggacgatacacgcggaatgtttatggagacaactgttttttgcacctcagaggacggactggtatcagggttcggtagaactgtgaatgacaatctaatcgacggtaactgtaccccccagaatccgccacaaaagaagaaggtgtcccttctcgagtataggaaaaggcagcgggaagcaaggaagtctggcagcaaaacagaaaatttccccctgatttccgtctcccctcacgcctccggcagcctgtcaaataatggagacggctgcgccagctccaatgacaacggagagcaggtggatcacacggcaagcctccccttgcccactcctgctaccgtgtataatgccacctctgaggagacctctaataactgtcctgtcaaggatgcaaccgccagcgaaaagaacgagcctgaggtgcagtggacagcctcaacctcagtggagcaagtgcgggaacgcagttatcaaagagccctcctgctgagtgaccatcgtaaggacaaagattccgaccctgaccccgagaacccagagcctacgacaaccaatgagtgcccatcccccgacactagccaaaatacatgtaaatctccaccgaagatgtcgaagcccggaagtcccggttcagtgatacccgctcaggcccatggaaagatattcacaaagccagatccacagtgggactctaccgtctccgcaagcgaagcagaaaatggcgttcacctgaagactgagctgcagcaaaaacaactgtccaacaataaccaggctcttagcaagaaccacccccctcagacgcacgtacggaattcttctgaacagctctcccagaagctgccttctgtccccaccaaattgcactgtcctccctctccgcatttggagaaccccccaaaaagttctacacctcacacaccggtgcagcacggctacctgagtcccaagcctccatcccagcagctcggaagcccttacaggcctcaccacagccagtctccccaggtaggaacccctcagagggaaccccagcggaacttctaccccgcagctcagaatctccccgctaatacccaacaggctacctccggaacacttttcacccaaaccccatccgggcagtcatctgccacttattctcagttcaaccagcagagtttaaatagcactgcgcctccccctcccccaccccctcccccatctagctcctattatcagaaccagcaaccctccgccaatttccagaactacaaccaactgaaaggctctctctcacagcagaccgtatttacgtccggacccaaccaagctttacccggtaccaccagccagcaaaccgtacccggacaccacgtgaccccagggcacttcttacctagtcagaatccaactattcaccaccagaccgctgctgctgtcgtgccccctccgccacccccaccacctgccccaggcccacacttagtccagcagcccaactcccaccagcaacactctgtggctcacgtggtcggcccagtccatgcggtgaccccgggatctcacattcactcccagaccgccggacatcacctgcctccacctccaccaccaccgggacccgctcctcaccaccatcccccaccacacccctctacaggcctgcagggattgcaggcccagcaccagcatgtggtcaattcagcccctcctccccctcctcccccacctccaagctctgttcttgcctccggtcaccatactactagcgcccaagcgctccaccatcccccacaccagggtccgcctttgtttccttccagcgcacatcccacggtgcccccttacccaagccaggcaacacaccatacgaccttgggtcctggtccacaacatcagcctagtggcacaggaccccactgcccactgcccgtgacgggcccacatctccagccacaggggccaaactctatccccacacccactgcctctggattctgtcctcatcccggatccgtggccctgcctcatggcgtacagggcccacaacaagcctcgcctgtgcctggtcagattccaattcatcgcgcacaggtaccacccacatttcagaataattaccacggctctggctggcacta

SEQ ID NO: 290077 - DNA, 378 bp, Artificial Sequence
  derived and/or modified sequence
tagggcagcttgtccaataatggcgacgggtgcgcatcatccaatgacaacggcgagcaggtggaccacaccgcatcgctccctttgcccactcctgccaccgtgtataacgccacatccgaggagaccagtaacaactgtcctgtgaaagatgccactgcatcagagaaaaacgaacccgaggtgcagtggactgctagtactagtgttgagcaggtccgggagcggtcttaccagcgcgcattgctcctctccgatcaccgcaaggacaaggacagcgatcctgacccggagaatccagagcccacaaccacaaatgagtgcccatcgccggacaccagtcagaacacttgtaagagccctcccaaaatgtcttag

SEQ ID NO: 290078 - DNA, 216 bp, Artificial Sequence
  derived and/or modified sequence
atgagcatcgtgattcctcttggtgtcgataccgcagagacctcttacctggaaatggccgctggcagcgagccagaatccgtagaggcttctcccgtggttgtcgagaagtccaatagctacccccaccagctatacacatccagttcacaccacagccattcttacattggcttaccatatgccgatcacaattacggcgcacgacctccatag

SEQ ID NO: 290079 - DNA, 693 bp, Artificial Sequence
  derived and/or modified sequence
atgagtattgtgatcccattgggggttgacaccgccgagacatcttatctggaaatggccgcagggtctgaacccgagtctgtggaagcctccccggtggtggtggagaagtctaatagttacccacaccagctctacacttccagcagtcaccattctcattcctatatcggactgccctatgctgaccacaactatggcgcacgcccacccccaacccctccagcctctcctccgccaagtgttttgatctcaaagaatgaagttggcattttcactactcctaacttcgacgagacctccagtgctaccactatttccacctccgaagacgggtcttatggaactgatgttacccgctgtatctgcggcttcacacacgacgatgggtacatgatctgctgtgacaaatgctctgtgtggcagcacattgattgcatgggcatcgataggcagcacatccctgatacctatctatgtgaacggtgccagcctcggaatctggataaggagcgggctgttctgctgcagcgcagaaaaagggaaaacatgtctgacggcgacacttctgccacagagtctggggatgaggtccccgtggagctgtacacggcttttcagcatactcctaccagtatcaccttgaccgcctcccgagtgtcaaaagtaaacgacaaacgtaggaaaaagtag

SEQ ID NO: 290080 - DNA, 1362 bp, Artificial Sequence
  derived and/or modified sequence
atggtcctggtattatccgatacctccgcttcacctcctccatcagtgctgattagcaaaaacgaggtggggattttcactactccaaatttcgatgaaactagtagcgcaaccactatttcgactagcgaggacggctcgtatggtaccgacgtaaccaggtgtatttgcggctttactcatgatgacggttatatgatatgctgcgataaatgttctgtctggcaacacattgattgcatgggcattgatcgccaacacatacccgatacctatttgtgtgaacgttgccaaccccgtaacctggataaagagcgggctgtactactgcagagacggaaacgggaaaatatgtcagatggtgacacatccgctacagaaagcggcgacgaagtgcctgtggaactgtacaccgcatttcaacatacccccaccagtatcacactcactgcctccagggtgtctaaagttaacgataagcgacgcaagaagagcggcgagaaagagcagcacatatcaaaatgtaaaaaggccttcagggagggttcacgcaaatcttccagagtcaaaggatcggcacctgagatcgatccatcaagcgacggctctaattttggttgggagaccaaaataaaagcctggatggatagatatgaagaggcgaacaataaccagtactcagagggggtccagcgggaagcccagaggatagccctgcgtttgggcaacggcaatgacaagaaggaaatgaataaaagcgacctgaatacaaataacttactgtttaaaccacctgtggagtcccatatccagaaaaacaagaagatcttgaagagcgccaaggatctaccccctgacgcccttatcattgagtatagaggcaaattcatgctaagggagcagtttgaagcaaatggatatttttttaaacgtccctatccctttgttctgttttacagtaaattccatggactggagatgtgcgtggatgcccgaacattcgggaacgaggcacgctttatccgccgaagttgcacccctaatgccgaagtgaggcacgagattcaggacggaactatccacctctatatctacagcatccactctatcccgaaggggactgagattactattgctttcgacttcgattacggaaattgtaagtacaaagttgactgtgcctgtctcaaggagaacccggaatgtcctgtacttaagcggagtagcgaaagcatggagaacataaattccggctatgaaacccgacgcaaaaagggtaagaagacaaaaatctttcagaagaagaaaattcacaaaataagaatacttttatggatcgtgaaggagagacctactaaatag

SEQ ID NO: 290081 - DNA, 5451 bp, Artificial Sequence
  derived and/or modified sequence
atgagcatcgtgatccccctgggcgtggacaccgccgagaccagctacctggagatggccgccggcagcgagcccgagagcgtggaggccagccccgtggtggtggagaagagcaacagctacccccaccagctgtacaccagcagcagccaccacagccacagctacatcggcctgccctacgccgaccacaactacggcgccagacccccccccaccccccccgccagccccccccccagcgtgctgatcagcaagaacgaggtgggcatcttcaccacccccaacttcgacgagaccagcagcgccaccaccatcagcaccagcgaggacggcagctacggcaccgacgtgaccagatgcatctgcggcttcacccacgacgacggctacatgatctgctgcgacaagtgcagcgtgtggcagcacatcgactgcatgggcatcgacagacagcacatccccgacacctacctgtgcgagagatgccagcccagaaacctggacaaggagagagccgtgctgctgcagagaagaaagagagagaacatgagcgacggcgacaccagcgccaccgagagcggcgacgaggtgcccgtggagctgtacaccgccttccagcacacccccaccagcatcaccctgaccgccagcagagtgagcaaggtgaacgacaagagaagaaagaagagcggcgagaaggagcagcacatcagcaagtgcaagaaggccttcagagagggcagcagaaagagcagcagagtgaagggcagcgcccccgagatcgaccccagcagcgacggcagcaacttcggctgggagaccaagatcaaggcctggatggacagatacgaggaggccaacaacaaccagtacagcgagggcgtgcagagagaggcccagagaatcgccctgagactgggcaacggcaacgacaagaaggagatgaacaagagcgacctgaacaccaacaacctgctgttcaagccccccgtggagagccacatccagaagaacaagaagatcctgaagagcgccaaggacctgccccccgacgccctgatcatcgagtacagaggcaagttcatgctgagagagcagttcgaggccaacggctacttcttcaagagaccctaccccttcgtgctgttctacagcaagttccacggcctggagatgtgcgtggacgccagaaccttcggcaacgaggccagattcatcagaagaagctgcacccccaacgccgaggtgagacacgagatccaggacggcaccatccacctgtacatctacagcatccacagcatccccaagggcaccgagatcaccatcgccttcgacttcgactacggcaactgcaagtacaaggtggactgcgcctgcctgaaggagaaccccgagtgccccgtgctgaagagaagcagcgagagcatggagaacatcaacagcggctacgagaccagaagaaagaagggcaagaaggacaaggacatcagcaaggagaaggacacccagaaccagaacatcaccctggactgcgagggcaccaccaacaagatgaagagccccgagaccaagcagagaaagctgagccccctgagactgagcgtgagcaacaaccaggagcccgacttcatcgacgacatcgaggagaagacccccatcagcaacgaggtggagatggagagcgaggagcagatcgccgagagaaagagaaagatgaccagagaggagagaaagatggaggccatcctgcaggccttcgccagactggagaagagagagaagagaagagagcaggccctggagagaatcagcaccgccaagaccgaggtgaagaccgagtgcaaggacacccagatcgtgagcgacgccgaggtgatccaggagcaggccaaggaggagaacgccagcaagcccacccccgccaaggtgaacagaaccaagcagagaaagagcttcagcagaagcagaacccacatcggccagcagagaagaagacacagaaccgtgagcatgtgcagcgacatccagcccagcagccccgacatcgaggtgaccagccagcagaacgacatcgagaacaccgtgctgaccatcgagcccgagaccgagaccgccctggccgagatcatcaccgagaccgaggtgcccgccctgaacaagtgccccaccaagtaccccaagaccaagaagcacctggtgaacgagtggctgagcgagaagaacgagaagaccggcaagcccagcgacggcctgagcgagagacccctgagaatcaccaccgaccccgaggtgctggccacccagctgaacagcctgcccggcctgacctacagcccccacgtgtacagcacccccaagcactacatcagattcaccagccccttcctgagcgagaagagaagaagaaaggagcccaccgagaacatcagcggcagctgcaagaagagatggctgaagcaggccctggaggaggagaacagcgccatcctgcacagattcaacagcccctgccaggagagaagcagaagccccgccgtgaacggcgagaacaagagccccctgctgctgaacgacagctgcagcctgcccgacctgaccacccccctgaagaagagaagattctaccagctgctggacagcgtgtacagcgagaccagcacccccacccccagcccctacgccacccccacccacaccgacatcacccccatggaccccagcttcgccaccccccccagaatcaagagcgacgacgagacctgcagaaacggctacaagcccatctacagccccgtgacccccgtgacccccggcacccccggcaacaccatgcacttcgagaacatcagcagccccgagagcagccccgagatcaagagaagaacctacagccaggagggctacgacagaagcagcaccatgctgaccctgggccccttcagaaacagcaacctgaccgagctgggcctgcaggagatcaagaccatcggctacaccagccccagaagcagaaccgaggtgaacagacagtgccccggcgagaaggagcccgtgagcgacctgcagctgggcctggacgccgtggagcccaccgccctgcacaagaccctggagacccccgcccacgacagagccgagcccaacagccagctggacagcacccacagcggcagaggcaccatgtacagcagctgggtgaagagccccgacagaaccggcgtgaacttcagcgtgaacagcaacctgagagacctgacccccagccaccagctggaggtgggcggcggcttcagaatcagcgagagcaagtgcctgatgcaggacgacaccagaggcatgttcatggagaccaccgtgttctgcaccagcgaggacggcctggtgagcggcttcggcagaaccgtgaacgacaacctgatcgacggcaactgcaccccccagaaccccccccagaagaagaaggtgagcctgctggagtacagaaagagacagagagaggccagaaagagcggcagcaagaccgagaacttccccctgatcagcgtgagcccccacgccagcggcagcctgagcaacaacggcgacggctgcgccagcagcaacgacaacggcgagcaggtggaccacaccgccagcctgcccctgcccacccccgccaccgtgtacaacgccaccagcgaggagaccagcaacaactgccccgtgaaggacgccaccgccagcgagaagaacgagcccgaggtgcagtggaccgccagcaccagcgtggagcaggtgagagagagaagctaccagagagccctgctgctgagcgaccacagaaaggacaaggacagcgaccccgaccccgagaaccccgagcccaccaccaccaacgagtgccccagccccgacaccagccagaacacctgcaagagcccccccaagatgagcaagcccggcagccccggcagcgtgatccccgcccaggcccacggcaagatcttcaccaagcccgacccccagtgggacagcaccgtgagcgccagcgaggccgagaacggcgtgcacctgaagaccgagctgcagcagaagcagctgagcaacaacaaccaggccctgagcaagaaccaccccccccagacccacgtgagaaacagcagcgagcagctgagccagaagctgcccagcgtgcccaccaagctgcactgcccccccagcccccacctggagaacccccccaagagcagcaccccccacacccccgtgcagcacggctacctgagccccaagccccccagccagcagctgggcagcccctacagaccccaccacagccagagcccccaggtgggcaccccccagagagagccccagagaaacttctaccccgccgcccagaacctgcccgccaacacccagcaggccaccagcggcaccctgttcacccagacccccagcggccagagcagcgccacctacagccagttcaaccagcagagcctgaacagcaccgcccccccccccccccccccccccccccccagcagcagctactaccagaaccagcagcccagcgccaacttccagaactacaaccagctgaagggcagcctgagccagcagaccgtgttcaccagcggccccaaccaggccctgcccggcaccaccagccagcagaccgtgcccggccaccacgtgacccccggccacttcctgcccagccagaaccccaccatccaccaccagaccgccgccgccgtggtgccccccccccccccccccccccccgcccccggcccccacctggtgcagcagcccaacagccaccagcagcacagcgtggcccacgtggtgggccccgtgcacgccgtgacccccggcagccacatccacagccagaccgccggccaccacctgcccccccccccccccccccccggccccgccccccaccaccacccccccccccaccccagcaccggcctgcagggcctgcaggcccagcaccagcacgtggtgaacagcgcccccccccccccccccccccccccccccagcagcgtgctggccagcggccaccacaccaccagcgcccaggccctgcaccaccccccccaccagggcccccccctgttccccagcagcgcccaccccaccgtgcccccctaccccagccaggccacccaccacaccaccctgggccccggcccccagcaccagcccagcggcaccggcccccactgccccctgcccgtgaccggcccccacctgcagccccagggccccaacagcatccccacccccaccgccagcggcttctgcccccaccccggcagcgtggccctgccccacggcgtgcagggcccccagcaggccagccccgtgcccggccagatccccatccacagagcccaggtgccccccaccttccagaacaactaccacggcagcggctggcactag

SEQ ID NO: 290082 - DNA, 378 bp, Artificial Sequence
  derived and/or modified sequence
tgaggcagcctgagcaacaacggcgacggctgcgccagcagcaacgacaacggcgagcaggtggaccacaccgccagcctgcccctgcccacccccgccaccgtgtacaacgccaccagcgaggagaccagcaacaactgccccgtgaaggacgccaccgccagcgagaagaacgagcccgaggtgcagtggaccgccagcaccagcgtggagcaggtgagagagagaagctaccagagagccctgctgctgagcgaccacagaaaggacaaggacagcgaccccgaccccgagaaccccgagcccaccaccaccaacgagtgccccagccccgacaccagccagaacacctgcaagagcccccccaagatgagctag

SEQ ID NO: 290083 - DNA, 216 bp, Artificial Sequence
  derived and/or modified sequence
atgagcatcgtgatccccctgggcgtggacaccgccgagaccagctacctggagatggccgccggcagcgagcccgagagcgtggaggccagccccgtggtggtggagaagagcaacagctacccccaccagctgtacaccagcagcagccaccacagccacagctacatcggcctgccctacgccgaccacaactacggcgccagacccccctag

SEQ ID NO: 290084 - DNA, 693 bp, Artificial Sequence
  derived and/or modified sequence
atgagcatcgtgatccccctgggcgtggacaccgccgagaccagctacctggagatggccgccggcagcgagcccgagagcgtggaggccagccccgtggtggtggagaagagcaacagctacccccaccagctgtacaccagcagcagccaccacagccacagctacatcggcctgccctacgccgaccacaactacggcgccagacccccccccaccccccccgccagccccccccccagcgtgctgatcagcaagaacgaggtgggcatcttcaccacccccaacttcgacgagaccagcagcgccaccaccatcagcaccagcgaggacggcagctacggcaccgacgtgaccagatgcatctgcggcttcacccacgacgacggctacatgatctgctgcgacaagtgcagcgtgtggcagcacatcgactgcatgggcatcgacagacagcacatccccgacacctacctgtgcgagagatgccagcccagaaacctggacaaggagagagccgtgctgctgcagagaagaaagagagagaacatgagcgacggcgacaccagcgccaccgagagcggcgacgaggtgcccgtggagctgtacaccgccttccagcacacccccaccagcatcaccctgaccgccagcagagtgagcaaggtgaacgacaagagaagaaagaagtag

SEQ ID NO: 290085 - DNA, 1362 bp, Artificial Sequence
  derived and/or modified sequence
atggtgctggtgctgagcgacaccagcgccagccccccccccagcgtgctgatcagcaagaacgaggtgggcatcttcaccacccccaacttcgacgagaccagcagcgccaccaccatcagcaccagcgaggacggcagctacggcaccgacgtgaccagatgcatctgcggcttcacccacgacgacggctacatgatctgctgcgacaagtgcagcgtgtggcagcacatcgactgcatgggcatcgacagacagcacatccccgacacctacctgtgcgagagatgccagcccagaaacctggacaaggagagagccgtgctgctgcagagaagaaagagagagaacatgagcgacggcgacaccagcgccaccgagagcggcgacgaggtgcccgtggagctgtacaccgccttccagcacacccccaccagcatcaccctgaccgccagcagagtgagcaaggtgaacgacaagagaagaaagaagagcggcgagaaggagcagcacatcagcaagtgcaagaaggccttcagagagggcagcagaaagagcagcagagtgaagggcagcgcccccgagatcgaccccagcagcgacggcagcaacttcggctgggagaccaagatcaaggcctggatggacagatacgaggaggccaacaacaaccagtacagcgagggcgtgcagagagaggcccagagaatcgccctgagactgggcaacggcaacgacaagaaggagatgaacaagagcgacctgaacaccaacaacctgctgttcaagccccccgtggagagccacatccagaagaacaagaagatcctgaagagcgccaaggacctgccccccgacgccctgatcatcgagtacagaggcaagttcatgctgagagagcagttcgaggccaacggctacttcttcaagagaccctaccccttcgtgctgttctacagcaagttccacggcctggagatgtgcgtggacgccagaaccttcggcaacgaggccagattcatcagaagaagctgcacccccaacgccgaggtgagacacgagatccaggacggcaccatccacctgtacatctacagcatccacagcatccccaagggcaccgagatcaccatcgccttcgacttcgactacggcaactgcaagtacaaggtggactgcgcctgcctgaaggagaaccccgagtgccccgtgctgaagagaagcagcgagagcatggagaacatcaacagcggctacgagaccagaagaaagaagggcaagaagaccaagatcttccagaagaagaagatccacaagatcagaatcctgctgtggatcgtgaaggagagacccaccaagtag

SEQ ID NO: 290086 - protein, 129 aa, Artificial Sequence
  derived and/or modified sequence
MASESSPLLAYRLLGEEGVALPANGAGGPGGASARKLSTFLGVVVPTVLSMFSIVVFLRIGFVVGHAGLLQALAMLLVAYFILALTVLSVCAIATNGAVQGGGAYFMISRTLGPEVGGSIGLMFYLANV

SEQ ID NO: 290087 - protein, 486 aa, Artificial Sequence
  derived and/or modified sequence
HFGVHWHSLVFTGILGVHWHFGTTARLLALAQLVLLAGKLNTLAAVVTVFYLVAYAAVDLSCLSLEWASAPNFRPTFSLFSWHTCLLGVASCLLMMFLISPGAAGGSLLLMGLLAALLTARGGPSSWGYVSQALLFHQVRKYLLRLDVRKDHVKFWRPQLLLLVGNPRGALPLLRLANQLKKGGLYVLGHVTLGDLDSLPSDPVQPQYGAWLSLVDRAQVKAFVDLTLSPSVRQGAQHLLRISGLGGMKPNTLVLGFYDDAPPQDHFLTDPAFSEPADSTREGSSPALSTLFPPPRAPGSPRALNPQDYVATVADALKMNKNVVLARASGALPPERLSRGSGGTSQLHHVDVWPLNLLRPRGGPGYVDVCGLFLLQMATILGMVPAWHSARLRIFLCLGPREAPGAAEGRLRALLSQLRIRAEVQEVVWGEGAGAGEPEAEEEGDFVNSGRGDAEAEALARSANALVRAQQGRHRRRAGWAGGWGC

SEQ ID NO: 290088 - DNA, 189 bp, Artificial Sequence
  derived and/or modified sequence
atgctgcaggtggtgcaggaaggcaatcctgctccatttataatcaataccgttaagcgcggtcggagggacagggagagacagcgcactccttgggcccctcaccccttagggttccaaggtagaaggtatatctacgagtctcccaatcatcgtgggaaggactcttctttcttagcccagaaatag

SEQ ID NO: 290089 - protein, 650 aa, Artificial Sequence
  derived and/or modified sequence
MACREFEMGRKKCERYWPLYGEDPITFAPFKISCEDEQARTDYFIRTLLLEFQNESRRLYQFHYVNWPDHDVPSSFDSILDMISLMRKYQEHEDVPICIHCSAGCGRTGAICAIDYTWNLLKAGKIPEEFNVFNLIQEMRTQRHSAVQTKEQYELVHRAIAQLFEKQLQLYEIHGAQKIADGVNEINTENMVSSIEPEKQDSPPPKPPRTRSCLVEGDAKEEILQPPEPHPVPPILTPSPPSAFPTVTTVWQDNDRYHPKPVLHMVSSEQHSADLNRNYSKSTELPGKNESTIEQIDKKLERNLSFEIKKVPLQEGPKSFDGNTLLNRGHAIKIKSASPCIADKISKPQELSSDLNVGDTSQNSCVDCSVTQSNKVSVTPPEESQNSDTPPRPDRLPLDEKGHVTWSFHGPENAIPIPDLSEGNSSDINYQTRKTVSLTPSPTTQVETPDLVDHDNTSPLFRTPLSFTNPLHSDDSDSDERNSDGAVTQNKTNISTASATVSAATSTESISTRKVLPMSIARHNIAGTTHSGAEKDVDVSEDSPPPLPERTPESFVLASEHNTPVRSEWSELQSQERSEQKKSEGLITSENEKCDHPAGGIHYEMCIECPPTFSDKREQISENPTEATDIGFGNRCGKPKGPRDPPSEWT

SEQ ID NO: 290090 - DNA, 2526 bp, Artificial Sequence
  derived and/or modified sequence
gtgcagatcgtggctgacagaggaacgggggtattgagcggttaagaagattgtctaccaaatatagaacagaaaagatatatcccacagccactggagaaaaagaagaaaatgttaaaaagaacagatacaaggacatactgccatttgatcacagccgagttaaattgacattaaagactccttcacaagattcagactatatcaatgcaaattttataaagatcattgtaatggcctgccgagaatttgagatgggaaggaaaaaatgtgagcgctattggcctttgtatggagaagaccccataacgtttgcaccatttaaaatttcttgtgaggatgaacaagcaagaacagactacttcatcaggacactcttacttgaatttcaaaatgaatctcgtaggctgtatcagtttcattatgtgaactggccagaccatgatgttccttcatcatttgattctattctggacatgataagcttaatgaggaaatatcaagaacatgaagatgttcctatttgtattcattgcagtgcaggctgtggaagaacaggtgccatttgtgccatagattatacgtggaatttactaaaagctgggaaaataccagaggaatttaatgtatttaatttaatacaagaaatgagaacacaaaggcattctgcagtacaaacaaaggagcaatatgaacttgttcatagagctattgcccaactgtttgaaaaacagctacaactatatgaaattcatggagctcagaaaattgctgatggagtgaatgaaattaacactgaaaacatggtcagctccatagagcctgaaaaacaagattctcctcctccaaaaccaccaaggacccgcagttgccttgttgaaggggatgctaaagaagaaatactgcagccaccggaacctcatccagtgccacccatcttgacaccttctcccccttcagcttttccaacagtcactactgtgtggcaggacaatgatagataccatccaaagccagtgttgcatatggtttcatcagaacaacattcagcagacctcaacagaaactatagtaaatcaacagaacttccagggaaaaatgaatcaacaattgaacagatagataaaaaattggaacgaaatttaagttttgagattaagaaggtccctctccaagagggaccaaaaagttttgatgggaacacacttttgaataggggacatgcaattaaaattaaatctgcttcaccttgtatagctgataaaatctctaagccacaggaattaagttcagatctaaatgtcggtgatacttcccagaattcttgtgtggactgcagtgtaacacaatcaaacaaagtttcagttactccaccagaagaatcccagaattcagacacacctccaaggccagaccgcttgcctcttgatgagaaaggacatgtaacgtggtcatttcatggacctgaaaatgccatacccatacctgatttatctgaaggcaattcctcagatatcaactatcaaactaggaaaactgtgagtttaacaccaagtcctacaacacaagttgaaacacctgatcttgtggatcatgataacacttcaccactcttcagaacacccctcagttttactaatccacttcactctgatgactcagactcagatgaaagaaactctgatggtgctgtgacccagaataaaactaatatttcaacagcaagtgccacagtttctgctgccactagtactgaaagcatttctactaggaaagtattgccaatgtccattgctagacataatatagcaggaacaacacattcaggtgctgaaaaagatgttgatgttagtgaagattcacctcctcccctacctgaaagaactcctgaatcgtttgtgttagcaagtgaacataatacacctgtaagatcggaatggagtgaacttcaaagtcaggaacgatctgaacaaaaaaagtctgaaggcttgataacctctgaaaatgagaaatgtgatcatccagcgggaggtattcactatgaaatgtgcatagaatgtccacctactttcagtgacaagagagaacaaatatcagaaaatccaacagaagccacagatattggttttggtaatcgatgtggaaaacccaaaggaccaagagatccaccttcagaatggacatgattcagggagctagaagacactttaagttatactggaaaattcaggtgccactgaaagccagatttatagtattccatctttaatatgtgggactaacagcagtgtagattgttaccttaatattttttgctgggaccatctacctgccttatactacacttaggaaaaagtattacatatggtttattttgaaacttcaagtattattgccttaatgtctcttaaccctgttacacgctgcttgtagacatgttaatatagtaatacctttatgatatattgagtttaaggactactctttttctgttttatcatgtatgcattattttgtatatgtaca

SEQ ID NO: 290091 - DNA, 1891 bp, Artificial Sequence
  derived and/or modified sequence
gtctctggtatctcccgctgagctgctctgttcccggcttagaggaccaggagaagggggagttggaggctggagcctgtaacaccgtggctcgtctcgctctggatggtggtggcaacagagatggcagcgcagctggagtgttaggagggcggcctgagcggtaggagtggggctggagcagtaagatggcggccggagcagtaagatggcggctggagtggtttttctggcattgtctgcccagctgctccaagccaggctgatgaaggaggagtcccctgtggtgagctggaggttggagcctgaagatggcacagctctcgatgtgcattttgtaagcactttggagccactatcaaatgctgtgaagagaaatgtacccagatgtatcattatccttgtgctgcaggagccgacacctttcaggatttcagtcacatcttcctgctttgtccagaacacattgaccaagctcctgaaagatcgaaggaagatgcaaactgtgcagtgtgcgacagcccgggagacctcttagatcagttcttttgtactacttgtggtcagcactatcatggaatgtgcctggatacagcggttactccattaaaacgtgcaggttggcaatgtcctgagtgcaaagtgtgccagaactgcaaacaatcgggagaagatagcaagatgctagtgtgtgatacgtgtgacaaagggtatcatactttttgtcttcaacgaattatgaaatctgtaccaaccaacggctggaaatgcaaatgaataccgaattggaaaaacagatttctaatgaggctgatagtgaagaaatgaaaatgtcttctgaagtgaagcatatttgtggcgaagatcaaattgaagataaaatggaagtgacagaaaacattgaagtcgttacacaccagatcactgtgcagcaagagcaactgcagttgttagaggaacctaaaacagtggtatccaaagaagaatcaaggcctccaaaatttgtcattgaatctgtcactcttccactagaaaccttagtgtccccacatgaggaaagcacttcattatgtcctgaggaacagttggttatagaaaggctacaaggagaaaaggaacagaaagaagattctgaactttctactggattgatggactctgaaatgactcctacaattgagggttgtgtgaaagatgtttcataccaaggaggcaaatctataaagttatcatctgagacagagtcatcattttcattatcagcagacataagcaaggcagatgtgtcttcctccccaacaccttcttcagacttgccttcgcatgacatgctgcgtaattacccttcagctcttagttcctctgctggaaacatcatgccaacaacttacatctcagtcactccaaaaaactggcatgggtaaaccagctattactaagagaaaattttctcctggtagacctcggtccaaacaggaggcttggagtacccataatacagtgagcccaccctcgtggtccccagacatttcaggaggtcgggaaatttttaaacccaggcagcttcctggcagtgccatttggagcatcaaagtgggccatgggtctggatttccaagaaagcggagacctcgaggtgcaggactgtcggggcgaggtggccgaggcaggtcaaagctgaaaagtggaatcggagctgttgtattgcctggggtgtctactgcagatatttcatcaaataaggatgatgaagaaaactctatgcacactacggttgtgttgttttctagcagtgacaagttcactttgaatcaggatatgtgtgtagtttgtggcagttttggccaaggagcagaaggaagactacttgcctgttctcagtgtggtcagt

SEQ ID NO: 290092 - protein, 1524 aa, Artificial Sequence
  derived and/or modified sequence
LMQEVDRQRALQQRMEMEQHGMVGSEISSSRTSVSQIPFYSSDLPCDFMQPLGPLQQSPQHQQQMGQVLQQQNIQQGSINSPSTQTFMQTNERRQVGPPSFVPDSPSIPVGSPNFSSVKQGHGNLSGTSFQQSPVRPSFTPALPAAPPVANSSLPCGQDSTITHGHSYPGSTQSLIQLYSDIIPEEKGKKKRTRKKKRDDDAESTKAPSTPHSDITAPPTPGISETTSTPAVSTPSELPQQADQESVEPVGPSTPNMAAGQLCTELENKLPNSDFSQATPNQQTYANSEVDKLSMETPAKTEEIKLEKAETESCPGQEEPKLEEQNGSKVEGNAVACPVSSAQSPPHSAGAPAAKGDSGNELLKHLLKNKKSSSLLNQKPEGSICSEDDCTKDNKLVEKQNPAEGLQTLGAQMQGGFGCGNQLPKTDGGSETKKQRSKRTQRTGEKAAPRSKKRKKDEEEKQAMYSSTDTFTHLKQQLSLLPLMEPIIGVNFAHFLPYGSGQFNSGNRLLGTFGSATLEGVSDYYSQLIYKKMANGFATTEELAGKAGVLVSHEVTKTLGPKPFQLPFRPQDDLLARALAQGPKTVDVPASLPTPPHNNQEELRIQDHCGDRDTPDSFVPSSSPESVVGVEVSRYPDLSLVKEEPPEPVPSPIIPILPSTAGKSSESRRNDIKTEPGTLYFASPFGPSPNGPRSGLISVAITLHPTAAENISSVVAAFSDLLHVRIPNSYEVSSAPDVPSMGLVSSHRINPGLEYRQHLLLRGPPPGSANPPRLVSSYRLKQPNVPFPPTSNGLSGYKDSSHGIAESAALRPQWCCHCKVVILGSGVRKSFKDLTLLNKDSRESTKRVEKDIVFCSNNCFILYSSTAQAKNSENKESIPSLPQSPMRETPSKAFHQYSNNISTLDVHCLPQLPEKASPPASPPIAFPPAFEAAQVEAKPDELKVTVKLKPRLRAVHGGFEDCRPLNKKWRGMKWKKWSIHIVIPKGTFKPPCEDEIDEFLKKLGTSLKPDPVPKDYRKCCFCHEEGDGLTDGPARLLNLDLDLWVHLNCALWSTEVYETQAGALINVELALRRGLQMKCVFCHKTGATSGCHRFRCTNIYHFTCAIKAQCMFFKDKTMLCPMHKPKGIHEQELSYFAVFRRVYVQRDEVRQIASIVQRGERDHTFRVGSLIFHTIGQLLPQQMQAFHSPKALFPVGYEASRLYWSTRYANRRCRYLCSIEEKDGRPVFVIRIVEQGHEDLVLSDISPKGVWDKILEPVACVRKKSEMLQLFPAYLKGEDLFGLTVSAVARIAESLPGVEACENYTFRYGRNPLMELPLAVNPTGCARSEPKMSAHVKRPHTLNSTSTSKSFQSTVTGELNAPYSKQFVHSKSSQYRKMKTEWKSNVYLARSRIQGLGLYAARDIEKHTMVIEYIGTIIRNEVANRKEKLYESQNRGVYMFRMDNDHVIDATLTGGPARYINHSCAPNCVAEVVTFERGHKIIISSSRRIQKGEELCYDYKFDFEDDQHKIPCHCGAVNCRKWMN

SEQ ID NO: 290093 - DNA, 4575 bp, Artificial Sequence
  derived and/or modified sequence
ctcatgcaggaggttgatagacagcgcgccctgcagcaacgtatggaaatggaacaacacgggatggtcgggtccgaaatcagttcctctcgcacctctgtttctcagataccattctatagtagcgacctgccttgcgattttatgcaacctctgggacccctgcagcaaagcccccagcatcagcagcagatgggccaagtgctgcaacaacagaatattcagcaggggtccatcaactccccttccacgcaaactttcatgcagaccaacgaaagaagacaggtcggcccaccaagttttgtgcctgatagccctagcattcctgttggtagcccgaacttcagcagtgtgaagcaagggcacggaaacctgagtggtactagcttccagcagtccccagtgagaccatcctttacccctgcgctgcctgcagccccccctgtggccaacagctctctgccttgcggtcaggactccaccatcactcacgggcattcctaccctgggtcaacccagtcactgattcagctgtattccgatattatccctgaagaaaagggtaagaagaagcgcactcgaaaaaagaaacgggatgacgacgccgaatccactaaggcccctagcactccacacagcgatattactgcaccccccacgcccggcatcagcgaaaccactagcacccccgcagtcagcactccctccgaactcccccagcaggcagaccaggaatctgtagaacctgtcgggcccagcacccctaatatggcagcagggcaactgtgcaccgagctagagaataagctgcccaactccgactttagccaggccacacctaaccagcagacctacgcgaactctgaagtcgacaagttgagcatggagacgcctgccaagacagaggaaatcaaactcgagaaggcagagacagaatcctgccccgggcaggaagagccaaagcttgaggaacagaacggctctaaagtggaaggtaatgccgtggcctgtccagtttccagcgcccaatccccacctcattcagctggtgctcctgctgctaagggagatagcgggaatgagctattgaagcatctgctgaagaataaaaagagctcaagtttactcaaccagaagccagagggttcaatttgctctgaggacgactgtactaaggacaataagctggtcgagaaacaaaaccctgccgaaggcctgcagactctgggcgctcagatgcagggaggcttcggctgtggtaaccagctacccaagacagatggaggctctgagacaaaaaaacagagaagcaaaagaacacagaggaccggtgaaaaggcggccccccggtctaaaaaacggaagaaggacgaagaagagaagcaagcgatgtactcaagcaccgataccttcacccacttaaaacagcaattgtcccttttgccactgatggagccaattattggagtgaatttcgcgcacttcctgccatatggctcaggccagttcaatagtgggaatcgcctgctgggcacctttggaagcgctacccttgagggtgtttcggactactactcccagctgatttacaagaaaatggccaacgggtttgcaaccaccgaggagctggccggcaaagctggagtcctggtgtcccatgaggtaacaaagacattaggtccaaagccctttcagctaccctttaggcctcaggatgatcttctcgcaagggcgctggcacaagggcccaaaaccgtcgatgtcccggcatccctgcccactccgccgcacaataaccaggaagagcttcgcatacaggatcactgcggggatagggacacccccgacagcttcgtgccctcttcttcccccgagagcgtggtgggcgtcgaggtttcaaggtaccccgacctcagcctagttaaagaggaacccccagagcctgtgcctagtccaattatccccattctgccctccacagccggaaaatcctcggagtcaaggcggaacgacataaaaaccgaacccgggaccttgtacttcgcgagcccattcgggcccagcccaaatggaccccgttcaggactcatttctgtggcaataacgctccaccccaccgctgcagagaacatctctagtgttgtcgctgcattctctgacctcctgcacgtgagaattcccaattcttacgaagtttccagcgccccagacgtccctagcatgggcttagtgtcctcgcacagaattaatcccggtttggagtaccgccagcatttgctcctccgcggaccccccccaggttccgccaacccaccccggctcgtatcttcgtaccgtctgaagcaaccgaacgtccccttcccacctacatcaaacggcctatcaggatataaggattcaagccacggcatcgctgaaagtgcagccttgcgccctcagtggtgttgtcactgtaaggtcgtcatcctgggtagcggcgtgagaaaaagtttcaaggacctgacattattaaataaagatagtagggaatcgactaaacgggtcgaaaaagatattgtgttctgttccaataattgttttatattgtactcatccactgcccaagctaaaaactctgagaacaaggagtccatcccttccctgccacagagtcctatgagggagaccccctcaaaggcttttcatcagtactccaacaatatctccacactggacgtgcattgcctgccccaactcccggaaaaggccagcccccccgcttcacccccaattgcgttcccccccgcgttcgaagcggctcaagttgaagcgaaaccggatgaattgaaggttacagtaaagctgaagcctcggcttagagcagtgcacgggggcttcgaggactgccggcctctgaacaaaaagtggagaggcatgaagtggaaaaaatggtctattcacatcgtcattccaaagggaactttcaaaccaccatgtgaagatgagattgacgaatttctgaagaagttggggacatccctcaaaccagatcctgtgcccaaggattaccgcaaatgctgtttttgtcacgaggaaggtgacggtctgaccgacggaccagcacggctcctgaatctcgaccttgatctgtgggtccatctgaactgcgcgttgtggtccacagaggtgtatgaaacacaggcgggcgcgctgattaacgttgagctggcccttaggagaggtctccagatgaagtgtgtgttttgccacaagactggcgccacatctggctgccataggtttcggtgtaccaatatctatcattttacatgtgcaatcaaagcccagtgcatgtttttcaaagataaaactatgctgtgccctatgcacaaacctaaagggatccacgaacaggagctgagctactttgctgtcttccgacgtgtgtatgttcagcgcgatgaggtacgccagattgcatctattgttcagaggggggaacgcgatcacacgttccgggtggggtctctgattttccatacaatcgggcagctgttaccacagcagatgcaggcctttcattctcctaaagctctgtttcccgtgggttatgaggcaagtcgcctgtattggtctacaagatatgcgaaccggcgctgcaggtatctttgcagcatagaggaaaaggacggaagaccagtcttcgttattcgcatcgtggaacagggccatgaagatctggtactgtcggatatctcgcccaagggggtctgggacaaaattctggagcctgtcgcctgtgtccgtaagaagagcgaaatgttgcagctgtttcccgcttacctgaaaggcgaagatttgttcgggctgacagtaagcgccgtggcaaggatcgcagagagcctgcccggagtcgaagcgtgtgaaaactatacttttagatatggcaggaatccattaatggaattaccactagccgtgaatcccaccggttgcgcccggagtgagcctaagatgtccgcacatgttaagagaccacataccctgaattccacctccaccagcaagtccttccaatccacagtgacaggcgagctgaatgccccatatagcaaacagttcgtgcattcaaagagtagccagtatcgaaagatgaagactgagtggaaaagcaatgtgtatctcgctcgctcgcggatacaagggttgggcctgtacgctgcaagagacatcgaaaaacatacaatggtcatcgaatacattggtacaatcattcgcaacgaagtggctaatagaaaggaaaaactttacgagtctcagaataggggcgtgtacatgtttcggatggacaacgaccacgtcatcgacgccaccctcacaggtggacccgcccggtatatcaatcattcgtgtgctcccaattgtgtggccgaggtggtgacgtttgagcgtggccacaagattatcatctcttctagccgccggatacagaaaggggaagagttatgttatgactacaagtttgacttcgaggatgatcagcacaaaatcccctgtcactgcggagctgtcaattgccggaaatggatgaattag

SEQ ID NO: 290094 - DNA, 4575 bp, Artificial Sequence
  derived and/or modified sequence
ctgatgcaggaggtggaccggcagagggccctgcagcagaggatggagatggagcagcacggcatggtgggcagcgagatcagcagcagcaggacctctgtgtcccagatccccttctacagcagtgacctgccctgtgacttcatgcagcccctgggccccctgcagcagagcccccagcaccagcagcagatgggccaggtgctgcagcagcagaacatccagcagggcagcatcaacagccccagcacccagaccttcatgcagaccaatgaaagacggcaggtgggcccccccagctttgtgcctgacagccccagcatccctgtgggcagccccaacttcagctctgtgaagcagggccacggcaacctgagcggcaccagcttccagcagagccctgtgcggcccagcttcaccccagccctgcctgctgcccctcctgtggccaacagcagcctgccctgtggccaggacagcaccatcacccacggccacagctacccaggcagcacccagagcctcatccagctgtacagcgacatcatccctgaggagaagggcaagaagaagaggaccaggaagaagaagagagatgatgatgctgagagcaccaaggcccccagcaccccccacagcgacatcacagccccacccaccccaggcatcagcgagaccaccagcaccccagctgtgtccacccccagcgagctgccccagcaggccgaccaggagagcgtggagcctgtgggccccagcacccccaacatggctgctggccagctgtgcacagagctggagaacaagctgcccaacagcgacttcagccaggccacccccaaccagcagacctacgccaacagcgaggtggacaagctgtccatggagaccccagccaagacagaggagatcaagctggagaaggccgagacagagagctgccccggccaggaggagcccaagctggaggagcagaatggcagcaaggtggagggcaatgctgtggcctgccctgtgtcctctgcccagagccccccccacagcgctggggccccagctgccaagggggacagcggaaatgagctgctgaagcacctgctgaagaacaagaagagcagcagcctgctgaaccagaagccagagggcagcatctgcagtgaagatgactgcaccaaggacaacaagctggtggagaagcagaacccagctgagggcctgcagaccctgggcgcccagatgcagggcggcttcggctgcggcaaccagctgcccaagacagatggcggcagcgagaccaagaagcagaggagcaagaggacccagaggactggagagaaggccgcccccaggagcaagaagaggaagaaggatgaggaggagaagcaggccatgtacagcagcacagacaccttcacccacctgaagcagcagctgagcctgctgcccctgatggagcccatcatcggcgtgaactttgcccacttcctgccctacggcagcggccagttcaacagcggcaaccggctgctgggcacctttggaagtgccaccctggagggcgtgtctgactactacagccagctgatctacaagaagatggccaatggatttgccaccacagaggagctggccggcaaggccggcgtgctggtgtcccatgaggtgaccaagaccctgggccccaagcccttccagctgcccttccggccccaggatgacctgctggcccgggccctggcccagggccccaagacagtggatgtgcctgccagcctgcccaccccaccccacaacaaccaggaggagctgcgcatccaggaccactgtggggaccgggacaccccagacagctttgtgcccagcagcagccctgagagcgtggtgggcgtggaggtgagccgctacccagacctgagcctggtgaaggaggagcccccagagcctgtgcccagccccatcatccccatcctgcccagcacagctgggaagagcagcgagagcagaagaaatgacatcaagacagagcccggcaccctgtactttgccagccccttcggccccagccccaacggccccaggagcggcctcatctctgtggccatcaccctgcaccccacagctgctgagaacatcagctctgtggtggccgccttcagtgacctgctgcacgtgcgcatccccaacagctatgaggtgagcagcgccccagatgtgcccagcatgggcctggtgagcagccaccgcatcaaccctggcctggagtaccggcagcacctgctgctgcggggccccccacctggcagcgccaaccccccccggctggtgtcctcctaccgcctgaagcagcccaacgtgcccttcccccccaccagcaatggcctgagcggctacaaggacagcagccacggcattgctgagagcgctgccctgcggccccagtggtgctgccactgcaaggtggtgatcctgggcagcggcgtgaggaagagcttcaaggacctgaccctgctgaacaaggacagccgggagagcaccaagagggtggagaaggacatcgtgttctgcagcaacaactgcttcatcctgtacagcagcacagcccaggccaagaacagcgagaacaaggagagcatccccagcctgccccagagccccatgagggagacccccagcaaggccttccaccagtacagcaacaacatcagcaccctggatgtgcactgcctgccccagctgcctgagaaggccagccccccagccagcccccccatcgccttccccccagcctttgaggccgcccaggtggaggccaagccagatgagctgaaggtgacagtgaagctgaagccccggctgcgggctgtgcacggcggctttgaggactgccggcccctgaacaagaagtggaggggcatgaagtggaagaagtggagcatccacatcgtcatccccaagggcaccttcaagccaccctgtgaagatgaaattgatgagttcctgaagaagctgggcaccagcctgaagccagaccctgtgcccaaggactacaggaagtgctgcttctgccacgaggagggagatggcctgacagatggccctgcccggctgctgaacctggacctggacctgtgggtgcacctgaactgtgccctgtggagcacagaggtgtatgagacccaggccggggccctgatcaacgtggagctggccctgcggcggggcctgcagatgaagtgtgtgttctgccacaagacaggagccaccagcggctgccaccgcttccgctgcaccaacatctaccacttcacctgtgccatcaaggcccagtgcatgttcttcaaggacaagaccatgctgtgccccatgcacaagcccaagggcatccacgagcaggagctgagctactttgctgtgttccggcgggtgtatgtgcagagagatgaggtgcggcagatcgccagcatcgtgcagagaggagagcgggaccacaccttccgggtgggcagcctcatcttccacaccatcggccagctgctgccccagcagatgcaggccttccacagccccaaggccctcttccctgtgggctatgaggccagccggctgtactggagcaccaggtatgccaacagacgctgccgctacctgtgcagcattgaggagaaggatggccggcctgtgtttgtgatccgcatcgtggagcagggccacgaggacctggtgctgagtgacatcagccccaagggcgtgtgggacaagatcctggagcctgtggcctgtgtgaggaagaagtctgagatgctgcagctgtttcctgcctacctgaagggggaggacctgtttggcctgactgtgtctgctgtggccagaattgctgagagcctgcccggggtggaggcctgtgagaactacaccttccgctatggcaggaaccccctgatggagctgcccctggccgtgaaccccaccggctgtgcccggtctgagcccaagatgtctgcccacgtgaagaggccccacaccctgaacagcaccagcaccagcaagagcttccagagcacagtgactggagagctgaatgccccctacagcaagcagtttgtgcacagcaagagcagccagtacaggaagatgaagacagagtggaagagcaatgtgtacctggcccggagccgcatccagggcctgggcctgtatgctgcccgggacatcgagaagcacaccatggtgattgagtacatcggcaccatcatcagaaatgaggtggccaacaggaaggagaagctgtatgagagccagaacagaggagtgtacatgttcaggatggacaatgaccacgtgattgatgccaccctgactggaggccctgcccgctacatcaaccacagctgtgcccccaactgtgtggccgaggtggtgacctttgagcggggccacaagatcatcatcagcagcagccgccgcatccagaagggggaggagctgtgctatgactacaagtttgattttgaagatgaccagcacaagatcccctgccactgtggggctgtgaactgcaggaagtggatgaactag

SEQ ID NO: 290095 - DNA, 5874 bp, Artificial Sequence
  derived and/or modified sequence
ctcatgcaggaggtagatagacaaagagctttgcagcagaggatggaaatggagcagcatggtatggtgggctctgagataagtagtagtaggacatctgtgtcccagattcccttctacagttccgacttaccttgtgattttatgcaacctctaggaccccttcagcagtctccacaacaccaacagcaaatggggcaggttttacagcagcagaatatacaacaaggatcaattaattcaccctccacccaaactttcatgcagactaatgagcgaaggcaggtaggccctccttcatttgttcctgattcaccatcaatccctgttggaagcccaaatttttcttctgtgaagcagggacatggaaatctttctgggaccagcttccagcagtccccagtgaggccttcttttacacctgctttaccagcagcacctccagtagctaatagcagtctcccatgtggccaagattctactataacccatggacacagttatccgggatcaacccaatcgctcattcagttgtattctgatataatcccagaggaaaaagggaaaaagaaaagaacaagaaagaagaaaagagatgatgatgcagaatccaccaaggctccatcaactccccattcagatataactgccccaccgactccaggcatctcagaaactacctctactcctgcagtgagcacacccagtgagcttcctcaacaagccgaccaagagtcggtggaaccagtcggcccatccactcccaatatggcagcaggccagctatgtacagaattagagaacaaactgcccaatagtgatttctcacaagcaactccaaatcaacagacgtatgcaaattcagaagtagacaagctctccatggaaacccctgccaaaacagaagagataaaactggaaaaggctgagacagagtcctgcccaggccaagaggagcctaaattggaggaacagaatggtagtaaggtagaaggaaacgctgtagcctgtcctgtctcctcagcacagagtcctccccattctgctggggcccctgctgccaaaggagactcagggaatgaacttctgaaacacttgttgaaaaataaaaagtcatcttctcttttgaatcaaaaacctgagggcagtatttgttcagaagatgactgtacaaaggataataaactagttgagaagcagaacccagctgaaggactgcaaactttgggggctcaaatgcaaggtggttttggatgtggcaaccagttgccaaaaacagatggaggaagtgaaaccaagaaacagcgaagcaaacggactcagaggacgggtgagaaagcagcacctcgctcaaagaaaaggaaaaaggacgaagaggagaaacaagctatgtactctagcactgacacgtttacccacttgaaacagcagctctctctgctccctctaatggaaccaatcattggagtgaactttgcgcactttcttccttatggcagtggccaatttaatagtgggaatcgacttctaggaacttttggcagtgctaccctggaaggggtttcggactactattctcagttgatctacaagaagatggccaatggttttgcaacaactgaagaacttgctggaaaagccggagtgttagtgagccatgaagttaccaaaactctaggacctaaaccatttcagctgcccttcagaccccaggacgacttgttggcccgagctcttgctcagggccccaagacagttgatgtgccagcctccctcccaacaccacctcataacaatcaggaagaattaaggatacaggatcactgtggtgatcgagatactcctgacagttttgttccctcatcctctcctgagagtgtggttggggtagaagtgagcaggtatccagatctgtcattggtcaaggaggagcctccagaaccggtgccgtcccccatcattccaattcttcctagcactgctgggaaaagttcagaatcaagaaggaatgacatcaaaactgagccaggcactttatattttgcgtcaccttttggtccttccccaaatggtcccagatcaggtcttatatctgtagcaattactctgcatcctacagctgctgagaacattagcagtgttgtggctgcattttccgaccttcttcacgtccgaatccctaacagctatgaggttagcagtgctccagatgtcccatccatgggtttggtcagtagccacagaatcaacccgggtttggagtatcgacagcatttacttctccgtgggcctccgccaggatctgcaaaccctcccagattagtgagctcttaccggctgaagcagcctaatgtaccatttcctccaacaagcaatggtctttctggatataaggattctagtcatggtattgcagaaagcgcagcactcagaccacagtggtgttgtcattgtaaagtggttattcttggaagtggtgtgcggaaatctttcaaagatctgacccttttgaacaaggattcccgagaaagcaccaagagggtagagaaggacattgtcttctgtagtaataactgctttattctttattcatcaactgcacaagcgaaaaactcagaaaacaaggaatccattccttcattgccacaatcacctatgagagaaacgccttccaaagcatttcatcagtacagcaacaacatctccactttggatgtgcactgtctcccccagctcccagagaaagcttctccccctgcctcaccacccatcgccttccctcctgcttttgaagcagcccaagtcgaggccaagccagatgagctgaaggtgacagtcaagctgaagcctcggctaagagctgtccatggtgggtttgaagattgcaggccgctcaataaaaaatggagaggaatgaaatggaagaagtggagcattcatattgtaatccctaaggggacatttaaaccaccttgtgaggatgaaatagatgaatttctaaagaaattgggcacttcccttaaacctgatcctgtgcccaaagactatcggaaatgttgcttttgtcatgaagaaggtgatggattgacagatggaccagcaaggctactcaaccttgacttggatctgtgggtccacttgaactgcgctctgtggtccacggaggtctatgagactcaggctggtgccttaataaatgtggagctagctctgaggagaggcctacaaatgaaatgtgtcttctgtcacaagacgggtgccactagtggatgccacagatttcgatgcaccaacatttatcacttcacttgcgccattaaagcacaatgcatgttttttaaggacaaaactatgctttgccccatgcacaaaccaaagggaattcatgagcaagaattaagttactttgcagtcttcaggagggtctatgttcagcgtgatgaggtgcgacagattgctagcatcgtgcaacgaggagaacgggaccatacctttcgcgtgggtagcctcatcttccacacaattggtcagctgcttccacagcagatgcaagcattccattctcctaaagcactcttccctgtgggctatgaagccagccggctgtactggagcactcgctatgccaataggcgctgccgctacctgtgctccattgaggagaaggatgggcgcccagtgtttgtcatcaggattgtggaacaaggccatgaagacctggttctaagtgacatctcacctaaaggtgtctgggataagattttggagcctgtggcatgtgtgagaaaaaagtctgaaatgctccagcttttcccagcgtatttaaaaggagaggatctgtttggcctgaccgtctctgcagtggcacgcatagcggaatcacttcctggggttgaggcatgtgaaaattataccttccgatacggccgaaatcctctcatggaacttcctcttgccgttaaccccacaggttgtgcccgttctgaacctaaaatgagtgcccatgtcaagaggcctcacaccttaaacagcaccagcacctcaaagtcatttcagagcacagtcactggagaactgaacgcaccttatagtaaacagtttgttcactccaagtcatcgcagtaccggaagatgaaaactgaatggaaatccaatgtgtatctggcacggtctcggattcaggggctgggcctgtatgctgctcgagacattgagaaacacaccatggtcattgagtacatcgggactatcattcgaaacgaagtagccaacaggaaagagaagctttatgagtctcagaaccgtggtgtgtacatgttccgcatggataacgaccatgtgattgacgcgacgctcacaggagggcccgcaaggtatatcaaccattcgtgtgcacctaattgtgtggctgaagtggtgacttttgagagaggacacaaaattatcatcagctccagtcggagaatccagaaaggagaagagctctgctatgactataagtttgactttgaagatgaccagcacaagattccgtgtcactgtggagctgtgaactgccggaagtggatgaactgaaatgcattccttgctagctcagcgggcggcttgtccctaggaagaggcgattcaacacaccattggaattttgcagacagaaagagatttttgttttctgttttatgactttttgaaaaagcttctgggagttctgatttcctcagtcctttaggttaaagcagcgccaggaggaagctgacagaagcagcgttcctgaagtggccgaggttaaacggaatcacagaatggtccagcacttttgcttttttttcttttccttttcttttttttttgtttgttttttgttttgtttttcccttgtgggtgggtttcattgttttggttttctagtctcactaaggagaaacttttactggggcaaagagccgatggctgccctgccccgggcaggggccttcctatgaatgtaagactgaaatcaccagcgagggggacagagagtgctggccacggccttattaaaaaggggcaggccctctaacttcaaaatgtttttaaataaagtagacaccactgaacaaggaatgtactgaaatgacttccttagggatagagctaagggataataacttgcactaaatacatttaaatacttgattccatgagtcagtttattgtagtttttgatttctgtaaaataagagaaacttttgtatttattattgaataagtgaatgaagctatttttaaataaagttagaagaaagccaagctgctgctgttacctgcagaactaacaaaccctgttactttgtacagatatgtaaatattttgagaaaaaatacagtataaaaatagttattgaccaaatgctaccaggctctgcagcagctcgggggcttataaaatgttcatagggatgttacaatataattttgtgttataaaatatgccattataattatgtaataaccaaaatttcaacctagagtgttgggggttttttggaaaccgcagtctattagtactcaatggttttatacaccttacttctgacagagcggggcgtatgctacgactacaacttttatagctgttttggtaatttaaactaattttttcatattatattgttgcatccctacttcttcagtcaggtttttttgtgcttacaatttgtgataactgtgaataactgcttaaaaatacacccaaatggaggctgaattttttcttcagcaaaagtagttttgattagaactttgtttcagccacagagaatcatgtaaacgtaataggatcatgtagcagaaacttaaatctaaccctttagccttctatttaacacaaaaatt

SEQ ID NO: 290096 - DNA, 4575 bp, Artificial Sequence
  derived and/or modified sequence
ctgatgcaggaggtggaccggcagcgggccctgcagcagcggatggagatggaacaacatggcatggtcggaagcgagataagtagctcacggacgagtgttagccaaatacccttctactcctccgatctgccctgtgactttatgcagcccctcggtccccttcagcagagcccacaacaccagcagcagatgggccaggtcctgcaacagcagaatattcagcaggggtctatcaacagtccttctacccagacatttatgcagactaatgaaaggcgccaggttggaccaccttcttttgtgcctgactccccatcaatcccagtgggaagtccaaacttctcgagtgtgaagcaggggcatggaaacctctctgggacctccttccaacagtctccagttcggccgagctttacacccgctctgcctgccgcacctcctgtcgccaacagttcgctgccgtgcggccaggacagtacaatcacccatgggcactcctaccctggctccacccagagcttaatccagctgtatagtgatattattcccgaggagaaaggaaagaaaaagcgtacccgcaagaaaaagagggacgacgacgccgagagcacgaaggctcctagcacccctcattcggatatcacagctccacctacccccggcatctcagaaaccacaagtacccctgctgtaagtaccccttccgaactccctcagcaagcagatcaggaatccgtggaaccggtagggccaagtaccccgaacatggctgcaggacagctgtgcaccgaactcgaaaataagctgcccaactctgacttctctcaggcaacaccgaaccagcagacctacgctaattccgaggtggataaactttcaatggagacaccagcaaagaccgaggagataaaactggagaaggctgaaactgagtcgtgtcccggtcaagaagagcccaagctggaggaacaaaatgggagcaaggttgaagggaatgccgtcgcctgccccgtgtcttccgctcagtccccgccccacagtgcaggggcccccgctgcgaagggagattctggcaacgagcttctgaagcaccttcttaaaaacaaaaagtcctcatctctactgaatcagaaacccgaggggagcatctgtagtgaggacgactgtacaaaagataataaactcgttgaaaagcaaaaccctgcagagggcctgcagactctgggggcgcaaatgcagggcggattcggctgtgggaaccaacttcctaagacggacggaggctccgagactaaaaagcagagatcaaagcgcacacagcggaccggagagaaggccgcccccagatctaagaagcgcaagaaggacgaggaggagaaacaggcaatgtattccagcaccgacacattcactcacctaaagcaacagctgagcttactgcccctgatggagccgataatcggcgtgaatttcgctcatttcctcccatacggctctgggcaatttaactccggcaatagattgctgggaacattcggctctgccacattagaaggcgtgtccgactactacagccagttaatctacaagaaaatggccaatgggtttgcaactactgaggagctggccgggaaagctggtgtgctagtatctcacgaggtgacaaaaactctgggcccaaagccctttcagctgccattcaggccccaggacgacttgcttgctcgggcgcttgcccagggtcccaagaccgtggacgtgcctgcaagcctcccgacgcccccacacaataaccaagaggagttacggatccaggatcactgcggcgaccgggatacccctgacagttttgtaccatcatcctcgcctgagtcggtcgtaggcgttgaggtttcaagatatcccgacttaagtctggtcaaagaggaaccgcccgagcctgtgcctagtcccattattcccatcttaccaagtacagccggcaaaagtagcgagagccgcagaaatgatatcaaaacagaaccgggcaccctctactttgcctccccatttgggcccagccctaacggaccaagatccgggctgatttctgtggccatcacacttcatccgacagccgcagagaacatttccagcgtagtagcagccttcagcgatctcttgcatgtgaggattcctaatagctatgaagtatcatccgctccagacgtgccttccatgggcctcgtttctagtcaccggattaaccctggactggaatataggcagcatctgctgttgcgggggccccctccaggtagcgcgaacccaccacgactggtctcttcatatcgacttaaacagccaaacgtgccatttccgcctacaagtaacggtctatcggggtacaaggattcgtcccacggcatcgccgagagcgccgctctgagacctcagtggtgctgccattgtaaggtggtcattttgggcagcggcgtcagaaaatctttcaaggacttgacactgctgaataaggactctcgagaatccacgaaaagagtggagaaggatatcgtgttctgtagtaataattgcttcatcttatactcatcaacggcacaagccaagaattctgaaaacaaagagagtatcccgagtcttcctcagagtccgatgagagaaaccccaagtaaagctttccaccagtactctaacaatattagtacactagacgtacactgcctccctcaactgcctgaaaaggcctcacctcctgcttccccccccatcgccttcccacctgcttttgaggcggcccaggttgaggcaaaacccgacgagcttaaagtcactgtcaaactcaaacctcggctgcgggccgtccatggtggctttgaagactgccgacccctgaataagaaatggcgaggcatgaagtggaaaaaatggtccatccacatcgtgatcccaaagggcacattcaagccaccctgcgaagacgaaattgatgaattcctaaaaaagctgggaacatctctaaagcccgaccctgtgcctaaagattaccggaaatgctgtttctgccacgaagagggggacggactgacagatggcccggctcgtctgctgaatctagacttggatctttgggtccatctcaactgcgctttatggagtacagaagtgtatgaaacacaggcaggcgccctcatcaacgtcgagttggccctgagacgcggtctgcagatgaaatgcgttttttgtcataagacaggcgcaaccagcggttgtcaccgttttcgctgcactaacatttatcattttacatgtgccatcaaggcccaatgcatgttctttaaagacaagactatgctgtgccctatgcataagccaaaaggaattcacgaacaagagctcagctactttgcagtgttcagaagggtgtatgtgcagagagacgaagttcgccagatcgcgtccattgttcagcgtggcgagcgggatcatactttccgggtggggtcactcatctttcataccatcgggcagctgttgcctcagcagatgcaggctttccatagccccaaggccctgtttcctgtgggatacgaggccagcaggctgtattggtcaacacggtacgctaataggaggtgcagatatttgtgtagcatagaagaaaaggacgggcgtcccgtgttcgtgatccgaatcgtggagcaggggcacgaagatctggtgctctctgatatctcacctaagggggtttgggataagattcttgagcctgttgcttgtgtaagaaaaaagtccgagatgctccagctattcccagcttacctcaaaggcgaggatttgttcgggttaacggttagtgccgttgctagaatcgccgaatctctgccgggagttgaggcttgtgaaaactacaccttccgttatgggcgaaatcccctaatggagctccctttagctgtcaaccctacagggtgcgcaaggagtgagcccaagatgtccgcccacgtgaagcggcctcacactcttaattctacgtcaacctcaaaatcttttcagagcaccgtgaccggggaattgaacgccccttatagcaagcagttcgttcactcgaagagtagccagtatcggaagatgaagaccgagtggaaaagcaacgtgtacctggccagatcccgcatacaggggctgggactgtatgcagctcgggacattgagaaacatacaatggtgattgaatatatcggaacaatcatccgcaacgaggttgccaaccgcaaagaaaagctgtacgagtcccagaataggggagtgtacatgttccggatggacaatgatcacgttatagatgccacacttacagggggccccgctcgctacattaatcacagttgtgctcccaattgcgtggcagaggtggtgactttcgagagaggccacaaaatcatcatttctagctctcgcagaatccagaaaggagaagagttgtgctacgactacaagtttgatttcgaggacgatcagcacaaaatcccttgtcactgtggagccgtcaactgcagaaaatggatgaattag

SEQ ID NO: 290097 - DNA, 4575 bp, Artificial Sequence
  derived and/or modified sequence
ctaatgcaggaggtcgaccgacagcgggctctccagcagcggatggagatggaacagcacggaatggtggggagcgagatctcaagctcccggacatctgtcagtcagatccctttttactccagcgacctgccgtgtgacttcatgcaaccactggggcctttacagcagtcccctcagcatcagcagcagatgggacaagtgttgcagcaacagaacatccagcaagggtcaatcaacagtcccagcactcaaacattcatgcagactaacgagagacggcaggtgggtcctccttctttcgtgcccgactcacctagtattccagtcggcagccccaactttagttcagtgaagcaaggccatgggaatctgtctggaactagcttccagcaaagcccagtccggccttcattcacacccgcactgcccgcagcccctccagtggccaactcatctttgccctgcggacaagattccacaatcactcacggacattcctacccaggatcaacccagtcattgattcagctgtacagcgatattatacccgaagaaaaaggcaagaaaaaacggaccagaaagaagaaacgagacgatgatgctgagagcactaaagcgccatctaccccacacagcgatattacagcaccaccaacccctggaataagcgagactacttccacaccggcagtgtctacgccctccgagctgccgcagcaggccgatcaggaaagcgtggagcccgtgggtcccagtacgccaaacatggctgccggtcagctttgcacagagctcgagaataaactccctaacagtgacttctctcaagcaacccctaatcaacagacctacgccaactcagaagtggataagctgagtatggagacccccgcaaaaaccgaagaaattaaactcgagaaagcagagactgagtcctgtcctgggcaggaagagcccaaactggaagaacagaatggttctaaggtggaagggaacgcggtagcgtgccctgtatccagcgcccagagcccgccacactcagctggggctccagccgctaagggagactccggtaacgaattgctcaaacacctacttaagaacaaaaaatcctcctcactactgaaccagaaaccagaaggatcgatctgttccgaggatgattgcaccaaagacaacaagctggtggaaaagcagaatcccgctgagggacttcagactttaggagctcagatgcagggcggtttcgggtgcgggaatcagctgccaaaaaccgatggcggaagtgaaactaagaaacagagaagtaaaagaacgcagcggactggcgagaaggccgctcctcgaagtaagaaacgcaagaaagacgaggaagaaaaacaagctatgtactcaagcacggacactttcacgcacctgaagcaacaactgtctttactcccactcatggaacctattattggtgttaattttgcccactttcttccctatggaagcggccagttcaatagcggcaaccgcctgctggggaccttcggttcagctaccctggagggggtatccgactactacagccagctgatctataagaagatggccaacgggttcgcgaccacagaagagcttgcaggcaaggccggagtgcttgtcagtcacgaggtgactaaaacactcggcccaaaacctttccagctcccgttcaggccccaagatgacctcctggcacgagccctagcgcagggtcccaaaaccgttgacgtgcccgcatcccttccgacaccgccacacaataatcaggaagagttacgcatccaggatcactgtggagatagagacacaccagacagcttcgtgccttcatctagtcctgagtcagttgtaggcgttgaagtgtctaggtatcccgatttgagcctggtgaaagaggagccgccagagcctgtacccagtccaattatccccatcctccccagcacagcgggtaagtccagcgagagccggagaaatgacattaaaactgagccagggactttgtatttcgcaagtccctttgggcctagccccaacggacccaggtcaggattaatcagcgtcgcgatcaccctgcaccccaccgccgcagagaatatttcttctgtggtcgccgcattctctgatttgctccacgtgagaatcccgaacagctacgaggtgagttcagcccctgacgtaccctcgatgggactcgtgagttcacaccgcatcaacccaggcctggaatatcgtcaacatttactgcttcggggtcctccccctgggtccgctaatccgccaagattggtctccagctatcgcctgaagcagccaaacgtgccctttcctcctacttcaaacggactttccggctacaaagatagctctcatggcattgctgagagcgccgcactccggccacagtggtgttgccactgcaaggtcgtgatactggggtccggtgttaggaagtccttcaaggaccttaccttacttaataaagattccagggaaagtaccaaaagagtggaaaaggatatcgttttctgctcaaacaattgctttatcctgtattcctcgacagcccaggccaagaatagcgagaacaaggagagcattccatctctcccacagtccccaatgcgggagacccccagtaaagcattccaccaatacagcaacaacatctctacactggacgtgcactgccttccccaactgcctgaaaaggcttccccacccgcaagcccacctattgcctttcccccagcctttgaggcagctcaggtcgaagccaaacctgatgaactcaaagtgacagttaagctgaaaccccgtctcagggctgtccatggaggcttcgaggattgccgccctcttaataaaaagtggcgaggaatgaagtggaagaaatggtcgatccatattgtcatacctaagggaacctttaaacccccttgcgaggatgagatagacgaattcctcaagaagcttggcacttccctcaagccagaccctgtccctaaggactaccggaagtgctgtttctgccacgaagaaggtgatggcttgactgatggccctgctcgcctgcttaacttggaccttgacttgtgggtccaccttaactgcgcactctggagcactgaggtttatgaaacccaggctggagcgctgatcaatgtcgagctggcactcaggcggggactccagatgaaatgtgtattctgccacaaaactggcgcaacgagcggttgtcacagatttagatgcacaaacatctaccatttcacgtgcgcaattaaggcccaatgcatgttcttcaaggacaagacgatgctgtgcccgatgcacaaacccaaagggattcacgaacaagagctatcatacttcgcagttttcagacgtgtatacgtacagagggatgaagtgcggcagatcgcttcgattgtgcaaagaggagagagggaccacacattcagggttggctcccttattttccatactatagggcagctcttaccacagcagatgcaggcttttcacagccccaaggccttattccctgttggctatgaggcttcccggctttattggagcacccgttatgcgaaccggagatgcaggtacttgtgctcgatcgaggagaaggacggcagacccgtctttgtgattagaatcgtcgagcaaggccatgaggacctcgtactgtctgatatttctccgaaaggagtgtgggacaaaattctggagcccgttgcctgcgtgcgcaagaagtcagaaatgctccagttatttcccgcatatctgaaaggggaggatctctttgggctgaccgttagcgctgtggccagaattgcagagtcactgcctggggttgaggcctgtgagaattacaccttcagatacgggaggaacccccttatggaactgccattagcagtgaatccaaccggatgtgccaggtcggaacccaagatgagtgcccacgtgaaaagaccacacacgctgaacagcacaagtacaagtaagtcattccagtctaccgtcacaggagaattgaatgcgccttacagtaagcagttcgttcactccaaatcatcacagtatcggaagatgaagactgaatggaagtcaaatgtttacctcgcgcgttcccggatccaagggctgggtctgtacgctgcgagggatatagaaaaacacaccatggtgattgagtatatagggaccattattaggaacgaggtggccaaccgaaaagaaaaattatatgagtctcaaaataggggcgtttacatgtttcgaatggacaacgatcacgtgattgacgccactctgactgggggaccagccagatacatcaatcattcttgcgctcctaattgcgtggccgaagtcgtcaccttcgagcggggacataaaatcataataagctcgtcacggaggatacagaagggagaggaactgtgctacgactataagttcgacttcgaggatgaccagcacaaaattccctgccactgtggagctgtcaattgccgaaagtggatgaactag

SEQ ID NO: 290098 - DNA, 4575 bp, Artificial Sequence
  derived and/or modified sequence
ctgatgcaggaggtggacagacagagagccctgcagcagagaatggagatggagcagcacggcatggtgggcagcgagatcagcagcagcagaaccagcgtgagccagatccccttctacagcagcgacctgccctgcgacttcatgcagcccctgggccccctgcagcagagcccccagcaccagcagcagatgggccaggtgctgcagcagcagaacatccagcagggcagcatcaacagccccagcacccagaccttcatgcagaccaacgagagaagacaggtgggcccccccagcttcgtgcccgacagccccagcatccccgtgggcagccccaacttcagcagcgtgaagcagggccacggcaacctgagcggcaccagcttccagcagagccccgtgagacccagcttcacccccgccctgcccgccgccccccccgtggccaacagcagcctgccctgcggccaggacagcaccatcacccacggccacagctaccccggcagcacccagagcctgatccagctgtacagcgacatcatccccgaggagaagggcaagaagaagagaaccagaaagaagaagagagacgacgacgccgagagcaccaaggcccccagcaccccccacagcgacatcaccgccccccccacccccggcatcagcgagaccaccagcacccccgccgtgagcacccccagcgagctgccccagcaggccgaccaggagagcgtggagcccgtgggccccagcacccccaacatggccgccggccagctgtgcaccgagctggagaacaagctgcccaacagcgacttcagccaggccacccccaaccagcagacctacgccaacagcgaggtggacaagctgagcatggagacccccgccaagaccgaggagatcaagctggagaaggccgagaccgagagctgccccggccaggaggagcccaagctggaggagcagaacggcagcaaggtggagggcaacgccgtggcctgccccgtgagcagcgcccagagccccccccacagcgccggcgcccccgccgccaagggcgacagcggcaacgagctgctgaagcacctgctgaagaacaagaagagcagcagcctgctgaaccagaagcccgagggcagcatctgcagcgaggacgactgcaccaaggacaacaagctggtggagaagcagaaccccgccgagggcctgcagaccctgggcgcccagatgcagggcggcttcggctgcggcaaccagctgcccaagaccgacggcggcagcgagaccaagaagcagagaagcaagagaacccagagaaccggcgagaaggccgcccccagaagcaagaagagaaagaaggacgaggaggagaagcaggccatgtacagcagcaccgacaccttcacccacctgaagcagcagctgagcctgctgcccctgatggagcccatcatcggcgtgaacttcgcccacttcctgccctacggcagcggccagttcaacagcggcaacagactgctgggcaccttcggcagcgccaccctggagggcgtgagcgactactacagccagctgatctacaagaagatggccaacggcttcgccaccaccgaggagctggccggcaaggccggcgtgctggtgagccacgaggtgaccaagaccctgggccccaagcccttccagctgcccttcagaccccaggacgacctgctggccagagccctggcccagggccccaagaccgtggacgtgcccgccagcctgcccacccccccccacaacaaccaggaggagctgagaatccaggaccactgcggcgacagagacacccccgacagcttcgtgcccagcagcagccccgagagcgtggtgggcgtggaggtgagcagataccccgacctgagcctggtgaaggaggagccccccgagcccgtgcccagccccatcatccccatcctgcccagcaccgccggcaagagcagcgagagcagaagaaacgacatcaagaccgagcccggcaccctgtacttcgccagccccttcggccccagccccaacggccccagaagcggcctgatcagcgtggccatcaccctgcaccccaccgccgccgagaacatcagcagcgtggtggccgccttcagcgacctgctgcacgtgagaatccccaacagctacgaggtgagcagcgcccccgacgtgcccagcatgggcctggtgagcagccacagaatcaaccccggcctggagtacagacagcacctgctgctgagaggccccccccccggcagcgccaacccccccagactggtgagcagctacagactgaagcagcccaacgtgcccttcccccccaccagcaacggcctgagcggctacaaggacagcagccacggcatcgccgagagcgccgccctgagaccccagtggtgctgccactgcaaggtggtgatcctgggcagcggcgtgagaaagagcttcaaggacctgaccctgctgaacaaggacagcagagagagcaccaagagagtggagaaggacatcgtgttctgcagcaacaactgcttcatcctgtacagcagcaccgcccaggccaagaacagcgagaacaaggagagcatccccagcctgccccagagccccatgagagagacccccagcaaggccttccaccagtacagcaacaacatcagcaccctggacgtgcactgcctgccccagctgcccgagaaggccagcccccccgccagcccccccatcgccttcccccccgccttcgaggccgcccaggtggaggccaagcccgacgagctgaaggtgaccgtgaagctgaagcccagactgagagccgtgcacggcggcttcgaggactgcagacccctgaacaagaagtggagaggcatgaagtggaagaagtggagcatccacatcgtgatccccaagggcaccttcaagcccccctgcgaggacgagatcgacgagttcctgaagaagctgggcaccagcctgaagcccgaccccgtgcccaaggactacagaaagtgctgcttctgccacgaggagggcgacggcctgaccgacggccccgccagactgctgaacctggacctggacctgtgggtgcacctgaactgcgccctgtggagcaccgaggtgtacgagacccaggccggcgccctgatcaacgtggagctggccctgagaagaggcctgcagatgaagtgcgtgttctgccacaagaccggcgccaccagcggctgccacagattcagatgcaccaacatctaccacttcacctgcgccatcaaggcccagtgcatgttcttcaaggacaagaccatgctgtgccccatgcacaagcccaagggcatccacgagcaggagctgagctacttcgccgtgttcagaagagtgtacgtgcagagagacgaggtgagacagatcgccagcatcgtgcagagaggcgagagagaccacaccttcagagtgggcagcctgatcttccacaccatcggccagctgctgccccagcagatgcaggccttccacagccccaaggccctgttccccgtgggctacgaggccagcagactgtactggagcaccagatacgccaacagaagatgcagatacctgtgcagcatcgaggagaaggacggcagacccgtgttcgtgatcagaatcgtggagcagggccacgaggacctggtgctgagcgacatcagccccaagggcgtgtgggacaagatcctggagcccgtggcctgcgtgagaaagaagagcgagatgctgcagctgttccccgcctacctgaagggcgaggacctgttcggcctgaccgtgagcgccgtggccagaatcgccgagagcctgcccggcgtggaggcctgcgagaactacaccttcagatacggcagaaaccccctgatggagctgcccctggccgtgaaccccaccggctgcgccagaagcgagcccaagatgagcgcccacgtgaagagaccccacaccctgaacagcaccagcaccagcaagagcttccagagcaccgtgaccggcgagctgaacgccccctacagcaagcagttcgtgcacagcaagagcagccagtacagaaagatgaagaccgagtggaagagcaacgtgtacctggccagaagcagaatccagggcctgggcctgtacgccgccagagacatcgagaagcacaccatggtgatcgagtacatcggcaccatcatcagaaacgaggtggccaacagaaaggagaagctgtacgagagccagaacagaggcgtgtacatgttcagaatggacaacgaccacgtgatcgacgccaccctgaccggcggccccgccagatacatcaaccacagctgcgcccccaactgcgtggccgaggtggtgaccttcgagagaggccacaagatcatcatcagcagcagcagaagaatccagaagggcgaggagctgtgctacgactacaagttcgacttcgaggacgaccagcacaagatcccctgccactgcggcgccgtgaactgcagaaagtggatgaactag

SEQ ID NO: 290099 - protein, 446 aa, Artificial Sequence
  derived and/or modified sequence
MEAGAGAGAGAAGWSCPGPGPTVTTLGSYEASEGCERKKGQRWGSLERRGMQAMEGEVLLPALYEEEEEEEEEEEEVEEEEEQVQKGGSVGSLSVNKHRGLSLTETELEELRAQVLQLVAELEETRELAGQHEDDSLELQGLLEDERLASAQQAEVFTKQIQQLQGELRSLREEISLLEHEKESELKEIEQELHLAQAEIQSLRQAAEDSATEHESDIASLQEDLCRMQNELEDMERIRGDYEMEIASLRAEMEMKSSEPSGSLGLSDYSGLQEELQELRERYHFLNEEYRALQESNSSLTGQLADLESERTQRATERWLQSQTLSMTSAESQTSEMDFLEPDPEMQLLRQQLRDAEEQMHGMKNKCQELCCELEELQHHRQVSEEEQRRLQRELKCAQNEVLRFQTSHSVTQSSPTPNPPIFSLPLVGLVVISALLWCWWAETSS

SEQ ID NO: 290100 - DNA, 1341 bp, Artificial Sequence
  derived and/or modified sequence
atggaggctggtgcaggcgccggcgctggggctgccggctggtcttgtcctgggcctgggcccacggtgacaacacttggatcctacgaagcctccgaaggctgtgaaaggaagaaggggcagaggtggggctccctagagcgtagaggcatgcaggccatggaaggcgaggtactgctgccagctctgtacgaggaggaagaggaggaggaagaggaagaagaggaggttgaggaagaagaggagcaggtgcagaaaggggggtctgttggatcactgagcgtgaataagcatcgaggattgtctctgaccgagaccgaacttgaagagctcagagctcaagttcttcagcttgtagctgaacttgaggagacccgagagctagccggacagcacgaggacgattctctcgagttgcagggtctcttagaggacgagcgcttggctagcgcccagcaggcagaggtttttactaaacaaatccagcagctgcagggagaactgaggtctctgagggaagaaatcagccttctggagcatgagaaagaatctgaattgaaggaaattgagcaggagctgcacctggcacaggccgagatccaaagcttacgacaggctgctgaggactcagccactgaacacgagtccgatatcgcgtccctccaggaggacctgtgcagaatgcaaaatgaactcgaggacatggagcggatccggggtgactacgaaatggagatagccagtttgagagccgagatggaaatgaagtccagtgagccaagcggaagcttgggcttgagtgactactccggcctgcaggaggaactccaggaacttagggagaggtaccactttctgaatgaagaatatagggcattgcaggagagcaactcttcactgacaggccagctcgctgacctggagtcagagaggacgcagcgagccacagagcgatggctgcagtctcagacactgagcatgacatcagccgagagccagacatcggagatggatttcctggagcccgaccctgaaatgcagctactacggcaacaattgcgagatgccgaagagcagatgcatgggatgaagaacaagtgtcaagagctgtgttgcgagctggaggagctccagcatcacaggcaggtgtcagaagaggaacagcgacgcctccagagggaactgaagtgcgcccagaacgaagtcttacgttttcaaacctctcattctgtgacgcagagctctccaactcctaacccccctattttctccctcccactggtgggcctggtggtgatttccgccctgttgtggtgttggtgggccgaaactagctcttag

SEQ ID NO: 290101 - DNA, 1341 bp, Artificial Sequence
  derived and/or modified sequence
atggaggccggggccggggccggggccggggccgccggctggagctgccccggccctggccccaccgtgaccaccctgggcagctatgaggccagcgagggctgtgagaggaagaagggccagcgctggggcagcctggagcggcggggcatgcaggccatggagggggaggtgctgctgcctgccctgtatgaggaggaggaggaggaggaggaggaggaggaggaggtggaggaggaggaggagcaggtgcagaagggcggctctgtgggcagcctgtctgtgaacaagcaccggggcctgagcctgacagaaacagagctggaggagctgcgggcccaggtgctgcagctggtggccgagctggaggagacccgggagctggccggccagcatgaagatgacagcctggagctgcagggcctgctggaggatgagcggctggccagcgcccagcaggccgaggtgttcaccaagcagatccagcagctgcagggcgagctgcggagcctgcgggaggagatcagcctgctggagcacgagaaggagagcgagctgaaggagattgagcaggagctgcacctggcccaggccgagatccagagcctgcggcaggccgctgaggacagcgccacagagcacgagagtgacatcgccagcctgcaggaggacctgtgcaggatgcagaatgagctggaggacatggagcgcatccggggggactatgagatggagatcgccagcctgcgggcagagatggagatgaagagcagcgagcccagcggcagcctgggcctgagtgactacagcggcctgcaggaggagctgcaggagctgcgggagcgctaccacttcctgaatgaggagtaccgggccctgcaggagagcaacagcagcctgaccggccagctggccgacctggagagcgagaggacccagagggccacagagcgctggctgcagagccagaccctgtccatgaccagcgctgagagccagaccagcgagatggacttcctggagccagaccctgagatgcagctgctgcggcagcagctgagagatgctgaggagcagatgcacggcatgaagaacaagtgccaggagctgtgctgtgagctggaggagctgcagcaccaccggcaggtgtctgaggaggagcagaggcggctgcagcgggagctgaagtgtgcccagaatgaggtgctgcgcttccagaccagccacagcgtgacccagagcagccccacccccaacccccccatcttcagcctgcccctggtgggcctggtggtgatcagcgccctgctgtggtgctggtgggccgagaccagcagctag

SEQ ID NO: 290102 - DNA, 1341 bp, Artificial Sequence
  derived and/or modified sequence
atggaggccggcgccggcgccggcgccggcgccgccggctggagctgtcctggccctggccccaccgtcaccaccctcggaagctacgaggccagcgaggggtgtgagcgaaagaagggccaacgatgggggagtctggaacggagggggatgcaagctatggaaggcgaagtcttgcttcctgccctgtatgaagaagaggaggaagaggaagaagaagaggaagaggtcgaagaggaagaagaacaggtccaaaagggaggttcagtcggctccttatccgttaacaaacacagagggctgtccctgacggaaactgaactggaagaactgcgggcccaagtgttgcagctcgtcgccgaactcgaggagacgcgcgaactggcaggacagcatgaagacgactcactagaactgcagggtttgcttgaggacgagcggctagccagcgctcagcaggcagaggtatttaccaaacagatacagcagcttcagggcgagttaaggtctctccgcgaggagatctccttgcttgaacacgaaaaggaaagcgagttgaaagagatcgaacaggagctccatctggcacaggctgaaatccagtctctgcgtcaggctgccgaggattctgcaacagagcatgaatccgacattgcctctctgcaggaggacctgtgtaggatgcaaaacgagctggaagatatggagagaatcaggggcgactacgagatggaaatcgcatccttacgggctgagatggaaatgaaatctagcgaaccttctggttctctagggctctccgattactctggattgcaggaggagctgcaggagctcagggaacgctatcattttttaaacgaagagtacagggcacttcaggagtccaatagcagcttgacagggcagctcgccgatctggagagcgagcggacacaaagagcaaccgagcggtggttacagagccaaacactctctatgacttccgccgagtcccagacttccgaaatggatttcctggagcccgatcccgagatgcagctcctgaggcagcagctgcgcgatgccgaggaacagatgcacggaatgaaaaataagtgtcaggagttatgttgcgagctggaggagctgcagcaccatagacaagttagtgaagaagagcaacggcggctgcagagagaattaaagtgcgctcagaatgaagtactccgattccagaccagccactcagtaactcagagttcacccacccccaaccctccgatctttagcctgcccttggtggggctggtggttatctccgcacttctgtggtgctggtgggcagaaacatctagttag

SEQ ID NO: 290103 - DNA, 1341 bp, Artificial Sequence
  derived and/or modified sequence
atggaggccggagctggcgcaggagcaggagctgctggttggtcttgtcccggtcccggacctacagtgaccacactgggcagttatgaggcctccgaagggtgtgagcggaaaaaagggcaaagatgggggtctcttgagcgccgaggcatgcaggcaatggagggggaggtgctgctgccagcgctctatgaagaggaagaggaagaagaagaggaggaagaggaagtggaagaggaagaggagcaggttcagaaagggggttctgtgggctctttgtccgtcaacaagcaccgtgggctttctctgacagaaaccgagttagaggaactgagagcacaggtcttgcagctcgtggccgaacttgaagaaactagggagttagctggccagcacgaggacgattccctcgagctccagggactgttggaagatgaacgtctcgcctctgcacagcaggccgaagtgtttactaagcagatccagcaactgcaaggcgagctgcgatccctacgtgaggagattagtttactggagcacgaaaaagaatctgagcttaaggagatcgaacaggagctacacctggcgcaagccgaaatccaatccctgcggcaggccgcagaggattccgctactgagcatgagtcagatatcgcctcacttcaggaggacctctgccgaatgcagaacgaactcgaggacatggagaggattcgtggcgattacgagatggaaattgcgagcctgagggcagaaatggagatgaagtccagtgaacccagtgggagtttaggcctttcagactactccgggctacaggaagagctgcaggagctgagagaaaggtaccacttccttaatgaggagtacagagctttacaggagtctaactctagcctcactggtcagttagcggatctcgaaagtgagagaacccaacgtgccacagagcgttggttgcagtcgcagactctttctatgacatccgctgaatcacagacaagcgaaatggacttcctggagcccgaccctgaaatgcagctgctgagacagcagctgagggacgctgaggagcagatgcacggcatgaagaataaatgccaagagctatgctgcgagttagaggagctccagcatcatcggcaggtcagtgaagaggagcaaaggcgtctacagcgggaacttaagtgtgcccagaacgaagtgcttagatttcagacgtcgcacagcgtcacgcagtctagccccactcccaacccccctatttttagcctccctctggttgggttggtggtaatttctgccctactctggtgctggtgggcggaaaccagcagttag

SEQ ID NO: 290104 - DNA, 1720 bp, Artificial Sequence
  derived and/or modified sequence
gcggcttctgctcagggaggcggaaggcggcggcgggagcggtcatggaggcgggcgccggagccggcgcgggagccgcgggctggagctgcccgggcccaggacccacagtgaccactctaggctcctatgaggcttccgagggctgtgagaggaagaagggccaacgctgggggtccctggaacgacgggggatgcaagctatggagggggaggtgttactcccagctctctatgaggaggaagaggaagaggaagaggaggaagaagaggtggaagaagaagaagaacaagtgcagaaaggtggcagtgttggctctctgtcagtcaacaagcaccggggactgagcctcacggagacagagctggaggagctgcgggctcaggtgctgcagctggtggcagaactggaggagacccgggaactggcagggcagcatgaggatgactccttggagctacaggggctcctggaggatgaacggctagccagcgcccagcaggcagaggtgttcaccaagcagatccagcagctccaaggtgagctgcgttctctacgggaggagatttccctgttagagcatgagaaagaaagcgaacttaaggaaatagaacaggaattgcatttggcccaggctgagatccagagtctgcggcaagcagcagaggattccgcaactgaacatgagagtgacatagcatccctgcaggaggatctctgccggatgcagaatgaacttgaagacatggaacgcattcggggagattatgagatggagatcgcctccctccgtgcagaaatggaaatgaagagctctgaaccatccggtagtttaggtctctcagattactctgggttacaagaagaactgcaggagctgcgggaacgctaccatttcctgaatgaggaataccgggccctgcaggagagcaacagcagcctcacggggcagcttgcagatctggagagtgagaggacacagagagcaacagagagatggctgcagtcccaaacactgagtatgacgtcagcagagtctcagacttcagaaatggatttcttagagcctgatcctgaaatgcagttgttacggcagcagctacgggatgctgaagagcagatgcatggcatgaagaacaagtgtcaggaattgtgttgtgagttggaagagctacagcatcatcgccaggtcagtgaggaggagcagaggcggctgcagagggagctcaagtgtgctcagaatgaggtgcttcggtttcagacctcccacagtgtcacccagtcatcccctacccccaatccccccatcttctccttgcctcttgtaggcctggtggtcatctcggctttgctctggtgctggtgggctgagacgtcgtcctaatgcagaacatgtttgggttgtggaagcctatggtattcttggctattgcagctgtggctctgtatgtgttacccaacatgcgacagcaggagtcagagttctgcctcatggagtgatggcagaccttggccagcgcgagggcagatccccagtggccaccaccctcagctttgggcaggacacactgtgccagaaccctccccatatgttccatgtgtccccatctcctcagcctcagtcacccaggctgaaaaggcttgtggggagcggctgacttccatctcctgccttgtgtaagaacctgagttccttgtaattaaatatcaactgaatta

SEQ ID NO: 290105 - DNA, 1341 bp, Artificial Sequence
  derived and/or modified sequence
atggaggccggcgccggcgccggcgccggcgccgccggctggagctgccccggccccggccccaccgtgaccaccctgggcagctacgaggccagcgagggctgcgagagaaagaagggccagagatggggcagcctggagagaagaggcatgcaggccatggagggcgaggtgctgctgcccgccctgtacgaggaggaggaggaggaggaggaggaggaggaggaggtggaggaggaggaggagcaggtgcagaagggcggcagcgtgggcagcctgagcgtgaacaagcacagaggcctgagcctgaccgagaccgagctggaggagctgagagcccaggtgctgcagctggtggccgagctggaggagaccagagagctggccggccagcacgaggacgacagcctggagctgcagggcctgctggaggacgagagactggccagcgcccagcaggccgaggtgttcaccaagcagatccagcagctgcagggcgagctgagaagcctgagagaggagatcagcctgctggagcacgagaaggagagcgagctgaaggagatcgagcaggagctgcacctggcccaggccgagatccagagcctgagacaggccgccgaggacagcgccaccgagcacgagagcgacatcgccagcctgcaggaggacctgtgcagaatgcagaacgagctggaggacatggagagaatcagaggcgactacgagatggagatcgccagcctgagagccgagatggagatgaagagcagcgagcccagcggcagcctgggcctgagcgactacagcggcctgcaggaggagctgcaggagctgagagagagataccacttcctgaacgaggagtacagagccctgcaggagagcaacagcagcctgaccggccagctggccgacctggagagcgagagaacccagagagccaccgagagatggctgcagagccagaccctgagcatgaccagcgccgagagccagaccagcgagatggacttcctggagcccgaccccgagatgcagctgctgagacagcagctgagagacgccgaggagcagatgcacggcatgaagaacaagtgccaggagctgtgctgcgagctggaggagctgcagcaccacagacaggtgagcgaggaggagcagagaagactgcagagagagctgaagtgcgcccagaacgaggtgctgagattccagaccagccacagcgtgacccagagcagccccacccccaacccccccatcttcagcctgcccctggtgggcctggtggtgatcagcgccctgctgtggtgctggtgggccgagaccagcagctag

SEQ ID NO: 290106 - DNA, 213 bp, Artificial Sequence
  derived and/or modified sequence
atgagcagcgcccccagaagacccgccaagggcgccgacagcttctgcacccccgagcccgagagcctgggccccggcacccccggcttccccgagcaggaggaggacgagctgcacagaaccctgggcgtggagagattcgaggagatcctgcaggaggccggcagcagaggcggcgaggagcccggcagaagctacggcgaggaggactag

SEQ ID NO: 290107 - DNA, 510 bp, Artificial Sequence
  derived and/or modified sequence
atgagcagcgcccccagaagacccgccaagggcgccgacagcttctgcacccccgagcccgagagcctgggccccggcacccccggcttccccgagcaggaggaggacgagctgcacagaaccctgggcgtggagagattcgaggagatcctgcaggaggccggcagcagaggcggcgaggagcccggcagaagctacggcgaggaggacttcgagtaccacagacagagcagccaccacatccaccaccccctgagcacccacctgccccccgacgccagaagaagaaagaccccccagggccccggcagaaagcccagaagaagacccggcgccagccccaccggcgagacccccaccatcgaggagggcgaggaggacgaggacgaggccagcgaggccgagggcgccagagccctgacccagcccagccccgtgagcacccccagcagcgtgcagttcttcctgcaggaggacgacagcgccgacagaaaggccgagagaacctag

SEQ ID NO: 290108 - DNA, 456 bp, Artificial Sequence
  derived and/or modified sequence
atgtcctcagcaccgcgccgccccgccaagggcgcggactccttttgtactcctgagcccgagagcctgggcccgggtacccctggattcccagagcaggaggaggacgaacttcaccgtacccttggcgttgagagatttgaagagattctgcaggaggccggctcccggggcggagaagagccaggacgaagctacggtgaagaagactttgagtaccacagacagtcttctcaccatatacatcaccctctcagcacccacctcccccccgatgctagaagacggaagactccacagggccccggaagaaagcccagacggcggcctggagcgtcaccaacaggggaaactcccactatcgaggaaggtgaggaagatgaagatgaagcatcagaggccgaaggcgcacgtgccctcacacagcccagtccggtgtcgacccctagcagctag

SEQ ID NO: 290109 - DNA, 384 bp, Artificial Sequence
  derived and/or modified sequence
atgagctcagcacctcgacgtcctgccaaaggcgccgattctttttgtaccccagagcctgaatcattaggtcctggaacccccggcttcccggagcaagaagaggatgagctgcaccgcacgctgggagtagagcggtttgaggagatcctgcaggaggccggatcacgaggaggtgaggagcctggtaggtcttatggtgaggaggattttgaatatcatagacagtcttcgcaccacatccaccatccactgtcaacgcacctgccacccgacgctcggaggcgcaaaactccgcagggacccgggcgtaagcctaggagaaggcccggagcttcgcctacaggagagacaccaactatagaggagggggaggaggattag

SEQ ID NO: 290110 - DNA, 438 bp, Artificial Sequence
  derived and/or modified sequence
atgtcctcggctcctcggcgtcctgctaaaggagcagatagcttttgcactcccgagccagagagtctcggcccaggcacgcctggattccccgaacaagaggaggatgaattacacaggacactaggcgttgaacggttcgaggaaattctacaggaagctggctctcgaggaggagaggagccggggcggtcttacggggaggaggactttgagtatcaccggcaatcttcacaccacatacatcaccccctctcgacccaccttccacccgacgcccgcagaaggaaaactcctcagggacccggccgtaaacccagacggaggcctggcgctagccccaccggcgagacccccacaattgaagaaggagaagaggatgaggatgaagccagcgaagccgagggagctagagccttgactcagcccagcccgtag

SEQ ID NO: 290111 - DNA, 213 bp, Artificial Sequence
  derived and/or modified sequence
atgtccagcgcccccagacggcccgccaaaggcgcagactcattctgcactccagaacctgagtctttaggccctggaactcccgggtttcccgagcaggaagaagacgagctccacagaactctcggggtcgaaagattcgaggaaatcctgcaggaggcagggtccagggggggtgaggagcctgggcggagttatggcgaggaggactag

SEQ ID NO: 290112 - DNA, 510 bp, Artificial Sequence
  derived and/or modified sequence
atgagctctgcaccgcgtaggcccgccaagggagcggattctttttgcacgcctgaacccgagtcgctagggcccgggactcctggcttccctgagcaggaggaggacgagttgcaccgcaccttaggagtggaacgcttcgaggagattttgcaggaagccggttctaggggtggcgaagagcccggacgctcctacggggaagaggacttcgagtaccaccgccagtccagccaccacatccatcaccccttgagtacacatttaccacctgatgccaggcggagaaagactccacagggtccagggcgaaagccacgacgcagacctggagcctcccccaccggtgaaacacccacgattgaggagggtgaggaggacgaggatgaggcttctgaggccgagggagcccgagctctcacccaaccctcgcccgtcagcaccccatcttctgtgcagttcttcctgcaagaggatgatagcgcggaccggaaggccgagcggacttag

SEQ ID NO: 290113 - DNA, 456 bp, Artificial Sequence
  derived and/or modified sequence
atgagcagcgccccccggcggcctgccaagggagctgacagcttctgcaccccagagcctgagagcctgggccctggcaccccaggcttccctgagcaggaggaggatgagctgcacaggaccctgggcgtggagagatttgaggagatcctgcaggaggccggcagccggggcggggaggagcccggccgctcctatggagaagaagattttgagtaccaccggcagagcagccaccacatccaccaccccctgagcacccacctgcccccagatgcccggcggaggaagaccccccagggccctggcaggaagccccggcggcggcctggggccagccccactggagagacccccaccatcgaggagggggaggaggatgaagatgaggccagcgaggccgagggcgcccgggccctgacccagcccagccctgtgtccacccccagcagctag

SEQ ID NO: 290114 - DNA, 384 bp, Artificial Sequence
  derived and/or modified sequence
atgagcagcgccccccggcggcctgccaagggagctgacagcttctgcaccccagagcctgagagcctgggccctggcaccccaggcttccctgagcaggaggaggatgagctgcacaggaccctgggcgtggagagatttgaggagatcctgcaggaggccggcagccggggcggggaggagcccggccgctcctatggagaagaagattttgagtaccaccggcagagcagccaccacatccaccaccccctgagcacccacctgcccccagatgcccggcggaggaagaccccccagggccctggcaggaagccccggcggcggcctggggccagccccactggagagacccccaccatcgaggagggggaggaggactag

SEQ ID NO: 290115 - DNA, 438 bp, Artificial Sequence
  derived and/or modified sequence
atgagcagcgccccccggcggcctgccaagggagctgacagcttctgcaccccagagcctgagagcctgggccctggcaccccaggcttccctgagcaggaggaggatgagctgcacaggaccctgggcgtggagagatttgaggagatcctgcaggaggccggcagccggggcggggaggagcccggccgctcctatggagaagaagattttgagtaccaccggcagagcagccaccacatccaccaccccctgagcacccacctgcccccagatgcccggcggaggaagaccccccagggccctggcaggaagccccggcggcggcctggggccagccccactggagagacccccaccatcgaggagggggaggaggatgaagatgaggccagcgaggccgagggcgcccgggccctgacccagcccagcccctag

SEQ ID NO: 290116 - DNA, 213 bp, Artificial Sequence
  derived and/or modified sequence
atgagcagcgccccccggcggcctgccaagggagctgacagcttctgcaccccagagcctgagagcctgggccctggcaccccaggcttccctgagcaggaggaggatgagctgcacaggaccctgggcgtggagagatttgaggagatcctgcaggaggccggcagccggggcggggaggagcccggccgctcctatggagaagaagattag

SEQ ID NO: 290117 - DNA, 510 bp, Artificial Sequence
  derived and/or modified sequence
atgagcagcgccccccggcggcctgccaagggagctgacagcttctgcaccccagagcctgagagcctgggccctggcaccccaggcttccctgagcaggaggaggatgagctgcacaggaccctgggcgtggagagatttgaggagatcctgcaggaggccggcagccggggcggggaggagcccggccgctcctatggagaagaagattttgagtaccaccggcagagcagccaccacatccaccaccccctgagcacccacctgcccccagatgcccggcggaggaagaccccccagggccctggcaggaagccccggcggcggcctggggccagccccactggagagacccccaccatcgaggagggggaggaggatgaagatgaggccagcgaggccgagggcgcccgggccctgacccagcccagccctgtgtccacccccagctctgtgcagttcttcctgcaggaggatgattctgctgacaggaaggccgagaggacatag

SEQ ID NO: 290118 - DNA, 456 bp, Artificial Sequence
  derived and/or modified sequence
atgagcagcgccccccggcggcccgccaagggcgccgacagcttctgcacccccgaaccagaaagtctcggccctgggactccaggattccccgaacaagaggaagacgagctccatcgaaccctgggcgtcgaacgatttgaagagattctccaggaggccggaagccgcggcggcgaggaacccggccgctcttacggggaagaagactttgaatatcatcgccagtctagccaccacattcatcacccactgagcacccatctcccacctgacgcacgcagacgcaagacacctcaaggcccaggtagaaagccaaggcgaaggcctggcgcaagccctacaggcgagacacctaccatcgaggaaggagaagaagatgaggatgaggccagcgaggcagagggcgcaagagcgcttacccagccgagtccagtgtccaccccatcttcatag

SEQ ID NO: 290119 - DNA, 384 bp, Artificial Sequence
  derived and/or modified sequence
atgagcagcgccccccggcggcccgccaagggcgccgacagcttctgcactcccgagcccgagtcactaggcccaggaacccctgggtttccagaacaggaagaggacgagctgcacaggacgctgggcgtggagcggtttgaggaaatcttgcaggaagcggggtctcgaggaggcgaagaaccgggaaggtcttatggagaagaggacttcgagtaccacagacagagttctcatcatattcatcaccctctgagtacccatctgcctcctgatgcgaggcggcgaaagactccacagggacctgggcgcaaaccacgaagaaggcccggggccagccccacaggggagaccccaacaatcgaagagggggaagaagattag

SEQ ID NO: 290120 - DNA, 438 bp, Artificial Sequence
  derived and/or modified sequence
atgagcagcgccccccggcggcccgccaagggcgccgacagcttctgtacaccggagccagagtctcttggacccggcaccccaggattccctgagcaggaggaagatgagctgcacaggacactgggtgtggagagattcgaggagattctccaggaagcaggaagccgcggcggagaagagcctggccggtcttatggtgaagaggacttcgaatatcatagacagtccagccaccacatccaccatcccctctctactcacttgcctcccgacgctagaaggcgaaagacgccccaaggcccgggacgcaagccaaggagacggcccggggcaagccctaccggggagacccctactatcgaagagggcgaggaggacgaggacgaggccagcgaggccgagggagctcgagctctgacccaacccagtccctag

SEQ ID NO: 290121 - DNA, 213 bp, Artificial Sequence
  derived and/or modified sequence
atgagcagcgccccccggcggcccgccaagggcgccgacagcttctgtacacctgaacctgagagcttggggcccggcacccccggtttcccagaacaggaggaggatgaactccatcggaccctgggcgtggaacgttttgaggaaatactgcaggaagccggttccagggggggggaggagccaggacggagctacggtgaggaagattag

SEQ ID NO: 290122 - DNA, 510 bp, Artificial Sequence
  derived and/or modified sequence
atgagcagcgccccccggcggcccgccaagggcgccgacagcttctgtacccccgagcctgagtccctgggccccggtaccccaggcttcccagagcaggaggaggacgaactgcataggaccctaggggttgaaaggttcgaggaaattctgcaggaagccggttcccgaggaggggaagaaccggggcgctcttacggcgaggaggattttgagtaccaccggcaaagcagccaccacatccaccaccccctgagtacacatttgccccccgatgcacggaggcgcaaaacaccccagggacctggcagaaagcccaggcgcagacccggggcaagtcctaccggggagactccgacaatcgaggagggagaagaagatgaagacgaggcttccgaggcagagggggctcgcgctctgactcaaccctctcctgtgtccacaccctcgtccgtgcagtttttcctgcaggaagacgacagcgcagatcgtaaggccgagagaacgtag

SEQ ID NO: 290123 - DNA, 456 bp, Artificial Sequence
  derived and/or modified sequence
atgtctagtgcgcctagaaggccagctaagggtgccgattctttttgtacacccgaacctgaaagcctgggcccaggaaccccaggctttccagagcaggaggaggatgagcttcatcgcactctgggcgtggaacggttcgaagagatcttgcaggaggccggatcacggggaggtgaagagccaggtcgctcttacggagaggaggacttcgagtaccatcggcagtcaagccaccacatccatcaccccctgagtacccatttgcctccagacgccagaaggaggaaaactccgcaagggccagggaggaaaccacggaggcgaccaggggctagtcccacaggcgaaacacccaccatcgaagagggagaggaggatgaggacgaggcttccgaggccgagggcgctagggccctaacacagccctctccggtaagcacccctagcagctag

SEQ ID NO: 290124 - DNA, 384 bp, Artificial Sequence
  derived and/or modified sequence
atgagctccgccccacggcgaccagctaagggtgctgattcgttctgtacccccgagccagaaagcctgggtcccggaacgccagggtttcccgagcaggaggaagatgaactccaccgaactctgggcgtggagaggtttgaggaaattttgcaggaagccggatctcgtgggggagaggaacctggaaggtcctatggggaggaagacttcgaatatcatagacagtcaagccaccatattcaccacccactttcaacccacctgcctcccgacgcgagacggaggaagactccccaagggccaggacgcaaaccaagaaggagacctggagctagtcccacaggggagacgcctaccattgaggagggagaggaggactag

SEQ ID NO: 290125 - DNA, 438 bp, Artificial Sequence
  derived and/or modified sequence
atgtctagtgcaccacgtaggcccgcaaagggcgcagatagcttttgcaccccagaacccgaatccttggggcctggaacaccaggcttccctgagcaggaggaggatgaactacacagaacgctgggtgtggaacggttcgaggagatattgcaagaagcaggctcccgcggaggcgaagaacccggtagaagctatggagaagaggactttgagtatcatagacagtcatctcaccatattcaccatccactgtcgacccacctgccacccgatgccaggaggaggaaaacacctcagggccctgggagaaagccacgcagaagaccaggcgcatctcccacaggtgaaacaccgaccattgaggagggcgaggaggatgaggacgaagccagcgaagctgaaggcgctcgggctcttacccagccaagtccatag

SEQ ID NO: 290126 - DNA, 213 bp, Artificial Sequence
  derived and/or modified sequence
atgtccagcgctcctcggcgacccgctaaaggcgctgacagcttttgtacgcctgaacctgagtcccttggacctggcaccccaggtttccctgagcaggaggaggatgagttgcatagaacgcttggcgtggaaagattcgaagagattctacaggaagccggttcacggggaggcgaagagcccggacggtcttacggagaggaggactag

SEQ ID NO: 290127 - DNA, 510 bp, Artificial Sequence
  derived and/or modified sequence
atgtcctccgccccacgtcgccctgcgaagggagccgactctttctgcacacccgaacctgagagcctgggacccggaacgccaggcttccccgaacaggaagaagatgagttgcacagaacacttggagttgaaaggtttgaggagattttacaggaggccggtagccggggtggggaagagccaggaaggtcttatggcgaagaggatttcgagtaccacagacagtcttcccatcacattcaccaccctttgagcacacacttgccccctgatgcaaggcggcgaaagacacctcaaggacctggacggaaacctcgtcgtaggcccggagccagccccactggagaaacgcctacaattgaggaaggggaagaagatgaagacgaggcttccgaagcagaaggtgcccgagcactgacccagccctcaccagtatctacgccctccagcgtgcagttcttccttcaggaagacgacagtgcagatcggaaggcggaacggacgtag

SEQ ID NO: 290128 - DNA, 793 bp, Artificial Sequence
  derived and/or modified sequence
cttctgtgccttcctctctctcagtgagtgagtggagttgagctcctgccctccacccagccagcctgcttccctcctgccggtccccaaggacctgggggagggaagcctcctgccggcctgtactggggagggggcaccccctccctgcaggggcatcttgggctctctccagagttcttccattcgtctgcttcctgtctcggcagcccggccccggctccacggggtgtctcaccctccccaccacaccctctctggtctcaggcccacctctggttatgcctccgcctcgttgccctgaaagccgcagcgacagcgaaaagggctaagattcggccatgagcagcgcccctcggcgccccgccaagggcgcagattctttctgtacgccagagccagagagcttgggccctgggacgcctgggttccccgagcaggaggaagacgaacttcaccgcaccctgggcgtggagcggtttgaggagatcctacaggaggccgggtctcgtggaggggaggagccaggccgcagctatggggaggaagactttgagtaccaccgccagtcctcccaccacatccatcacccactgtccacccacctgcctccggatgcacgccgccgcaagacaccccagggcccaggacggaagcctcgaaggcgcccgggagcctccccgactggagaaaccccgaccattgaggagggggaggaagatgaggatgaggccagcgaggctgagggggcccgggctctcactcagccgtcccctgtctccacaccctcctc

SEQ ID NO: 290129 - DNA, 500 bp, Artificial Sequence
  derived and/or modified sequence
ataaagctctgcccagcccatgcccaccttctgtgccttcctctctctcagtgagttatgcctccgcctcgttgccctgaaagccgcagcgacagcgaaaagggctaagattcggccatgagcagcgcccctcggcgccccgccaagggcgcagattctttctgtacgccagagccagagagcttgggccctgggacgcctgggttccccgagcaggaggaagacgaacttcaccgcaccctgggcgtggagcggtttgaggagatcctacaggaggccgggtctcgtggaggggaggagccaggccgcagctatggggaggaagactttgagtaccaccgccagtcctcccaccacatccatcacccactgtccacccacctgcctccggatgcacgccgccgcaagacaccccagggcccaggacggaagcctcgaaggcgcccgggagcctccccgactggagaaaccccgaccattgaggagggggaggaagatga

SEQ ID NO: 290130 - DNA, 571 bp, Artificial Sequence
  derived and/or modified sequence
aagccaggaaatgcctcctgagagaggtgaaggcagcgtctcagtatgcaagggaagggattcagggtgaaggttatgcctccgcctcgttgccctgaaagccgcagcgacagcgaaaagggctaagattcggccatgagcagcgcccctcggcgccccgccaagggcgcagattctttctgtacgccagagccagagagcttgggccctgggacgcctgggttccccgagcaggaggaagacgaacttcaccgcaccctgggcgtggagcggtttgaggagatcctacaggaggccgggtctcgtggaggggaggagccaggccgcagctatggggaggaagactttgagtaccaccgccagtcctcccaccacatccatcacccactgtccacccacctgcctccggatgcacgccgccgcaagacaccccagggcccaggacggaagcctcgaaggcgcccgggagcctccccgactggagaaaccccgaccattgaggagggggaggaagatgaggatgaggccagcgaggctgagggggcccgggctctcactcagccgtcccctg

SEQ ID NO: 290131 - DNA, 610 bp, Artificial Sequence
  derived and/or modified sequence
attatcactccctccctcatctttgttgctttctctccgggcctgggccttgactcctttctccctcatttttcttgcggcctttcccacctcctctctcctcctccctctactcagcctctcggcccttttcggcccccctcgcctcagtcctctcctgtctccttgttcttctcttttcttcctataaataactctcctctgtgctgtggctgccgctaagggccactctgaggcccttcatactccaggaggatccccagcagcgcagcctgcgcgtggtggctcctgccctcccagggctctcgatggtgatcaggcctctcccccatccaggttatgcctccgcctcgttgccctgaaagccgcagcgacagcgaaaagggctaagattcggccatgagcagcgcccctcggcgccccgccaagggcgcagattctttctgtacgccagagccagagagcttgggccctgggacgcctgggttccccgagcaggaggaagacgaacttcaccgcaccctgggcgtggagcggtttgaggagatcctacaggaggccgggtctcgtggaggggaggagccaggccgcagctatggggaggaagact

SEQ ID NO: 290132 - DNA, 702 bp, Artificial Sequence
  derived and/or modified sequence
agaccacccctcccctccggcccccccgcatagtccttcagtcccgtccggggcgcccagactgggggttgcccggggcccccatccccaatctccgggttgagaggcgaagccaggaaaggcgggtggcgggttatgcctccgcctcgttgccctgaaagccgcagcgacagcgaaaagggctaagattcggccatgagcagcgcccctcggcgccccgccaagggcgcagattctttctgtacgccagagccagagagcttgggccctgggacgcctgggttccccgagcaggaggaagacgaacttcaccgcaccctgggcgtggagcggtttgaggagatcctacaggaggccgggtctcgtggaggggaggagccaggccgcagctatggggaggaagactttgagtaccaccgccagtcctcccaccacatccatcacccactgtccacccacctgcctccggatgcacgccgccgcaagacaccccagggcccaggacggaagcctcgaaggcgcccgggagcctccccgactggagaaaccccgaccattgaggagggggaggaagatgaggatgaggccagcgaggctgagggggcccgggctctcactcagccgtcccctgtctccacaccctcctcggtgcagttctttctccaagaggatgacagtgctgaccggaaggcagagaggacc

SEQ ID NO: 290133 - DNA, 456 bp, Artificial Sequence
  derived and/or modified sequence
atgagcagcgcccccagaagacccgccaagggcgccgacagcttctgcacccccgagcccgagagcctgggccccggcacccccggcttccccgagcaggaggaggacgagctgcacagaaccctgggcgtggagagattcgaggagatcctgcaggaggccggcagcagaggcggcgaggagcccggcagaagctacggcgaggaggacttcgagtaccacagacagagcagccaccacatccaccaccccctgagcacccacctgccccccgacgccagaagaagaaagaccccccagggccccggcagaaagcccagaagaagacccggcgccagccccaccggcgagacccccaccatcgaggagggcgaggaggacgaggacgaggccagcgaggccgagggcgccagagccctgacccagcccagccccgtgagcacccccagcagctag

SEQ ID NO: 290134 - DNA, 384 bp, Artificial Sequence
  derived and/or modified sequence
atgagcagcgcccccagaagacccgccaagggcgccgacagcttctgcacccccgagcccgagagcctgggccccggcacccccggcttccccgagcaggaggaggacgagctgcacagaaccctgggcgtggagagattcgaggagatcctgcaggaggccggcagcagaggcggcgaggagcccggcagaagctacggcgaggaggacttcgagtaccacagacagagcagccaccacatccaccaccccctgagcacccacctgccccccgacgccagaagaagaaagaccccccagggccccggcagaaagcccagaagaagacccggcgccagccccaccggcgagacccccaccatcgaggagggcgaggaggactag

SEQ ID NO: 290135 - DNA, 438 bp, Artificial Sequence
  derived and/or modified sequence
atgagcagcgcccccagaagacccgccaagggcgccgacagcttctgcacccccgagcccgagagcctgggccccggcacccccggcttccccgagcaggaggaggacgagctgcacagaaccctgggcgtggagagattcgaggagatcctgcaggaggccggcagcagaggcggcgaggagcccggcagaagctacggcgaggaggacttcgagtaccacagacagagcagccaccacatccaccaccccctgagcacccacctgccccccgacgccagaagaagaaagaccccccagggccccggcagaaagcccagaagaagacccggcgccagccccaccggcgagacccccaccatcgaggagggcgaggaggacgaggacgaggccagcgaggccgagggcgccagagccctgacccagcccagcccctag
